United States Patent Application Publication US 2019/0348154 A1 - sequence listing, part 18

SEQ ID NO: 68761 - DNA, 909 bp, Acinetobacter baumannii
ttgatagctgctttcttatttgcaatcatctatttattagttcttaaaaaaactgacacagcctcaaatacaagcacacagcaacacgctgtagcagctgagagcaaggactacagtaaagaactgcatacaaacatggcacgtctaggcacgatttcggaagtcaataaaatacaaggtaatctacttgcttggacgattgttattaatggtacacctcaagttgtctttacaactcctgatgaaaaagtcgttatcacaggtaacgcatttgatgtaaacactatggatagcgtcagtcttccaattctccaagctgcacagcaaaaatacggaaatggcacaccagaaaatccaagtggtttaggtacaccgttaggtcaggaacaagtatcagtagactttgccgaaatagtaggagaatggaataaacctgctcctgctgcaattgaagtactggcgaaactaaaaggtgcaaaagagggtaaaggatctgatactgacactctatatgtactttatgatccacgctgcccgaactgccacgaagcttaccgtgctacacgcaaatatgttgaaaagggatattcaatcaaatggattcctacagtattgctaaaacagtctgatgatggatataagcttgcagctgcaacattacatgatccaagtctattaaataaagcattttccaaagacactactggcctaccagacgctacagcagcggacaaaaaagctatcgatgagaatcaggcattcttggtgcaagcaactcaacaaagtaccaatagtaataccattgcagtaccaaccgctttctacttaaacaaaaagactggtcagccaaaaatggctactggcctctctgatgcaagtatccttgaaatgatctttggtaaaatctga

SEQ ID NO: 68762 - DNA, 1407 bp, Acinetobacter baumannii
atgaatcaacataatcacagaacctcagattcaagtacagatacattgatcatcgtaggtgcaattatattcgtcactgtgggcttcttttggggagcatggcactatggcagtgtagctatagttaaaattactcgaaccctatttggtatcattgaacttccattctggtatttgcagctattaatcaagaagatcaccaatagtgatgcttcagtattgaattttacaaccaatacaatcagcaaattgtgttatccagatcccaaccattacttaaaccctttaatgaattgcactgtcaatataaaggcaattccttttaatttttactatatcaacaatctgtttccatccatgttgattgcaggagcactgattggatatgtctggtacaaacatagtaaaaatcttgttgatattcctgacactcgttacgtcaaagaccacgaccttgaatcgttaattctcgaattaagcgtgctctaccctcaccttaagtacatttcatatttcgttcaatcgaaagttccaaacgataaaggcttttacagattaatgctttctccaagagaatttgttctggaatacaagctcgtatctggttttagaaaatatgaaattgagtctatcgctgatttcaacgatgaacagaattttggttcttcacccaaagatgatgtgtatccgttacttgatgaaaagcaatttgaaaaggaaatgtatatccagttaggcgatttattaaattcaccaaaggatttaacagacggggaaattaatttatttgctatcttcctaccagtagcatgtgccactgatgaaaatatgtctgataaagaatttaagtcgatcttgaaaaataaggatcaagttttagattatttttggcatgtagcgtacaagcaactaactactgataaaaagtttatcaaccctcaaaatctcaaacctagaagttatcagtcatttaaccgaaaaaaacttgaaaagaccgtttctaaatattggaaacatccagtagctcaagaaattttcagtcaacatgcctatgccagaacagctctgatcgccactatttatagagcacgaatgttaggtgtaatcgcaccctgcgaattacgttggttgcgtatgtatgaccgaaatttatgggctttagttcaaagcgtaggtagaccaagtgttttcgttgaacaattggcagctttctctcattacacgtcagaatgctattacaaaagaaagaaagtatctccagacttcagctacggatggcttggcctaaatgaagctcttaagcgatacaaatacaaacagcctgatgtatatctcaatcaccacaccccacaaattgaatcagctcaggatttagattcagtaaaaattgctacagtctcatcatag

SEQ ID NO: 68763 - DNA, 651 bp, Acinetobacter baumannii
atgcctcaacttcacagattaagagtttcggttagtttagacaaattgccaacaagacaaagggaatttcttttgtcctttttaaaggtcaatgattttgatgcaagcaaattatacagtcacctaatctattactttttcactcatcccacaaaaagttcagttagtaatatcgtgggttttcttggcagcagcaaagataaagtgacacttaattttaatagtgaagtaatggtcaaatttttatctgaacgcaagcagacggatagagaaatttactgtctgtcagcactgtatgaaatgtcaaactatctggcctacatgatctcgcaatactttacagctttggagatccgaaaagatccaattgccacagcaaaattagaaaatgaagttttccaattaggttgtggatcttttctaaatctattcattgacctaatgagagatgaagaattcaaacgtaacactattgttatgagtgcaagctttaaccacgaaaatctacaaaccgctttgctgattaatagttatacagagcaacttgatacagatgaaattgttgctgtgcagcagatccacttagaagaaaccaaaacagaaaatgatgtcactccatcagatgactggaatcatatctctattgcttag

SEQ ID NO: 68764 - DNA, 1047 bp, Acinetobacter baumannii
atgagtaaaacattagttgttggcgtagatgatggccatgatggaattaagatctacaatggtgagttagccattcaattcagaatgccgtcccgtgtagcgattggtgcaactatcatgggcgatcctgatgatgtaaatagaaagatcatcagcgtaaatggcaataaatacactgttgatgagttttgctcagagcatatcgacacacgtactgaagattatccagtcagtgaggccaatattgcactcgtatatcaagctttggataaggcattcggcaaggactatcgtgaatttaaaattgccactggactgcctttgaaccgtttctatggtgggcaggacggaacgaaaaatattgaattaatcaataataaaacaaaaaacctgatgattaatctgcgtgataaatctgtctttaacctttatgaagcgtctaataatttagatcctatttcaatcactaaacatatagttttatctgaagcgcaatgtgcctactttgatgcactaatgacagataaagggaaaaaaaccgatctgtatgatgacttatttgagggtggatgtgccgtgattgatattggtggacgtaccactgatattgccgtaattaatcctcaaggtggaacaatgcaaacctctcgttgtggaacactggatgttgggatcattacccttaaatctatactcaatcaaaacattaaagcaaagttgaaaatgtcaacagacatatcagattggcgactaaataaagcattagaatctggcactttatcaataggtaaagagagccatgatgtatcagacctaattacccaagccaaagacaaggttattgagcagatcgtcaataaagttaaagtgcatgtgagagacggaaaggatctaggtgcagttctgcttgttggtggcggttctatcacactaggtgaacaacttaccaataaacttgaatacaacaacatccagatcgtaaaagatcctgaattcgcaaacgcaagaggcatgtataaatgtgctgcgtttatggcaagaatctaa

SEQ ID NO: 68765 - DNA, 264 bp, Acinetobacter baumannii
atggaagaaaaaaataacagttatatggattggggcaagacaaggctcattcctcaactttataaaatcaacgttttagtactgtttttcattgttcttggtgcaatgttcttcaataaagttagctttattttatatggagcgatcattgcactacctatttgctattgcatcgagaacatttggaagatcccctattcattcgtatttcaatacattcggtgtttcctatttgggaaagttaagacaccaaaaagaagataa

SEQ ID NO: 68766 - DNA, 1350 bp, Acinetobacter baumannii
atggataatagtatgcctactgaactgcctgaacaggaagtaattgatattcctgatagctattatcagtcagggaatgtagctacgattcctgaaaaagtgctcaaaaagcatggttatgaaatgcttctgcatgacaccatccgtgttgataattttgaacttacatctgaaactgatgtacgaaaaattttaaccattgccgagcactttaaagccagtgatatttttgccttgtctggtcgccctatccttattcgtagatatggcaggctctatgctctgacatatacgaatattaaggggatcgaattagattgtttcctcacaacaattaacggttctgaggcactttcttcaatcagacgaggcattggccttaatttcgcttactcatgctccttgttcgaccctaactcctctgagggtataggaggatttgtggcagaagatagtgaaaatggtaataccaacgttattgctgttgaccgcaataaagttgtatttcgctgtaatatttcagcatgtatggatctcacgggtaatacatcattccagatcgtaatgcgcttgatcccatcaaagccacctaaatattcagatattggtgttgaactagaatatctactgaagtgtatccctcgtattgggattgtatacatggcaggtgagacaggttcgggaaaatctacaacactttcttcattcatccgctacatacttgaagaagatactcacattcaaggcaacatcatcacaatcgaagaaccaattgagttccgttacaacgagattcaaagtagacattcggttatttctcaaagccaagtaccagagcatttttcttcttttgccctcgctgtaagagaagccatgagacgtaagcctgcattattgttggtaggtgaattacgggatcaagagtcattttctgctgcaattgaactgtcacaaacaggccaccccgtactatctactgttcacagtaatgacgtggcaaatatcttacctcgtattttggctcttgttccaaaagagcagcaaaaccgaaaactcacagaaacaatcgctacagctcatgccttaattgctcaacgtctggttgaaactattgatggtaaacaaatggctgtaagagaaacattgtttatgaccaaagatttcagaagcaagttacttgacatagcaattagtgacgatggtttttcgggtgtggttaaagaaatacgctcagtcatgaatcagccaactggtacagcattttcatcacctaattttgaagtacaggctcataaactacttgctgaaaatagaattacgcaggcaggttttgatgcactacttgcatag

SEQ ID NO: 68767 - DNA, 834 bp, Acinetobacter baumannii
atggctgacttaccgaattatcagttctacttagaacaaacgccaattattgtttctcaatcagattcagcaaaacaagctgaaaatacagctcgtgttgaagcgattcaaacgattgtacgagaagctgcaacccgtaacgctctacgtgctcgtcttcaagaaatttcaaatgttgttaaagcgaacgaccgcaaattagatacggtttataactttcaacctttaatgatcaatacaattgttgtaccgcctgtcattgttgaggcacacaatattagtgatgtaggcaatgcacggactttctccgtcttgggtacacgttacgaaattaaagagaatgcccgtttttctcatttaccaccaaactggagagactatctaaactttaatgttgagtcttatcaggtgggagtggattcattacctaacgaacttaaaccgaagaaccaacaggaaaagaaagcatttcaaaatgctatggatcgtggaatagaggatggtgtcaaagaagctgatgccatcttttcacatcagcttaaccgtttaaatcaaacttttatcgggatgctgaagttccatcaattccgaatgaacggaaaaataacgatgcctgtaattgcgagaacaaacatttctctcgcaggtggtggaaatgccctgatgcttaatcagtcaaacttccagattaccgagttgcctcgattcgttaatgatccatcgtattggaaagccaatactctttcgattgtttcacggtcagaagttaaacaacctgtccaaacttctacagtaagtgaatctgatacccctgtagctatcgagactcaatag

SEQ ID NO: 68768 - DNA, 471 bp, Acinetobacter baumannii
atgaaaaaagtaccaatgtccatgttgaagctcttttcaacattctcagtagtattagctttaacaggctgtcagagttactactatgtaccctcaccaaaatttgatgttgaatctccattaggtgtattaagtaaagctgctcaggatgctgtagcagaacaacagacttacgccctgactcaacgccaatacttagataaccttgccatcactaattcaaacatcaataaagatgtattggttgtggactttgtaggggattcacaaactctacttcaaagtgtggcttacagatttggttatcgtttcattgaagcaggcaacattcgccaactacctattgtcaatttccataagcgcaaaatgacaggtgcagatcttgtaaaagatacagcactccaattaggtaacgctgcaactgttgaatttgattcgcagtctaaaaccatcacattaatccatcgttaa

SEQ ID NO: 68769 - DNA, 2130 bp, Acinetobacter baumannii
atgtacaaagaacataatagaatgactgctatgacactaatcaattttaagctgcaccctagttttattcatagtgcgatcaaagatcaagcgagtggcattgataaagcgattgcagaactcgttatgaactctcttgatgcaggtgcaacgagagtagatattcacgtcaatgaaattgatgaaaaatatcatttcacaattaaagacaacggtaaaggttttacccaagaaacaattgaaaattactttgcttggttcggtgctcctcatgatgaggatgatgcaatttttgggaaatttcgtctcggcagaggtcaaatttttaactatgcttcaacggaatggttcagcaatcaattcgccttaaaagtagatattgaagaagctctaaataagaaaagcgatactttaggttttgattttgatgaagtcaaaacttctaaagttaaaggttgtgagattaaaggcattatttatgataagtatggtaaagataacttttcaattcaatcttttaaagaagatctaaaggatattattgaatacatcgatttgcctgtctattttaatggtgaactattaaatacacccaaaagaaaaatacgttctaccttaaataaaggcgatatactttttgaagatgaccttgcatattatattttaaaaagatctgccgatagttttgaaatatataatcttggcgttcgagttccttatacatggtatgaagaaagcctattaaaaggtatcattatcagcaaaaagccgtttatgcttacagcttccagaaatgaagttatagtagatcgctgtccaatatacaaacaaattatttcaaacatcacaaacttacatgaagaaaaatatttaaataagtttttgtatagagaagttcaaaaaaatgaaaaaaggaagaaagttatagatgagagtgctgctattcatattattgaaaatatcatcaaaaataaaactgtttatgacgcaaaaattattcttgaagctttccgatctccactatttgaagattacaagaaccgaactttgtctgctgttgacttagtaagtactaaagccattatgctttttaatgaagactatgattatacaaaagttgaaaaaattgagagcaaattcgatgctttaattgtagatgagaatagtacattaagatcatttttgaataacttctattattcctatagaacggcatggcaacaggattttaatgcacaggcaacatatttgtcacctttagaacagttcttgtttattattaaaaccatgctcaatcgctttagcaataaatgctatgacgtacctgaagacatactttacagcacggctattgagtcactggttgaagatcgaaagatctttgctgataacgagctaacctctggcggtaaacaatacttaagcttcctgaaccatatcaatgaccgcctgtttgaactacatggccgtgttttcaatcaagataagcgtgtaattcatcttggtgaagctccagatgcagaagcttggacgaaccacagtggttacattgttttcagtaccaatactcaaaaatattttaacgaaaaacaatatttaagacttttattgatcctgatacacgaatattgtcacaaggactcatcagaaaaagcccatgatattgaattttatcaagagtttcacgatttcataattgaaaaggatctgaattctgttttagaaaactatatttccgcatctctggccagtacgactaaggaacagatctgcctagaacttccaaaacaagaagaagccaaaaaggacgatttaattgtccaaagactaactagcctcatcaattcgcctacgcataagaatacattaatgcttgatgcacttataaaagatatgaatcttaacttctatgcagcggataataagacactttttggtgtcaaatacaatacatttagaggatgggtaacagatccaagtagttcacgacatcgtaaccctagaacagctgtatggaataattttatatatagtttgatagctcatcgattaggattcaaagatactaatgagttcctaaaattgcgtatggatcttccgaatgagtatggtctgttagagggaaattaa

SEQ ID NO: 68770 - DNA, 801 bp, Acinetobacter baumannii
atgatatgccttaagaacaaacttgttctcactttatcttgcatgtttttgtcaggctgcatgacaacaacaaattttcagttatctggcatacagcgtaagcagtttatgctgattccctccagtgagtacttcacacaggcaaaccagaattatcaaaatttgatgaatggttataaaagtaaaggtgtgctcgatagaaaaccagatatgactaaaagagttctcaccattgcacagcgcattactgcacaggtggagactattaagcctgctactaaagactggacttgggaaatgcacgtcattaacacctcaacggtgaatgcgttttgcacaggacaaggcaagatggcggtttttgagggcatgattactacgctcaaccttactgatgatgagcttgcagcaattattggccatgaaattgcacacgccttacttgaacatggccgtgaacgtgcttcaacggatctggtgacgaatctggctctaggtcaaattggcggtgatgcgcaaaccataacctattacgtgtcgaaattaggcctatcactaccttttagtcgtcatcaggaaagtgaggctgatcttttgggtttacaaatagcagccaaagcaggttataacccaaacgcagcgattagtttgtgggctaaaatgggggaattgcaaaaaggatctaataacaaactttcagggcttttaagtacacaccctatacctgctgaacgtatgaaagcacttgcattagctgcaccaaaattcatgcctttttatcttgaacataaatacaaatag

SEQ ID NO: 68771 - DNA, 393 bp, Acinetobacter baumannii
atgaaattgaacgatcagctagaacttgatattactactgaagaaattcaaaaacgccgaatctatttagggaatacggtagatatttctcatatttataagtttcgcattgcagtcaattggcatggtgttttgatcaaaaccaagaaagacctacctgactacacttccattctcgaatgtgacaatgaggaggttgcggatttggttttgaatgctgttaaaaaggcagttaaacgcagagcttatatcgttcctgaatttgatccactcggttcatacgagattcaaaaaattaggattagtttgtggatcagtgcggtcgaaagattacttggttatgaaaaatcccaagagttcagaattatagacagcaattttaaattgcattaa

SEQ ID NO: 68772 - DNA, 459 bp, Acinetobacter baumannii
atgaatatcattgaacgtatgggtggccacattgaggctaacacgcttcttaaaaatcccttagctaatagagccaccgactttgacttaaaacaaggtcgattcctatgtcgcttggaacgtattcaaactaaagcttggagacatctaattaatgctgatgaagaagtaacaatcgatgatccagatccaaaggatctgattaacattggtgagctatgtaaagcattggtatcgcttaattcaaagccgataattgccccctgtataatttggaatgaatttgacaaggcattcataagcagcatagcagctaaagggaaagcattctattatacgatcaatatcgataatgccatgcgaaccactgtagatgaggctttagatattattctgcacatgaattgtagaagtgaagtaaaattggctatgcaaatacaccatgtacaaagcgagtag

SEQ ID NO: 68773 - DNA, 393 bp, Acinetobacter baumannii
atggccataacacgacctgactggataactgaccagatgtggaatgcaatgtgtaatgccagaatgtctctcccctcacccatcgatcaagcggatcttagcaagccttttgtctatgaccgcagttatggtgtttttttcgtacctagtggatcacatcaggttgccatgtccctattgttagcatggaaaaaccaagagaaaaatggtgtacgtgtggctgagaaattagggctttcttatagtgatggaactgctgattattatctggaacatgttcaaggtactgcctttttgtcttcagtcggtaaacggatctgttcagggaaaaaaagtcatttgaatgaacttgaaaaggaatactttgggatcatcaactatttgttcgattaa

SEQ ID NO: 68774 - DNA, 363 bp, Acinetobacter baumannii
atgcttaataatttgaaagaaacgaataaaggtaaatttatcaaaaacgctcaaaacggtttcataagtgatattactttcgcaggttgggttgtaattatcatcgcaatttgtcttattggttctatttcgataggcgcatatcagatgactgatgcaaatgcagatctacttaaagaggtaaacgcaacagtcgaattagctaaaaagcagccattttctaaagagtttaatacagcaatcaagccttatcttgaggacggcagaattacaaacgaagaagccaaaataattttaaaagaatacgaaactattaaattgaagtacaacatttcagcatcagagttttcatcaaaaaaatag

SEQ ID NO: 68775 - DNA, 438 bp, Acinetobacter baumannii
atgctgtatatggattggttcattatcttgttattagcgtatatggcagcaggcctagcgacttatatggtgattggctttgttccagtaggtaagcgtaaacgtttcattttcacggctaatgcgcccgtattgatcgccatagcagctttctatttcctagtgcctgtgccaagcattattcaaaataattatattaaatctgtgtacaatctgaaactcaatacacctgatccgatcctattcaatacgagtgtagctttagacagaatttgtactggccatagtctgaaaggttatcaatatttcatgtttcaaaaggcgtatcgtgaagatatggaattaacttttaaaaaggctaaatcagggattacattctctaatatggatcatattgttggccacgatcaggataaaatctgtgatataaaaatctga

SEQ ID NO: 68776 - DNA, 333 bp, Acinetobacter baumannii
atgaccagtaaattcgatttagaaaattattccgaagtagaattaggtgagctgatcaaagaggctgaaaaattaaaagcttcaaaagcagttcaaacaaaaattaatgcttatgaccaacttttagaaattgctaaaggtgttggattgtcactggatgagttgatccagtttggccaagaaaattctaagaaagaacctaagaaagttgtcgaaccaaaatatcgtaataaaactaatccagatgagacttggacaggacgaggaaaacagccgaaatggttagtaaatgaactcgctaatggaaaaaacctttctgattttctgatttaa

SEQ ID NO: 68777 - DNA, 4419 bp, Acinetobacter baumannii
atgaatgcagtagtaggcgcaaaaaaaggcagtaaaaaacaacggcaacctgtcatttcaccagattctgcacaatcgaaaacttttatcaaggttctatatggtttagctgaaggcgagattgaaggtttagctaatgggcttcagtcaatttatttagaagaaactccacttcagaatgcagatggaagccttaactttgaaaatgtaaaagttgattttagaaatggtactaatgatcaggaatacattgagggttttccagcagtcgaaagtgaaaccgccatcgatgtggagttaaagtctgaaacgccatgggttcgagcttttagtaatcttgatcttgatgctgttcgtttgcgcttaaagtggggtcctttgcgtactcagaatgctacaaatggtgatgtatcaggcgtaacgatcgaatacgcaatcgatttacagactgatggaggtgtctggactgaagtactaaaaaccaagatttcagataagacttctgcaaattacgagcgagcacaccgcattgatttgcctcgagctgattctggttggcttgtacgtgtacgccgtctgacgccgaactcatcttctgaatatatcagcgacaagatgtatattgcagctgttacagaagtgatcgatgcgaaattacgttacccaaacacagcattattgggccttcaatacgatgccgagacctttggaaacgttgctaaagttgctgtggatgcgaaggggagaatcctaaaagtccctacaaattataatccggttacacgtcagtatattggaatgtgggacggtactttcaaagaggcatattccaataatccagcttggatctattacgatatatgcaccgtagaccgttatgctttgggtgaccgattaaccccgctaatggttgataagtggtctttatatcgtttagcacaatactgtgaccaaatggtgccggatgggttgggcggtcaagaaccacgctttacttgtaacgtttatcttcagagtgccgaaggtgcatttgagattttaactaagttagctggtgtattccgtgctatcacattttgggatggtaatagcattatttgtgatgcggatattccccaagatacttacttcacgtatacccgggctaatgttattgatggcaattttgagtacgcgggaacccgtgctcgagatagacataatgttgtaaaaattgcatgggataacccagctaatcactacaaaaccgaatatgagtttgttcgcgatgaaaaggcgattgctgaggccggccaagttcgtattttggaaattgatgcttggggatgcacttcgcgtggacaagcgcagagagcaggctggtgggcattagagtctgagcaacttgaaacacgtactgtgtccttcaaggttggtctggacggttatataccattgccggggaaagtgattgaagttgctgatcctttatttgcaggtcgtgcaaatggtggtcgtgtatcagctatttcagcagatcgtaaaagcattacgcttgaccgtgatgatgtggtcgcagttgccggtgacaggctgattattaatggcgaggatggaaaggctcaagcgcgtattgttcaatctatctctggtcgagttgttactgttactcatgagtttgacgctattgctactcaaaatgtgtgggtaatggatgcccaagatttagcaacaatgaagtttcgagtgatctcgattactcaagacgaaagtcatcaattttcagtgactgcacttcaatataacccagccaaatttgatgcgatcgataaaggtgcttattttgatgaggttccgatttcgattgtgaacccgtcactacaagaccctgtttctgatttaacgattacaagtgaaagcagagtagaccagggaattaacgtagcaacaatgattgtgtcctgggcgcaagcaaaaggtgcagttaagtatcaggttgagtggcgtaaagatgatggtagttggattaagctgccaattactggcaacaactcagtcgaagtaccaggcatttatgcagggcagtatcaagcacgtgtaacagcgatttctgcatttgagatcgcttctttaccagtttattcaactttgactgaactctctggtaagcagggtttacctccaaaattggcatttatccaagcgacaggaatcttatttggcattcaactgaattggggtttccctgcaactggtgctctagatacagcttataccgagattcaggtttcaccggatggtaccagcaacattactcaattgggcttattcgcttatccaactaccacacatacgattcaaggcttgcagccaaatctgactcaattttatcgtggccgcttgatcgataggattggaaacattggatcatggtcggactggactcatgcgacaacttctgccgatgcaacagatgttcttgagctcttgaacaatcaaataagtgaaacacaacttagtcaggatcttaaaaccaagattgatcatattgagactattgatgctgaaattggaccaattaagcaagatattcaaaatacgaaagatcggattgcacaagaagtcattgatcgacaaaacgctattcagcaagccaaagatggtttatcacagcaaattattgatggtgatgaaggtgttcttgaagttgtaaatactgttaaacagtcaagtgaagatggtattgcagcagttcagcaagacattcaagttgttgcgaatgatctttcacttgtagcagaaaaaacggacggtgtatatgcacagttaaatccacctttgattggatctgagtctgatttgatcggtaatgatcagggcttcgctggcacatggtctgttcaatcggcaatgatcgaaggggatttagcacttagtaagcgtattgatacgacagttgttgaagttaatgatttacgtgcttacgcacggcaagaagttgaagcgcgaattgaaggcgataaagtaacagttcaaaagattgatacgtatatcgcaagtaatgatagtgctcttgcaactgtacgccaatctgcacaggtagcagttgagcaatcatcggcaaatgccgaagcgattgattccattaatcttgagcttgatgataaagcatcaactggtgcacttgatcaagttaaatcagatatcaaagatgttgataataagattattgctcagactacgagaattgacggcgtatatgcacagcttaacccgcctttaatcggctcggaatccgagttaattggtaatgagggaggttatgcaggcgtatggtcggagcaatctgcacgtattgaaggcgatttggctcaatctaaacgtacagatcaagttgttgcaacgattaaagaaaacgatgctttatacaagcaacaaatcaaagcgaatgctgatgctgtttctgcaaacgtgcaagcaacaacaaccttgcaaacaaccgtaggtcaaaacaccgcatcaattcaggaggtgagcgaatcagtaaacggcttgtatgcgcaaaagtacatcaagcttgacgtaaacggcaaagttgcaggatggggcggtgctaacgatggcaaagaatctgattttattctgaactttgattcatttgcgattggttcaggtgatagcactggttattacccattcattttccgcaatacgccttacaccgacccaaacacaggcacggtatttccggtaggggcttatctcaaaaccgcatttatggattatgcatctattgatacgtcccatattaaagacttggctgtgaaatctgcgcagattgataatttggcggtgactagtgggaagattgatgatttggcggtgactacgctaaaaattcaaaatgaagcagttacagtgccaattggagtctcaaacccaaatattgtacggaccactggggaatttttcccgcaatactttgatttcactgctcaattgaccgagtgggaagcaaagtttagcccgcttgcgacgataacgctaaatagacaaggagggcaatgcagatttgatgcttcttgtaatgtagcagcatctgcatatttgactgcttatgctcaagacaacggcaatcttagtgaaaatgacagattgatgctcagattagtgctttctgtatacaaagggtctgttctggtggggcgagcggaagtgccgccgacacaagtgcttggtcaatctggattctattttgaaggagctataaacgctcttgcgataatagacactgataacacaattggtactacgacttacactcttaagcttggatttgcaaatagagggagtagagcaataagagttgtattgaatcacccatcaggtgtattcggtgtgaataacattcgttttgttgcgctggagctgaaaaaatga

SEQ ID NO: 68778 - DNA, 237 bp, Acinetobacter baumannii
gtgggcttatatacaattagatatggctatcgtaataatagtttttttatagcttcaaatgctgctggacaattcattgtgattgatgcattaggagcagatttccaaataggtcatcaaatttcttatgaaggtaccaaaataataaatgaaactttaaatgatgagacagaagcaagagttcatctggagagtaatgaaaaagaggcttatgaatatttacgtgccatgaaataa

SEQ ID NO: 68779 - DNA, 594 bp, Acinetobacter baumannii
atgggcttctaccgtaccggtaaactttggtctttcgaacatttcgatattacgccagacgttgttgcatttggtaaagcgttgaccaacggattaaacccacttgccggtatttgggcaaaagaagaaatgattaatcctgaaacgttcccagtgggttcaactcactcaacgtttgcttctaacccgcttggtacggcagttggtcttgaagtcatgaacatgttggctgaaaaagactacgaaaaacaaatcatggaaagtggtgcttatttcctagaaggtctaaaagacttgcaatcacgtcatccagaaattggtgatgttgatggattaggactagcattacgtgcagaaatttgtcaggctgatggctttactccaaacaaagaattgttggataaaatggtcgatatcggtctttcaggtacccttgaataccaaggtcaacaatgtggtttggtgttagatgtaggcggttattacaagaacgtaattacattcgcaccttcactagagatctcaagagccgaaatcgatcaagcgatggtattacttgaccaattattagttcgagctaaacgggaaatataa

SEQ ID NO: 68780 - DNA, 309 bp, Acinetobacter baumannii
gtgtcagatactctgagacaaacaggggaaatagaaaaaattttaagttctgcccatgatttgtatgacgatattagtgcggcattttatgaaatgaataaaaacttccttggactagttaaaaagacagatgattattctttaattttagctaatttaaaattaaaattggaaaataatcagattaaaacaataagagaaggtattgaataccaaattgcatggaaaacaatattgtttcatgaatattatgatttagctgaaaaagtagaattattagaaaaagtaaaaaaatctaataaagagtaa

SEQ ID NO: 68781 - DNA, 894 bp, Acinetobacter baumannii
atgtctttattgcgggaaattcaaaaagatgccgtgaattcaaatgtaagtgtttctgatttactgagaaaatgtaaaattttagcttatagactgggaaatgaagatttcaaaagttgggttgactttgaacttaatggctacgaatctgatgatttattaccagaatatagaaaaatatatgtaggatctaaagggcattttgtaggaagttttggcaggagctttaataatgcagatattccgattcatggtctcccagaaaaattacaagagatatgtactaaagcaaattttagtaaccccatcgcagctttagaaagctatacagttaatgataaaaatggccaattaacccagagttggaatctagctatattagccaaatatggctcgaatatgtacagtgatttgaattgcatacaagcgtggaaagtaattcctatagctgctgtcattggtataattgatacggtcaaaactaaaatattaaattttgttttggaaattgaaataataaatccaaaagccggagaagctgaattgaactctaatccaattcctcaagaccaagttagtcaagtgtttaatattaatattagtggtaatgttcagaatttagcatcaggcaatcatcatagtaatattcagcaagaagttattaatcatattcctcaagaatttattaaattaatagatgagttaaaacaatcagatactgataatgaaatatctaatgaaatttcaagaagaattgaaattttagggactgcgataggtacagatcaatataaaacactctataatgaacttatgagttttgtatctaatcatgtgacaattttgggtctccttgcgccacatatcccaatgttgacaagttatttatcttaa

SEQ ID NO: 68782 - DNA, 552 bp, Acinetobacter baumannii
atgcaattatcacctactttagtcactgtagatcaggatcaattctgggaaataaatggaaatattgaccttgcaatcatacctgcaaatacaattgatggaattccttttgaacttcctattagactccaagatggtaataaagcatttggatacaagcacattctagagcgacatggccatgaatttgctagattaagaccaccttgtgatgtttttgatttcatatacaaaaaactagcacaaggtggggcgtttcattatcaaacacataaaagaaaatcactattcatgagtatgcacccatcaggtgttcttatacttgaatacgttaaaaatggtaaaaactcctatttatctatcgtaacgtgctatacaagacaacgtggcgttgatggagatcgtgtcggaagttactctagtactttccaagtaaaacctaatttagttcagccaaataaagtagataatgaacaggctattggccaacagaatattgcacaagagacagttgctattgagactatagcagtgccaaatgaatcagcataa

SEQ ID NO: 68783 - DNA, 1224 bp, Acinetobacter baumannii
atggcaaacttacctaactcctacgctctacctctaaagattgtttctacacggctcaaccacatgaaaactgaattaacgggtgtgatgaaaaagattgagcaaagggcaatatacaatcaaaaaatgagaaaagatcattcagatgatattcagttattgctgacatgggacgattggatctacgctgcacttgattgcaaccatgagcttaagcaggccagaatcgcaaaagagaacgaaatagcacggcaaacaagtgttattgaaaaaatgctcaacaattataataacaatcagccttttggtaagggaattgataaaagcaaagctgcaaatggatctgtatatgagcaagctttacagaatattaaaggtgttaaaggctctaaacctgcatgggcaagtaatctcaaagtaggtgatcatatccctaaagaactgctcgatgaactgccagtaaccacaggggaattggtaacacttggaaactggatgctgaccaaaaatatctatcgttttgaagatattgtgattaatgaaattttgaaaactggttttgatggagtcataccgaattatattatcaatcttcctgatctatgtatttatatccagactgacaatgccaagcttatgtttgaagacaatcgggttatgggagtgcttttctgcgttactgagctttgtggacagagagttttagtttctaccatgtatttagatactggtatgcctcgcactatcgtaatcacattaaatgaagatctggatattgaatcaagtcttggggattttgttgatgagtttcagcaagactatgatccagaaaccatgcaggatgatttaaacgtaagaattgagatccaaaaaaaattaatcaatcttgtgctctggtttagccaacaaaagcctgaaatttcaccaccaattccagagggcagtaaacctgtacaattcactcaagtaaagaaagagaaacgtctttttgaagcatccaagtataagacttatatgattggtacggaaacggcaaaagaattcactagaatttatcaggaattagaggcagcaaaaaaccaagccaaaggtacaggaaaaagaacacctcatttaagacgttctcactggcacttgtactggtacggaaaaaaagggaaaaatgaacgttatgactttaagttgcttccaatcactatggttgggggcattcctaaagcataa

SEQ ID NO: 68784 - DNA, 624 bp, Acinetobacter baumannii
atgtctacgcgaaaaccccgtcaggcacgagccaaagtcactgtcgataccattattgaagcaggttttattgccgtagctttgcatggaccaagtggtaccaccacacgtcatattgcggaaattgcaggggtgagtgtggggtctctctatgagtattttaaaaataaagaagaaatttatgatgcgatgaatcactactttgtgagtgaaattctcgacatgattaaagagctaacccccacaattttagagttggagttagagcctgtcattgaaatgattttttatacgttcagtgatttattaaagaaaaataatgaccgttacttaaccgttttacgttacgcaggtgagttgcaatacgacaaatattttccaaaaattgaacaggctttaatggaagtcatcatgaaatatatgatgcataatcctaaatatttaaaaattaataatttacctgtaattacctatatttgtattaatagcggtatttttaacgtagcaaggcatcttattttacctaacccatttattagttttgatgaaatggtggaagggttaacaactatgatcatgagttatatcaacactgaaatggcacgctcggaagaccattcataa

SEQ ID NO: 68785 - DNA, 723 bp, Acinetobacter baumannii
atgtttgatatgcgtttatctcatgagcgtggtgcagcacatcatggctggttacagtcaaaacacacgttttcatttgcaaattattgggacccgaaacaagtcggcttttcagatttgcttgtgattaatgacgatacggttgctccatcaaaaggttttggtactcaccctcaccgcaacatggaaattatttcttatgtgcttgaaggtgcgttagaacataaagattcaatgggcacaggttcggttattgtgcctggtgatattcagttaatgagcgcaggccgtggggttgcacatagtgaatttaatcactctgctcaagaaaacgtgcacttcttgcaaatttgggtggttccaaatgaagtgaacacaacaccgggctatcaacaattgcatatttccgaggaagacaaacgcggtaaattgcacttgatgatttcaccagaaggtggcgaaaaaactttatccatcaaacaagacattaatatttattcaggtctttttgatggtgaagaaacagcagaatttgcaattccagaaggtcgttatgtttacctacatgtggcaaaaggccgtattgatgtaaacggtaaaacctttaatacaggtgatgctgcacgaattcgtgatggaggcaagttatcatttactaatggtgacaacgctgaaattctgatttttgatatgcgtcctgaagaaattccaaccatgccataa

SEQ ID NO: 68786 - DNA, 531 bp, Acinetobacter baumannii
atggtaaacaaacagtcaataaaaattattgacctgattgcaaaaaattatagtcaaggtctgtctccagatgagtattccttatttacggctgtaagtaaaagttcaggtatgccagtacatttagactactatggtttttttgaaaaccgtaagatttgtctactaagtgaagttgatgatgaagttgagatcacaggaaaatcaaagataaaattgtattttcgcaaagaaacacttcaagtagactacttggatgcaatcactgaagaagtgaaattgatgccaatttcaaagatacttttattggaaaaaactcttttttctaaattattgagtccagttggagacttcaagtttagtatagagtttgaagtaaaagggcaatttattgaatatggatttattcatatcctaaaagttatacaattacttatagagaaaaatttaccattctttaagttatgtgactttttggattcaggaaaatttaaactgcaattaatagcaaatggagctgacaatgtttga

SEQ ID NO: 68787 - DNA, 672 bp, Acinetobacter baumannii
atgaatacaacaatacgaaatacttatgacattggctctgaactttttggtttaaaggttcgtcaggtagcaaatttgcccaaagaaaaaactcaagatttcatcacggaattgttggactcatatccaaaatctgatgggcaggggtatgtttctaatgagaaatcaaaaagaggttattcgatagaagaagtagacaataaagtcatcatcacttcatttatccatgtagatcgagataactggtatgaaatcgtttgtgggtttgatttcatcgaaaatcaagttttcatgtccttaatgacggagagtaattcaaagatatttaagataggtgatggaactgaagctttttcaacaaaaacagtgtctataaatgagtttatgaaagtaggggagcagggtgaaccgtctaaatttgaaacactcataggttcactaacgattgcacttttccctgagtcgctgtttgaagcgtactcattgaaagacgttctccatttcggcattcttttttcaaagtcttattatgaagcagatcaaagtataaatctgactactaggaatgttctaagaaatcacctttcggctagtaatactcaagaacacattcttgatctggagacaaaagcatacttaattaatgctccatttatggcacttagatggtaa

SEQ ID NO: 68788 - DNA, 408 bp, Acinetobacter baumannii
atggaactaaataatacaaattttcaattgaagacagttctactcagctattgtcgaatgcaaagtgaaaaattgaaatataaatatatggatggttatgtagatccagagagctgtgcaacttatctatatcctgtagtttgttttctcacagaatcggagtttatgtattactacagccgtaacaaagatcaagattcagagatactttttgaatatgaagaaaataaagatttgtcattatttaagccgattaaagtaacaccgactactgcactaaaatccatatcttttagtatgatagccccatttttctatttttggttaaagatgttagttgagcgatattttgacaaacttgaactcatttatatacattttcccaaagaacaaatttttaaaaattga

SEQ ID NO: 68789 - DNA, 1017 bp, Acinetobacter baumannii
atggaagctgacgaaatattcactaaagagggtataaatttaattaaagaacgttctgaggaagtgattgaaaactcattacagagattaataataaaaaaagatcaattaattaatgctgttcgagaaattggcaaagatgatgctgctcaatttctgaataaaacgatgagtgagattgttgatagtctttatagacttaaaacaatagaattggatcaacattataaaaatcccttgttcatccctgatcttcgtttgcaccagtctaatactgctagtatgtatcgtgctattggagctgcattgagaaaagataatatctcttttggaagatatacgttatctaatccgataactgaggaaagtaatcggttgttgagagctaaaaatgaagtaggacaggagagtatagcctctactagagaattatacagtcatctcagattacacagaaatgtaaaagggcttgaaaatgaaatacatgctgttgcttttcaaataattcaaagccagattttacccttagcaattagtgaacttatacgacattcagatcctcaatataataaaatgaaagaaagatcactgcgtatcttaattgatagagcagaggcatttttcaaaattaactcatcaaaaaataataatgatctttcattagatgcgatgtttaataagaataatttcgcaagtaaagctcggttactcgatgttacagcaaatgcttactggtcaagaacctgcgagaagtttgcccgatgtggagaagcattggttacggatctctttaaagaaaagggtgtaagtgtgggttatatcgttcaatgtatggaagatcccaaaacgaatggagaaagatctggtattacaccctctggccaagatagggtagagatattgcaaagttacaaagagaccatgcaaagtttgcgtgagtatgtttttaaaccaaaacattctgctaaaaacactcttgaggtgaacgcagagttagaaaattctgtgagagtatga

SEQ ID NO: 68790 - DNA, 891 bp, Acinetobacter baumannii
atgaacttactagacgttatcactggaagcaatgagccagaaaagggcgcaaaaacgatggagtcaattgaggtggaattacacctgattgatgaagatcctttaaatccacgcaaatttctttcagataaagatgaagacgaaatggtggaaagcattaaggatcgtggaatattgcaggctatcgtcattattcctcatcctgatgatgctacacgctatattgtaaaagatggcaacagacgcagaagaaacgcactcagagcaggtttaaaaacgattcctgccgtgattaaagctgaattctctgaattagatcagctgactgctaatgtcatgcgtaaagatatgacaatctttgatctgagccacagtatcaatcgcctgatcaccaacaaaattgccaagcaaaagcaaatcggactcgcattaggctttaatgaggccaaaacaagtaaaattgcttcgctaacaaaagatgttcaccagagcatcattgataatcttgagtggatgcacaatcaaggaatgtgtaaagacttctcggctatgtatgagattgcgaacctttctaaagaacatccagatgaagttatcaaatgggtagaaaaatttgcggcttctggtaaatctcttgggatgccagaagtgaaaaagcttaaaaatcaatttatcattgatgaggaaaaagagaataaagaaacaaccaaagctcctgactacaatgagagagtcatcattgatattactgtgaaaggaaaagacagtcttgatcgtatttcattattgtctcaaggtaaaattaaagatgaggaagaaagagtggaagttcttaacgatctggcagagttaatcaacgatcttaaaattattcaaaaacaatataaataa

SEQ ID NO: 68791 - DNA, 861 bp, Acinetobacter baumannii
atgcaaaaaatcactgcaaaagactcaggaatccttgctattggtaatagtaaaggtggcgtaggtaaaagcacattctctgttcattgtgcttttttctttgctgaaaaaggctataaagtagctttgattgatcttgataatcagggtaatagttctaaacatttattaaaatacaataaagaagtcaccttacctgcttatgtaaaaaaatcagagacaaacactgtcttaaaaggcaatgctgtagatctattcctaaatgaattgtcagactcacagttgtctatcaatagtggggcaattgctgtgtttcaaccaaatctagcattggccaacatcaacaacagtatcgataatgaaaaaacgaaaatatttaaagaaaatatatctaaactactgaaacataaaacaattattatttttgacactccaccaactttaggaaatctattgcttattcctttatccgtttctcatctggttgttatgccaacattattaaaaagttatgcggttgatggtatctctgaatatattgcttttgcacaaaaaattaaaaaggctatgaaccctgatttggttttaggaggtgttgtacctaatttagtaaataaaaaatctgaagtacaaaaaactgctttggccgatcttaaccgtgatggaaaggcttcaaacctaatctatttagaaaatgattccattcttcatttcacggaaaaaaatgtaatcgaagaagcagctgaacttgggatcgcaacatggcatatccaaaagaattcaaccagaccagttaaaaagacattctttacccttttcaagcaaatttcaaaacagctcaaacttgctgctgacaagtaa

SEQ ID NO: 68792 - DNA, 405 bp, Acinetobacter baumannii
atggttttccatgaaatggtagaaaacaatacaaaaaaaacaataatttatgtatttaaaaacatttcacctaattcattaaccaccgaattttcacaatgtttgggaactttaaattcacccaatgtttttggtcatgcttctcctttgaatctgcaaggtgtacttctaaatatttttgaagtaaccatttcaagttttgtttttcctgcttggtgtaatgttttttacattaatgggcataagaatcgtgctattcccaatattgcattgagttctatagaacctcaactaagcagtgcaattgatttctttccagatgcaatagaaacactaaaatcgctttattccattcaattaaataacattgaactgaatattgatgatgtgtttattaagtcttaa

SEQ ID NO: 68793 - DNA, 306 bp, Acinetobacter baumannii
atgctaatcgaccacatttcactactggaagaacataccgcaacagttttaaaaaaaatagatccagaagtagttcaagctctcaaaataattaccaaatctcactctgaagcactattcctatataaatatggacaagacatccaaaaatttatatttagtatctatgttgatgagtttggtcttaatgaaatggatgcagcaattaaacacgctttaattgaagatttcaccaagttaagtttaacaaaaattgagtcattagcattaatttcttatctgcaacgtgaacaatgtacacaataa

SEQ ID NO: 68794 - DNA, 639 bp, Acinetobacter baumannii
atgacaaccatgacggcaattttccctcaccattgggtggttgaggaaaaagactggaatcaagtggaaaaaaaacctactcagctttcgctattagattttcctgaaaaagagttgccttttaatttaaaggactcgaagaactggagtgagcaaaatcctaagtttcaagaaaaggttatcttagaaagtgggcgtgatcatttcatcatcgattttcgtatagatctttctgaccaagaatttttcaatatgatcaacgattacttgtactctttggaagcaagaagcactgtcttggactctttcgattctagacttgtacatacagttaatgcttctgagatttcaaccagattgggtattacaatatctgattttgagttgaagatgcagaaattagctacctcctcattttctgttgaacaatatcgtaaagtcattcactctaagacgagcaagcgtgagcttaaatttttgaagctgttttcaacgaatctagtcagcgagtatgtaagtttcgctgtcggtactgaagttttttatagttttaattacacgcagtactttgagaagtattatcaaaagggcagtttgtatagcaatattatgagcttaccattcggaaaagccatctaa

SEQ ID NO: 68795 - DNA, 306 bp, Acinetobacter baumannii
atggaaaaaggcgaaaaaaaattatatgtccacgcaggcattcgtattaccaaatccaagaataaggttttagtgatatttacgctcgatgataagggtaatatcgataaagaacttcattttgaagccgatgcaggtgacaaaaatcttcttggtttaatcttcgagggatactttgaagatgatacagccagattgaacagatccattacactacaaaagggcaagtttgaggacaagtccctcttaactcaatggatcgctgaacagaatacagctctatctgatgctaaaaagacatcctag

SEQ ID NO: 68796 - DNA, 489 bp, Acinetobacter baumannii
atgaaaaaatttaacttttcgaattttatcgtgtgcctcttaactacaaatacttatgcagatttttctggaaaagtgtatagcgtaactgatggtgatacgatcactgtgatttcaaacaatcaaaaacagattgtacgtttggaaaatattgatgcgccagaaacttctcaccctaatagtagtgtaccgactcaaccttatggccaagcttcacgccagtttttaaacagtctggtttatgggaaagttgtctatgtaaaatcaaataaaatggatctgtataagcgaaacattggcacggtgtacattggtaatatcaacgtcaatttaaaccttgtagaaaacggttttgcttggtattcaagagaatatggcaatgaccaatcctatgctgatgcggaaaatagggcaaaatatcgtaaacttggcttatggaacgataagaatcctatttatcctgctacatggcgaaaatacaaccgctaa

SEQ ID NO: 68797 - DNA, 225 bp, Acinetobacter baumannii
atgttagataaaaaagataaagccaaacgcaattctaatgatgtgaaattgcacagaaataaacgaaaagaacgcatagaaagcggtaatccagaactctggaatatcaaagattgtgctgcaatcctttcgaccgactacttacgggcaaagtatggttttatggcttggcaaaagattggtcagcttatgaattatccactccatacagaacttaaaaaatag

SEQ ID NO: 68798 - DNA, 381 bp, Acinetobacter baumannii
atgcgaactgtacaaattagttttgttggcgacaatgccaataccaagtctgattttttcaatttttctgacaacacattcactctgttagaaaaaatatttgaaaaattcctccccctagtcaatcctcacaataacttcagccaaaaatcaaaaaacactgatgcacccataatcgggatcagtgatgcttttttaataaaggctgctctttcaaaattgctgtacatagatcgaatgcaattccagattgaagacaaacttcaactgactgagcttttaatgaaagttgatcatattttccacagatcaattaatagttattacacacccaatgtctttacaggcgcatttactctaacaatagataaaaggaaataa

SEQ ID NO: 68799 - DNA, 237 bp, Acinetobacter baumannii; identical to SEQ ID NO: 52173

SEQ ID NO: 68800 - DNA, 213 bp, Acinetobacter baumannii
atgaatattatgactgacaaagatgcaaaacagctatctggtaaggaaatcctagagggtctttttgaagatcaacgagcagctgctcgtaatcctcaacaccctgtaaacgatcaattacgtgccactttaaaagctaaagctgagaaactacaaaaattaaaaaatcaagaaaaaacaagtgagtccacagcaagctatgacagaacgtga

SEQ ID NO: 68801 - DNA, 1506 bp, Acinetobacter baumannii
atgacagaacgtgataaaaatcctgaaccacaatttgctgttatagtcgcaggtggtaatggttcaggtaaatctaccttaatacaagaacaaattttacctcgctttgaaaagttcaattttgacattgcttttatcaatgcagacgtttggcaaaaggaacattttggtgaatttaccaaagatcctagccatgcttatgaggctgcgaagtgggctgaacaagagcgtcaaagatatatagataacaaaaaatcatttatagctgagactgttttctctcatccatcaaaattggatctcattaaagaagccaaagataagggttattttgtaaccttgtatcacatccatttagactctcctgaactcgcattagagcgtattcatgatcgtgttttagagggtggacatggtgtagatgaggagaaagttagacaacggtatgaacgtgttatccctcttatagctgaagcatctatgtatgctgatcaaacttttgtttttgataacagtgtcagaaatgaaccacatagccttgtaatggaattgaaaaatggtgtaatccatgatgtataccgtgatttaccaaaatgggttgctacaggctatgaaaaacaattaaaagcttattacaatgttaaccaagattcatctttgatagagaatctgataactaaaggtgacaatatgagcttcattaaagaaaagttgggatttgaatggaatcctgatttaatgccgaaagaaatacctacctaccatcgagcgcaagtaattcagaattttaacatgactctagcagagcatgttcatggatctgctgctgtggcaggtaatccctattcactggatgagattaaacagctgataaaaggacaatctgttggggggcacaatgtaagtgaccaaaagcaagttgtgaatcttatcagtggagcgaacttcatatctgaatctgtaatcaacaatacgtttagactggataaatcaaattatttagaaattaatcgattagtttctaaggatgaatcaattgaagcaggcgtattacgtggcgaaggtaaagaaacaacatttacgccccacgttgcaattagacataactattctcataagcctttaaagactgaagaagatgcaatccagttaaataagcaatttagtgatggcattgcagttttaaattcaataaagaatccattagaaaaaggaatggcaacttttcttttcggttcattgaaccaattcacatttgagggtgaaaagcgtacagctcatttgatgatgaatggtgtattgcttagtgcaggtttggatgcaattaagattcctcctgaaaaagctattgattttagacagaacatgaatgaattctataaaactcgtaatgctgacaaaatgatggatttcttgttagaatgccatccagatcgtgaaaatatcaaaaaggttcagcaagacaaagatctcaagattgataactcaattaccagatctttctag

SEQ ID NO: 68802 - DNA, 885 bp, Acinetobacter baumannii
ttgataagcattggtgcaaattactatcgagcttcgagtgattacgttaaaggtctatcagctgatcatcttgcgtttctaactagactacattttgtatttgataagcttgggttgcagtctacaaaggttgcagagattttaggccacaaagatcctgttctagtttctgcatggatggatggaaaagtacttccatcattcgaggaaatagagagtttctgcaaatattatttcattaatgaaaattggcttaaacatgggaataattcaaataatctctcttttacgccccatattgtttatagaaaaagctttaacagaaatattgaatcacagttgcaatttattgctgaatatagagacataaagattgagactattagattaatacgagacaacacaggtagggttgttgcttctgtagactatggaaataaacgttatgttacccattattttcataatctaaaattaaaagatgaagatagtatcggttctggtgggtttggtgatctaactcacttagcagcattctgtaaattattagatgaatattttaacgcggtgttaaccatatcttataacgtgcatgaacaagatttagaaaaaatcgtaacaggagagtgtattcctgatgatcttggaatttgggggcagcaacatgctagccattggtacgaaacaattcatagttcaattgccactaaagaagacaaagattcaagctattggaaaggatcgattagtttattcacatcacttcagaaaagcgacacttacgaaagactcattaacaatattgaaaaaaattctgaggactataaggcatttaactatagttacaaacagaaattccaatcttttgattattttaaaagttag

SEQ ID NO: 68803 - DNA, 198 bp, Acinetobacter baumannii
atggtaaatcgaattagagaagcgtttaaaaacacaaatggcatagttgaacatgaattctcagatgaagtaataaaagcatcagaaaaaaggatcaatgagattattgagagaattgcaactggccaaagtacttttgaagaagaagatgatcgcctgatggcagaatgggaacgtaataatcaagaggataaataa

SEQ ID NO: 68804 - DNA, 312 bp, Acinetobacter baumannii
ttgtctacacaatctacagatattacgtttaatcatatattcagacatttgctagaactaacgcaattaaatgaagatccagatacgctaattcagttatttaatgagcaaggtcttacgattgatgttcaaagaattgaagcttggactaaggatttttctgatccatcagctagacgaatgccaaagatgatgttctgtggctttatgaacattctaatgaatatcaaaaatgaagcacaattaaaagagattaatctttttgatttgagaggaatacttgaggacattcgagaagcagaaattatttaa

SEQ ID NO: 68805 - DNA, 819 bp, Acinetobacter baumannii
atgtctaattcaaaattaatttgtttatgtttgatttcctttttttcaaattcggtatttagtaaagtaccacaattaagttctgatcaacttgggcaatacgctaaccaattaaataactcacctaaaccagtttcagcgcataatattaatccaactataagtaatgtctcttttaatcaaaaggtcgatgtttctagacctgcttacagatctacgagttatacgggtaattcaaccagtgagcaagcaattgaatctcaaaaagttaaaagggaagaaaataattgggttgtagatttggtgaatagtaaaaaaccacaacaggtgaattatgcaaattttcaacaacaacctctgcaaactcaatcaaatcaatatcaagcgcaagcaggccgaaaggctactttaaattgtgtaatacaagcagcacgtagcgagggtgtacctttgtttgtattgcttggtattcaaagtaaagaacgaggagagaatggtcagatcaatgcgtctaatgacttagggcattttcagatcaatactcaacatttcagagcagggggcatgtttagtaatatagatatgaatcttgctcgtcatgatggatgcctgaatgcaacacttgcagctaaagtattgagaagccgtcttcagtcaaatggatctgctgatttctggacaaaggctgctgcttatcattcttggacacctcagttgaatgcaatatatcgaaatggaactcttaaaaacaagggtcttatagagtattcgatgcagtggaaaaagtggctagagttgaatgggattaatcctaactaa

SEQ ID NO: 68806 - DNA, 1674 bp, Acinetobacter baumannii; identical to SEQ ID NO: 52242

SEQ ID NO: 68807 - DNA, 288 bp, Acinetobacter baumannii
atgattagattatgtattgagactccatctaatgaaatttttgaccaggcccaagagcttctatttaaacttggctatgagtggaatggctttgaaatggaaattgaaggtagccagaagttcatagaccgcaacggtgctacggcgatctacactcatcctgatgaccgtacacttgaatcttggatggggtttaaagatgattcgttgccagcacagaatgatttcgaaggcggttataagctagtaaccctggaagaactgactactctgtcaaagggaaattga

SEQ ID NO: 68808 - DNA, 372 bp, Acinetobacter baumannii
atgggccaggcaaaacaaagaggctcacgtgaagtgcgcatcaagcaggcacaagaacgtaagttagaaggtgagagaattacaattgaggaagcaaagaaacatcttaatcttcctgagggtagtgagtttaaaggatatgtgattcatttgccggatacagatgaatttttaagcgtatttgaggaaacagaagccatggtaaacactgcttatgcaaaaatcccggatctggctaaagtcttccagtctatagaaagcgccgtagaagtggctgaggagatcaccaagcatagaatacttatatgtttgctctttgagtccgataaacagtattttattcaaccagtttgggcgaactttgaagagtag

SEQ ID NO: 68809 - DNA, 534 bp, Acinetobacter baumannii
atgaataaatttattgttattgggtctttgttggttccatcattaacgtttgctcaagagtggaaagagtcatctgtgaaggatattgatggtgaagttccagctgtggaaatcagtagtgaatctggtgacagtaagttaaaagtttataagaaaaaaattggtatacctgcattaaaagtggcacctacagaacgagctgtatttgagttttcaactaatagcctagaccagattgaagcacgcaaacagattgtttacaaagccactcaagggagagtttttaatctaactccctcttcaagtattggtggtttgacgaataaggttgaaacagttgctttccacggtcaatcaagccctcaatgcgggatcgtaggtaatatgattaattcggatactctaactgttagatacataaccactggcgataaaaatgtggatgtaaaatttaaactgcctcaagacaatacagcgctttataacattttaaaattggacagtaccaaagactgtaaaatcatttcagaatag

SEQ ID NO: 68810 - DNA, 750 bp, Acinetobacter baumannii
atgaaactgacggcaaaacataaaaaagcaatcatggcacatgctgatgaatgctatccacacgagtgctgtggggtgattattgataagcaatatattccttgtcgcaatatttctaaaaactctgatcaattcgaaatccatccagaagatttagctatagcagaagaccagggcgagatattagcgtatgtgcattcacaccctgacggaactacacgagcctcagaactagacttaattcagattgagttacatcaaaagccgtgggtaatttgttcatatccggatcttgattttcaagtttatgaaccttgtggttatcgcgcccccttagtggggcgtaattatattcatcattatcaggactgttatgcactagtccgtgacttttatgatcgtgagctaggtattaagttgccagactttgaaagaaaagatggctggtgggaggacaaagatcatccgtcaatattgattgataattttccgaaagctggtttctatgaagtggacactccgcaatatggagatatgttgatttgccgagtaccacgaacagaacacccaaatcattgcatcatttggcttggtgataatgcaatatttaagtctgaagaatctgaaccttgtattggcaatacattaattttgcatcagcttcacggccgtaaatctattcgtgaaatctatggacaacagtgggcaaacaaaactgttaaaatattgaggcataaagacaggaattaa

SEQ ID NO: 68811 - DNA, 963 bp, Acinetobacter baumannii
ttgagcgaccgcgatcatcatcttcgtcatcatcatcacgacggctgcgaccacgacctcggccacttgaacggccacgatcatcatcttcgtcgtcgtcataacggctgcgaccacgacctcggccacttgagcgaccgcgatcatcatcttcgtcatcatcatcacgacggctgcgaccacgacctcggccacttgaacggccacgatcatcatcttcgtcgtcgtcataacggctgcgaccacgacctcggccacctgaacggccacgatcatcatcttcatcatcatcgtcacgacggctgcgaccacgacctcggccacctgaacggccacgatcatcgtcttcatcgtcgtcatcataacggctgcgaccacgacctcggccacctgaacggccacgatcatcgtcttcatcgtcgtcatcacaacggctgcgaccacgacctcggccacctgaacggccacgatcatcgtcttcatcgtcgtcatcataacggctgcgaccacgacctcggccacctgaacggccacgatcatcgtcttcatcgtcgtcatcataacggctgcgaccacgacctcggccacctgaacggccacgatcatcgtcttcatcgtcgtcatcataacggctgcgaccacgacctcggccacttgaacgaccgcgatcgtcatcttcatcgtcgtcatcataacggctacgacctcggcctcggccacctgagcgaccgcgatcatcatcttcgtcatcgtcatcacgactgcgaccacggcctcggccactcgaacgaccaccgcgatcatcatcttcgtcgtcatcgtaacgactgcggctacggcctcggccacctgaacgaccgcgatcatcatcttcgtcatcgtcataacggctgcgaccacgaccattgcgatcatcattcttatgacttaaagcaccagcttcacgagcctcttccgaggtaa

SEQ ID NO: 68812 - DNA, 576 bp, Acinetobacter baumannii
atgaatatgtcagtcagttatacccttgatcgtgcatcatccaagaaaaatataatattgcaaactgctcatagattgtttagtgaacaatgttttggccgtgcaggtatcgatagaattattgaagaatctgctgtggcaaagatgactttttatcgtcactttaagtcaaaagagcaacttattgtggcttgcttagaatttgaaattgagaatcaaatttcatctatcaatgctgcttgtagtcaatctcatatcacttcaccaatagaaaaattgcaagctttatatttgtggtttattgatcgtgcattagatttagataatcgatcatgtattattaacaaagctttggcagagttaagccatttacataacatacataaaattgtcctttgttatgatgattggaagtataattatgttcagagcatattattagagaatagtatagacaatgaagatacgcaccatattttttatggtttcctaagttccattttaatgccgtatagctttaaaccagattggaactctgtagtgaaacagtttgatttgtcattaattaacacgtaa

SEQ ID NO: 68813 - DNA, 285 bp, Acinetobacter baumannii
atgataaatcatgtttataagcttggagtaaaatttaaaaaatgcggagttatactgactcaactagaaccaaaaaataaacatacctatgatttattaaccgacatgatgattgttgaaagaaaggaaaattttatgattgcttatgagggtgtacataataaatatggaaaaaagaaacttgcacttggtacttgttatttacctaataggaattggtcaatgagtaggggaaatgttacacgcaatcctttttgttgggatgagttattacgtgttaattaa

SEQ ID NO: 68814 - DNA, 1119 bp, Acinetobacter baumannii
atgggactagcaaccttctattctttgtggaacgatgatttcaaagttttaccaaatgacgttgatgagaaaatctggtgggaggtatggcttcctgtagaagatgaccgtctttatgctgtagatcaattcctaagaatatgtgaattgctgaaaatacaaatttcaagtgcacttgaatttcctgaacggacagtatttcatatttattgcagtagaaatgaacttgaaagcgactccaacttgttaaatatcattgcagaaattcgtagaccaaaagaaacgactcattttttttctaaaatgtcttcaatagatcaaactgaatggatcaaagatctatcaagtcgtttaattaaatcatcagacacgcctgaaacaccctatatatgcttagtagatggtggtgtaaatttacatccttttcttgaaccctttctcaatgaaagtgatttacacacagtgaacgaggcatggggatataatgatgaatatggtcatgcaactggcttagcaggtctagcattaatcggtgatttcacagatcatctgattcacaataattccgtgcaagttaatcatagaattgaatcagttaaaattatttctcaaaaagaaagtaatgattccaagctatacggtaacttagttagagaagctatagcgactccagaaacaactaatccttatcgaaaaagattatacagtatggctgtagcagctatggatgggcgtgatcggggaagaccatcttcatggtctgctgctttagataattctatatgcgacaatctaaataacttcaaaaaccctaaactttttatcgtttgtgctggaaatattgaaccaactcaagaaaactattcaaactatccaagtagtaatcaagtgactgagattcatgatccagcccaagcatggaatgctttaacagttggagcttgtactcataaagctacaattgatgaagtgggcacagaattttgtaccccagttgcaaagtctggatcattaagcccgcatagctcaacctcacttgtctggatgaatacccaatggccctataagccagatgtagtctttgaagggggcaatatagaggtggtcccacatgtttga

SEQ ID NO: 68815 - DNA, 930 bp, Acinetobacter baumannii
atggaaagaaaggaacgccgaaaatctactttagaggaatattacaaggatattaaaaacttaatatctttaaactctaaaacctttaacttttcacagttagaagatggtttctttacaagtaataaagaccaaagtatttatcttttgaaaggtggaaagtccaaccttgcaaaccctctcgactctgataaaaagtatccactgtttagtgatgaccaaatatctgagatcattactttctttgatacctcaatatggattgttgaaagacgtttacccattcagtcatattgtcgggcaattactcaaaactttgaccttgagttcgacttgcctgcggaatttattattgctttagcaattttaaacaaacttgaattttcaaaaattcaaagtcaattccacatcgatggtacgtcacatctaattgaggcaactcgccagaagtctcggctcatctgtgatgtatacgaccagaaaatctttgatgaaatgatctttcaaggtaatcgcagcatcgatgatccagagacagcaacttatgttgaacgtctcatcgtgactggccatgaacatatcatcacaactttaaggctttattcaaatctggatgagtacgttaattacgtgaagcaaggttcaaacgataattcaatcagtaagttacttgatattcgcaaatgtgatgttaaacgtcttcgtcagtatgccaatattgaaaaattactactagatgacaatcgatctgccagaagtagaaagctcaaaactgaaattgaacgtatcttggataatgtttgttatgagtgggttattgaaatagctcaatccaaagggataagtgagcataaagcattaaaaaacatcatcacagaacataaaaagctgatccaacaaaaaactgaaccagaattggagcaaaaataa

SEQ ID NO: 68816 - DNA, 285 bp, Acinetobacter baumannii
atgccctctcctgataatttgactgtattggctataccatttgactcaatccagtttgttatttcaaacgctagttcagagaattcagcttcagttaattctccaacatcgtcaaccagattaacttcaaccttattaatctgtttagtattagtaaaacctagttcacagatcaaattatcaaaacaaattaaaaaattagagaaatttgctgttgcagattcaagtatgtttgaaatatggaattttgtatttaaaagatcggtcttaaaacaatttgaatag

SEQ ID NO: 68817 - DNA, 264 bp, Acinetobacter baumannii; identical to SEQ ID NO: 47948

SEQ ID NO: 68818 - DNA, 336 bp, Acinetobacter baumannii
atgaagtggatagaagtttcgcattgggttcaacagtacaagcctctagacctagtaagttcaatagttatagatggtagaaatattaagtcatttaatgatttcttatgctgtataggtgaggaagtgaatggattgatgggctactttggttctagttttggtggtttgtcggatagtctcactggtgggattggttgtataactgtacctttaaacattacttggaagtactttgaagaaacaaagtattcttttaataactattatactcctgatgattttgaatacttgattgagattttaaacgaaaaatctactttaaatattacgtaa

SEQ ID NO: 68819 - DNA, 567 bp, Acinetobacter baumannii
atgaatgatgttcttgataatccagtaaaaccagatccaaaatacaaaacaaaccagattagagatctagctttagttgagattgcctatagttcaggattacgtcttgaggagttacatagtttagaattaagcaaaataaacacagatgaaaaattattaagaataactggcaaaggcaataaagaacgtattgttccgattggctcgaaagcattacaagccttagaattatggttacttgaacgtaatcatataatgcaaaagaatttaagccaaaaccatgattatgtctttacaactactacaggtaagcaactttctcgaacccaaattaatgaacgtgtaaagaagttatttagggataaaggcataactcaaaaatcaaatcctcataccttaaggcatacatttgccactcatttactttcatctaaagtaggtattcgggatattcaggaaatgcttggccatgcggatctcaataccacgcagatatacacttttgtcgatgaaacaaccatgaaagaggaatacaacaatactcatccaagagcttctatttaa

SEQ ID NO: 68820 - DNA, 201 bp, Acinetobacter baumannii
gtgagtgattcatttcagcctgatagaggcacagttcgtcgctggatgagagtcacagtgaaaacaggcactatcaatgtaacttttaatgtggcagacttcgagcaaggaaacattgttctttcaccagaaggtaatttcattattaccaatgtgagcgaaaaggcaaaagaagagtttaataaagctattaatcagtaa

SEQ ID NO: 68821 - DNA, 207 bp, Acinetobacter baumannii
atggccttagcaaataagcttgaaaaattggatctggatgatggaaagctttctaaaaaacttatcttaaatgaagatttcaccaaacatgctttaccacaatatgtaaaaactggccaagatcattcacgtcatctcatagaagaatccaaacggaatcaacaatctagtaattcacaatctattgattttggatttaatcgttaa

SEQ ID NO: 68822 - DNA, 543 bp, Acinetobacter baumannii
atgacagcgatagtttcaaaagatggtgaattgttatttcaaatttctggcaatgagcaaacggttagattaaatacaccggatgaatgctttgccgttgatgatccaccttcagcaaatatgtatcacgataagggagaatgggtagaaatgcctcttcaaccttatgcccatcacttatttgattttcaaaaaaaagaatggatagatcctcgttccctagatcaagttaaggagcaaaaatggtttgaaataaaacaaattagagaaaccaccgaattcggtggtttttcttttaatggatataaatttgattcagatgaaaagtctcagagccgcattattgcagcaagtgcattaggcgtagaggttgaatggacattattcaacaataccgttatcacattatcaggggaggaattaaaaaagttaagacaagcattggcagagcatgtatctatgtgtcatgcaagaagcagaaaagctagagagagtattgcgctggctaaaacgaaagctgaagtagataagatcagtttttaa

SEQ ID NO: 68823 - DNA, 1032 bp, Acinetobacter baumannii
atgaaaacaaatttagcacataagcatgagccacctcaagcagaggtgctcaagtttcctaaaaaagagcgaccagccatgtctgagaaattcgacaaaggctacgttatgtctagtcggctttatcgaaatgaagttaagccatttcttggtgatgctgctcgtaacgtttatgccgagctagaggaatatattagcgggtttaacaaggaatctgactttgttagctactcacagttgcaaggtagaaaaattgaaggcctcgaggagcatgttcgtaaattaagcacagctactgtacgtgctggattaaaacaattgattgagtatggtgttatttcaattatcgctactaatccaaagcttggaaacaagtacaaattaaatgagatttcacttgttgagcactttagtaataaaagcacttcagaaaataaagcacttcagaaactaaatagcaccacttcagaaactaaagcgcaaggtactttagaaactaaagacacaatagatattatttatagatatttaattatagataatttatttaactcgcttcgctcaaacaaaccacttgaagctagtttttatgtttatcaagaaactcaaaaacagatccttcttgaacaacaaaaactagaagctgaagagaaagcaaaagctgaaaaagaacgcaaagacagagtacgcaagttaagttttgatgaagttatcaaacttactaaaaacacctttgcaaccctttgtgatcttgaactttgggaacagtacgtagcaaaccgttctcaacaagctaaaaccaaattaactaagaatgctctaaacgctatctacaaagacttcattgaatggggttatgaaggttctaaccaatctttaaaaacctcaatcactggaaactatcaaggtctattcgctccaaaacaacagaatcatggttttggtaatcaaagccaagcttcaactcgtatgtctgaaattcaagagttaatcgcaaaagaggaggctggctatgaacagtatggtttctag

SEQ ID NO: 68824 - DNA, 1263 bp, Acinetobacter baumannii
atgtacttgcgaaatattcatattagaaatattgggccaattgaaaaattagatttagaactagaacttaaagaggatttaaatcctaaaccagtaattctaattggtaaaaacgggtctggtaaaacatatactttgtcttatattgtagacgctttttatgagctggctaaaaagcaatataatgatgtagtaaaatcttctggtatggactccccttattttagaattatttcaggtagggatattaatacaaccactgatagtcaaagtggggctgcttatttgagattttttaatgatcaggaaggtcaagaaatacattattgcgaaaaaattggtaatatagattctgcacagggattattaaatttatatggaaataaaatcaataatatcaatagtgataataataatgataagaaaattttagccactaaagaaaataatgatgctcaatctcgattatctttgcatagtaaaggaagagtgattgtgccaaccttagaacagctttcgacaggtcaattagtcttacttaatttgttcattacaataattagacatgctgactataaagatctaaataatagtattcgtttagagaatattgagggaatagttgttgttgatgaaatagacacgcatttgcatactaaacatcaaagtgaaattttaccaaagcttattaagttatttcctaaaatacaatttatcatgacttctcatgcaccactttttgttttaggaatggaaaaagaatttgggaaagaaaatattcagttaattgatcttccatccggtatgaatattacttctgaacgatttggtgagtttgaagaatcttttaatgtttataaggaaacaataacatttgaagaagctctgcataaaaaaattcaggatcaacaaaaaccattgatacttgttgaaggtaaaactgatattaaatttatgcagaaagcctttcagctaaaagggaaaaatgaatggttagaaaatatagaaatagatgaaattggtgttactcaagaaggtggtcaagttaaatttggtggtgaaagtagtttggataaaggttttgattttctaaaacataatttaaatgcaataaacgtggatgattatggaggtgttataattaagaaaaattttgataaaaacggattctgtaattatatttgtgaaaatattacagatccatcagtatttgatagatatgaagaattagtctttccgattattgaacaattcttagcttaa

SEQ ID NO: 68825 - DNA, 1845 bp, Acinetobacter baumannii
atgaaaaagactttcgatctttaccagacagctcaagtgctccttgccagcaccagttttttacttgccatatctgctcatgcatatacatggaaactggatgatataagtacctcgaccaaatatacggtcgagcctcattttttctatgttggaaaaggagctgaatggcagaatattcagttctctagtgactattcaactgagaatgacacaacattactggtgaaatatgacgataaactaatctataacacgaccttaaatggtgatggccagtttaaattcaatattcctgccagtccaagtggctttcatcgtttagattttattattcaacaatatgctaaaccaacgactctcaaccagacaaaagagactttctgtaccgaagatatcgaccatttaacctatttgagtaattctcaactcgactttactcctgttcgaaatatataccgtttaaaagatttaccagatgctctatttaacccccaagctagacgtcctaccccatttgttggaattttaaaatataaccgtaaggaaattaccgaagcatccatgctagctcgtttggcaagttcttggagctcagtaactcctattgaatgggttgattcaggtcaaacgaacctgaatcctgaaacaaactttattattgaagtgatcaaatccacagctccacttaaaaatggagcgtttgtacaaatttcaaaacctgcagatggggtacctactctctctatcacttaccataccgcccaagagcttactgctgcgattaatggactaattaatccggcatacgtacagcagcttaatacaggtagtgctatttttcccactacaatttcaccaccagcatgggctcaatttagaaaaattgatacgcttgcagatttaggtattgatgacttcagactcaaccacgctgaaaagaacctattccttgattttccagcagtgtggcagcctactgatattttacagggacaaattgcacttcgtattcaaagtggtttattacaaggctctagtattacagcatggcttgatggtggccttgccggtagtatgaaaacggcggatctcgcttctgacccagtaaaccgacagttcaacatctttgctaaggaaatttcaaatacaacaaactttagcttaaaactggaaaactcagttattgcaaattctcaatgtttaccaaatgctcatggttcactttgggtagataccgccaaatcaaccgtaaaacttccacataaactcaaaaatggtgtggcagcgctttcaatgacattagcaaccaaaccaacgattgcaattgatgaccaatcaggggcattaaatattgccatcattttgggacaagtcgctaaaaatatgctgcttacacaggcaccaatgcctctcaatctggtacgtttctcaccaaacgctcctcaagcggtcaatgtgagagtaaataaagagatttatcagcaacaaatcttaatgcatcaaaacattatttatgcgcctgcggcagccaacggttttattgtgagttataacaataaccgctttgatgtgattaccgattctgaaaccggtgcactcacctttatgcatttatggggaaaaatacagcataaaattccaaataatgtgaccaaaatgctggtttcagaaaacggcaatatttatgttctccaaaaattaattgtaggtaatcaaaaagcgccattagttcagcagtcttcattctttttattagttgtgattatctctgcaattatgataatagtgatcttcttgtggtattggttacgacgaaataatgagaaaacagataccaattaa

SEQ ID NO: 68826 - DNA, 429 bp, Acinetobacter baumannii
ttgaatattggaacattctttggcactatattaattggtaaaattgctgatataagtggtcaatataaaacacttatatttagttatttaattgcttcactagctattgtatctttaggctctttatcctcatccaatactgttttgtatagccttttgatcttaattggtggtacaacagttggttgcatggctacaattcatgtatttgctactgatatttttaagaattataatacacctactatagttagtattttggcagcatttggcagagttggtgcaatacttggacctttggttggaggtttgatcttatcatctaattttaatttttctcagcaatttatattttttgcattaccaacatttctagcttttgtgttaatgatcctgatccggatctcaagcactaagttgactttataa

SEQ ID NO: 68827 - DNA, 819 bp, Acinetobacter baumannii
atgaatagtatgataaaagaaaaagccaacgcaagagtaatgaccttacaattactaaaagatacggtcaacacagctacatggcatgaaaattcttctattatcaacgacataaaaaaaattttaagtaagcataaattgtttaatcatcccatcattaattcattaaataatggtaattttgatctagaaaaaaatcaaaaaattcatttagaataccaaaatgcaattgttgaaatatttacagatgctttattagctgcacagctagcagcgaaagaattagatcaattatttaaacctacagtaaaaatgtacgccagatttttactatcattcaatatatctgatgaatttggattagtacaaaatcaaaaatatagtatgtcgcctttgaattctcatttttgcctttataagcaagtcttatcccaacttaatatttcagaagaattgtctaaaaactataaactttcagaagaatcatcaatactaagagaaagtttagaaaattcgtataattcctattgcgatgtaatcctattattggctatagcagaaatgcaagtgataaaattttccgcacctttgaaaaaatctattaattatttaaatattaatactaagcagggttattatgatgttcatggtactacgttggatgtagatctaaacgcagcagatgatgaacatgaagatgacttatggattttactaaatcagatcatacacttcaaacaactaagtgatgttaaggctaaagcaatagattattgtgataattggtataatttctggactaaaatgaatgaaatttag

SEQ ID NO: 68828 - DNA, 558 bp, Acinetobacter baumannii
atgtcgaaaaaaaagcaagatattttattgaaagctattgaactttttaatgaatttggttatgtcaatgtgggggttgataaaattatttctgaatcaaaagttgctaaaatgactttttataaatactttcctagtaaagaaagtttgatccatgagtcactaaaaatgcgtgatagcttaataagagaaagtattaacaattatttaaataatacacatgagcaaggtattaataaaattaaaattttttttaattggtatgaagactggtttaatagagaggatttttttggttgcatgtttattaaggtcagtgatgaattaccttatgataatgaggctttttctattgccatgaatcataaaaaatgggcaacagataaaattctaactattttgaatgatatggatgtaaaggattctgagtccttagcttttcagattagatttatattggatggtgctatagtaaacgaaaatttatttaagaataaacaatccattaaaagtgcttggaggattgtagaagagttaatttcaaagagaatcaattag

SEQ ID NO: 68829 - DNA, 405 bp, Acinetobacter baumannii
atgagtcaacaaattgaaaatagattagtcattgaggcatatcaagcaattgctcaagagattttagcttttgttgggaaaaactcttgggatgaggctggcgcaacatatgaaatctttggaaaaatgattagtagtacatggtggtcaaaatataatggagagttagaccaacttggtaatgatattcctagagatgttcgtaaattggctaaggagaaaatttattttcttagaaaacatttatttgatttaacaggcgatcgtatctggggattaacttttacactatacccaacagggaaatttaatatccaatatgactataacaagccagaaggttatgaggaaactgatgaacttattgctggtgaagaaataaataagagttttatgcaaaagtaa

SEQ ID NO: 68830 - DNA, 714 bp, Acinetobacter baumannii
gtgagagatacgagctatgacaccgtttctggctatacttcaaatagtacaaaacaacaactatcaggtctgactgatccggcatcgcaaacagccttacaagtttctgagcagctacaacgcactaaagatggtgtaagtttcttagcgagtgtagtgttaggggctggtggtattgcaaaggggaaaggtggggagaatattactgataatccgaaatcttcaagtcaagaactttcaactattcatgctgatgcaggttctaaggggaattgggatcctgtattaaacaaaactattcaacctaatacccgttatgagttatcaaatggtcatacttacataacagataatcatggtcgggtaaatcaagttgaaggggaactcaagttaacaactatggatagaaatacataccagcaaaattgtgcaggtaaatgtgttaatgcgaaaggagatgatggtgggcatttaattgcctcgtcattaggcggtgcgggtgataaaattaaccttgtaccgcaagccagtacacttaatcgtggagactggaaagcgatggagcgacagttagcaaatgagttaaaagttgggaaagctgttagtgttaaaattgatgtaggttatcctaattcatcttcggcaagaccaaacgaatttaatgtaacagccgttattgatggtgtgaaaaagacttgggagtttgatcaatga

SEQ ID NO: 68831 - DNA, 402 bp, Acinetobacter baumannii
atgaaagttatatatcggtggcgtgagtctgatacatggaatgatggaatacttagaccggattgtgatttttcagaagtttctgaaagttttaaaggtttagtttttaatttgttgctggatgatgaaggccatggtctagaatatttaagtaattggatagatgaaggattaattgaggtagaaaaaatttataatggtacgttagatttttatgatatgtgggggcatgcgtggggagcagaaatctccaaagaaaatgttcttatttattggggatatgatgacactgaacgtgaagaaaatatgagttttgaaagtttttacacaattttaagagaatggagtcaattcctcaagacagaaccaaacgagacaaatatcgtggaatttgagtgttaa

SEQ ID NO: 68832 - DNA, 459 bp, Acinetobacter baumannii
atgcaacttaaaatatttgtgcttatttctttaggaatattatctggttgcgtaagtgcaaataatgatgagaaatgttttaaagactcaaaaagtttaattacaaacttatataaaacttttcctgtaaatggaaataaaattgttgagagtgctgataaaaaaactatctctaaattttttaataatcaactaactactatgctgttaaatgattataaatgtagaggtaaatcaaatggagtgtgtaatatagattttaatatattaaataattctcaagatgatttaggggaatttaatatattgcaagcgactaacaatatagttactgttaaatttgatacgcctacacatggtgaatttattgattttttgatagaaagcaaaggagaatgtaaagttgttaaaaatatacaatataataatgcaaacttattagatcttttgaggaagtaa

SEQ ID NO: 68833 - DNA, 357 bp, Acinetobacter baumannii
atgaaggtattatatttactattgctgatagtgatctctagtaatacttttgcatatagcgataattggaatggtacctatcattattatggctcagaaaaacttctaggagataatgttgcaactagggaagtaattttaacactaacatcagaaaagtgtattttctctatttttggttttcaaatggataaaacttattcatgtaaggtggaagaaaaaaataaagatctatacttgtttgatgctaacagccatgagaaatttggaaaaattatctttagaaaaggaaattattacctttattcccattatgttatagatggtagaaaaaactttttctttaaggataaataa

SEQ ID NO: 68834 - DNA, 258 bp, Acinetobacter baumannii
atgagttcacatgagattggacgtcaaaaaatgtctgtaatgacattgggtgctttaggggtggtttttggtgatataggtactagcccactttacgcttttacccaatgttttcatacatcacataatgttcctataaatgaagtgaatgttctaggcattttatcattgattttttgggcactgatgatcgtggtgtccttgaagtttagtatgttaattatgcgtgctgataatcatggtgagggggcatcttag

SEQ ID NO: 68835 - DNA, 567 bp, Acinetobacter baumannii
  misc_feature (460)..(469): n is a, c, g, or t
ttgggcgccttaggtcagcgctacgctaccatttcttttggtacaattttactttcaatttatagcatgtttggtttaggagaatatgctcactggtatcaacagcctacttattttgtctatggcgcactgtggtatggcataacttctattttattttttattcttaaaccaacacttcctttacaagataaactttcacaaatttttgaagaaatctctgccttacttcaagctaaagcgcgcttgttcgatcctgataataaagaaaatgttgaacagcttttatttgaattatcactacaaaatacgcaagtcgcgcaaagtcttaaccaaatacgcagctccctgcttactcgccttaaggcatcacgagtgagtaataaaagtatttactggttaaacctgtacttttttgcccgcgatatacatgaacaggcgacttctaattatctacacnnnnnnnnnnacactacgaacatattcaacaaaattttagccgtagtgatcttattttccgttttcaaaaaaatctacgtttacaggcccaagcttgccacgatttag

SEQ ID NO: 68836 - DNA, 153 bp, Acinetobacter baumannii
atgttaaatggtcaacgagcagcaatttttttgcaaaacatggagcaaagagttaagccatcttataaaaaggataataccgataaagtacgttgttatgtaataactaaagctcaaagcaaaatccaagagcctgtaaattattttgtgtaa

SEQ ID NO: 68837 - DNA, 774 bp, Acinetobacter baumannii
gtgaaaaagataattttagcaacaataataggtatctcgggtatgaataactcttttgctgagtgtacctatagctttgatgcaacatctacacagatacagtctttgggaaatagttctgcacagaagtttccgacaataagtggaactaagttttcttataaaacatctcagcaaaatcaaatttatatggcatatagccaagaatacttatctagatttattgcagcaaatgactcgtctgccatgctatatactcgtggtgacaaagcaatacctacgagtggaatactggcttttgaatataaatttaaagttccagaaataagtaatacgggctatctaaatattttcccagcactcgcggcgggtattatgcaaaatggtaaagctttaaatattatagttgcttatcaacatggacctacgactaataatttttatattcagacaacttcaaatgataatactttagtttctaatggttttagtttacctcttgaagctacaattgatggttatcaaaaaattggtatatatataaatcaaaactctaatcaagttggtttagtctttaatggcatgaataaaggttattttgcgacattcccatctaagttagataatttatattattccttaacctcaaatcacatggatttagctgcggttgatatcaacaaagatgtatcgattgagtttttaattgatcattctaaaatgactcaaacttacccaacagggtctaaagacatttgtggtgtcgctttataa

SEQ ID NO: 68838 - DNA, 240 bp, Acinetobacter baumannii
gtgaccttaactgttgaaccagcttctgctgtacctgttacaggattagttgcattgattggatcaagtaccggtgcacttggcgcagtggtatctacagttaccacagcattagttgtacccacattacctgctgggtcggttgctgtcacagtcacggtatgcggcccatcagtcaacactggaagtgtattgtctgcaagggtccaggtgccatcaccattattggttgccgggtag

SEQ ID NO: 68839 - DNA, 435 bp, Acinetobacter baumannii
ttggttaatgtggttgttacagttactgctggtgcaaccgcatctactgtgccagttgatggtgctgatgggttacccgctgggtcagttgcaacaactgtaactttgtctccatctttaagatcacctgggtttggtactgtccacttaccatccgggcctgcaacgacagtcgctgttgtaccatctgggaaagtgaccttaactgttgaaccagcttctgctgtacctgttacaggattagtcgcattgattggatcaattactggtgcatttggcgcagtggtatcaacagttaccacagcattagttgtacccacattacctgctgggtcggttgctgtcacagtcacggtatgcggcccatcagtcaacactggaagtgtattgtctgcaagggtccaggtgccatcaccattattagttgccgggtag

SEQ ID NO: 68840 - DNA, 2283 bp, Acinetobacter baumannii
ttgaaagtaatttctgattgtgatgatgttattaaacataaattgttagagattttaaattcggaaagttataagaacttcaaagaagttaatagtaaaattgcatttcattttaataatgaggctaaattcaaaataaagtttaaagatcattcagatgtagatgaatcatggatcgaactacataaaacttcttttgataatttgatcaaaaggaatgatctagccttggataatcaagattggatatttacttggagtaattatcaaacagttaaatctaaagctgaagctttaggattgaaaaatattattggaaagttggaaaatggttcactagaaagctattcattagtcgataccgtacagctttctgtatattgttctttagcaaagcatattatcaatactgatacgttgattcagaaatttaatgggatggaattatcaacaatggttgatgattttaagaattatgataacgaattaatagctttgcagagaaaacagattgctagcaatgcagcaacagttgatgtacctcaaggaattgcttatggtcgcgtatcagatttaactgaatattctctcatagctaaagaatctttaaaaaaaatgagacatatacctattaggtctttgcttgagcgggcacccaatgcgatccaggcattgaaaccatgtttcatgatgagtcctatgtctgtagctcaatacttgaagcctggtctttttgattttgatttagtgattatggatgaagcatctcaaattctaccagaagatgccattggtgctttggctcgtggtaaaagtgcgattattgtaggagatccgaaacaattacctccaacaagtttctttagtacttctataaacttggatgatacggacgaagaagatttagtaggagttgaagatgcagaaagtattttagattcagtttcaatgtttaaacagagacgcttacgttggcattatcgttcgcgacatcaatctttaattgcattttcgaataagcatttttatgactctgaccttattttatttccttcagcaatacaaagttcgcctgaattaggcattcgattcaaaaaagtctcaggtacattcaattcaggacgtaactatgaggaagctcaagctgttgttaatgaagtatgtgaactgattcttcaagacagagaagagtcgttaggtattgttgcaatgaatagccagcaacgagatgaaattgaaaaccagctagagcttaaagtatctgaaaactctttattacagagtttatatgataaaaaaatgaaatcttttgagcctatatttatcaaaaatcttgaaaatgttcagggtgatgaaagggatgttattgttatttcgatgacttatgggcctagtcagattggtggaaaagtatttcaacgatttggtcctattaatcagagctctgggtggagacgtttaaacgtgctctttactcgttcgaagaagagaatgcatattatctcttcaatgaattctacagatatcttgacatctggtacgagtagtaaaggagtatcggccctaaaagcatttttgagatattgtgagacaggtttcttacatgaagaaaaacagacaggtaaggctccggatagtgattttgaaattgctgtaatgaaggcattagcaaaacatggatatgaatgtgaaccacaattaggtgttgcaggctacttcttagatctggctgttaaaaatccaaataatcccggagaatatttattagcagttgagtgtgatggtgcaacgtatcattccgcaaaatctagtcgtgatcgtgatcgattacgtcaacagattttagaaagtttagggtggaggatacaccgtatttggtcaacagattggttcaaaaattcaaaagagcaaatgcaaattctgctcgaaaaattgagtaatctaaaaccattgattgagaataatacaactgaaccaaatattaaattattgaaaacatcagttaaagaaaatcaatatgcactagcatttgacaatgtagcagaggattttaatgattttgtcgaagtaaatgatttagtgaaatatgtggatagtagaaatcctgagaagttggttagtgtgaaaatttctaataactttaacaattatcaggaaggtattacccacagtaatagtcctttgggagaagttttacttgggcttacagtaggggaaagctcagtgctatctttacctaaaggtgtagtaactatcactattaaggatataataaaaccttaa

SEQ ID NO: 68841 - DNA, 456 bp, Acinetobacter baumannii
gtgcgttctctctcggtaactggaagttggttaacggtgattaagttattttcacaatttattagaaaagctttagctggctcagtaaatggaaaaggatgggcttttcttgaacaactcagaattcaggtgccccatcctgagcttatatcgaatggattggctgttaaccaacttccagttaccgagagagaacgactattttcctgtatttatcaattactcattattccccaggaaaagtttattgaaacagcaaaatctttaaatatgaacaggtcttcattttgggataagagaaaccagttgccagccatattaaggcctgttgaagaacaattaggctcgatttatcggaactaccctccaaagagagcattggtagatacccttaaacctaaaagtaaggagactgtaatacgaaagtttttaagattaaaaagaaaactagggtaa

SEQ ID NO: 68842 - DNA, 735 bp, Acinetobacter baumannii
atgaaattgaacagttataattttttgttaggtttggcatttgcttcagcggtagccgcacctgcctctcatgcagaaattgtaattcatggcactcgtgtaatttatccatcagatgcccgagaagttacgctacaagttagcaataacggttcaaaaccagcacttgtccaagcttggattgatgaaggcgacccaaaaagtactccggatcaatcaaaagttccttttatgattgctcctccaatttctcgtgttgaagcaacaaaaagtcagacttttcgtattactgctctacccactgcttctcagttaaatcagaagcaagaaactgtcttatggttaaatgttttggatattcctccaagacctacctcaaagggctcagatgcgacacctgataattttctgcaattagcaattcgttcacgtattaaattcttctatcgtccagcttcgattaaagatgatgcgaacttagcggcagataagcttcaatgggttaaatctggtcaaaacttaacggtaaaaaatccaacaccttttcatatcaccatgacttctgtttatcagaaagtcggcgataaaaaagtagatttattacctgaagggctaatggttaagcctttttctgatgcatccattcagcttaagaatggcaatcttcaggatatgagttttattaatgtgaatgactacggtggccgagtcgaacactcaataaaacttcaataa

SEQ ID NO: 68843 - DNA, 291 bp, Acinetobacter baumannii; identical to SEQ ID NO: 52280

SEQ ID NO: 68844 - DNA, 207 bp, Acinetobacter baumannii
atgaactttgaaaatattaaatctttgcgtgaaaaaaatgactggcatcaagttaacggggagcgtcgatatatttctaaagatgacgtttatttaagtttttggttaggtgaagaaaccgtaattgaatactttaatttacctaaaaatttacattcttttgatggttatttatcccagcttgctcaaattcatcaatcttcttaa

SEQ ID NO: 68845 - DNA, 177 bp, Acinetobacter baumannii
atgaaactagattatgtgatcgttgccggagggtgtttttggggtctcgaagacctccttagaaatcaggacggcgtgacgtcaacgaaggtgtgtagtggcactgaaatggcgactgcgcaagacgtgaagatgagctgtctgatagcaacggattatcaagcagaaccttcttaa

SEQ ID NO: 68846 - DNA, 387 bp, Acinetobacter baumannii
atgggctttaaacttaaaaagaaaagtggcaatcgtagtgtaaacgaaaaatcgagtgtcaactttattgcgaaaattcagtcacaaattgagcaatacgccagtttatttggggaaagtaaaaagtccaagcctatcctttatgtagcgttgttatgtttagtattagcttcaacttcgcttgcttacttgttttatagtgtacctcgacataacgaattaacacgtagtatgggggagttacgtttactatcacaaacgatttctagacaggctacagaagcgaccgcttctggttcacctcaagccatgaaagacttggttgaatcgcgtcaaacatataaaaaatgtcgaaaatatttatggtacatcttcaaaagaatataa

SEQ ID NO: 68847 - DNA, 1239 bp, Acinetobacter baumannii
atggagagtaatactattctttataaaccactaggtgatgttattgagcttctaacggactatcatgctaatggtgcttatgaaaagttaaaagaaaatgtgacattattggataaagagaatcatgctgtcatgattcgaactaccaattttgaagcaaatgattttaaaaataatcttatctatatagatgagcatgcttatgagttcctaaaaaaatcaaaagtttatgcttctgatttaatcatgaacaaaattgctaatcctggcacagtttactttatgcctgaaattagcaagcctgtatcattgggaatgaatctatttttaattcggattgatcctaagaaggctaatccatattttatctacacctatttaagaaaaaatgagcattacgttaaatcttttgctagtggttcaacaaccaagactattacaaaagatgatgttagacgtttaaaaatctacacaccacctttggcagagcagaataaaatcgcccaaatcctttcaatttgggatcaggcgatttcgattactgaaaaactgcttggaaatagccaacagcagaaaaaagcattaatgcaacaattgttgacgggtaagaagcggctattggatgagagtggggagaggtttagcgaaaaatggaaaattttttgtttagcagatatcgctgagatgaatagtgggggtacacctaaatctagtgttgctgaatactatgatggaggtattccatgggtttcaattgcggatatgactaatcacggaaaatggatttcaactacagaaagaactctcacttctttaggggtagagaatagttctgctcggttatatcctaaaaatacaattttatatgctatgtatgcatcaattggtgaatgtagtattgctaaagttgaggtaacttcctctcaggctattttagggattcgacctaaagattgtttgcattatgagtttttatatttttatttatgctcattaaaagaccgaattaagttacaaggtcagcaaggtacacaatcaaaccttaatgcaggtatggttaaagatttcaaaattaatttgccaaatctaaaagagcagcaagctatatcgaatgttttaaatatctgtgacgaagaaattttagttttacagaaaaaacttgattgcttaaagcaagagaaaaaagcgctcatgcaacaacttttgacaggtaaaaaacgtgtcaaggtggctgcctaa

SEQ ID NO: 68848 - DNA, 312 bp, Acinetobacter baumannii
  misc_feature (272)..(281): n is a, c, g, or t
atggatttttctctactacataaccctgatgttattgctgcattaaaagaaggttttatcttcacgcttacggtaacggtgcttgcgatgatgggggggatcctgattggaactccattagcaatgatgcgtttatctaacagcaccattgcaagtaactttgcaaagttctatgtagatctatttcgtggtattccattaattcaggtcatctttattttctattttttgttaccaaaaatatttgagtttcaatcagatacttattgggnnnnnnnnnntattgggggccattattttcgagtgttgtaa

SEQ ID NO: 68849 - DNA, 402 bp, Acinetobacter baumannii
gtggttggctatagcttaaatgagcgcatgacaacacagcttgtttgtaatgcgctaaatatggctattcacaatcaaaaaccaaccaaagaactgattgtgcattcagacagaggaagtcaatattgcagccaggaatatcgaaatatacttgagcaatatggttttcaaggttcaatgagcaagcgcggagactgttacgataatgcaccgattgaaagcttttggggaatactgaaaaatgagttagtgcatcattacaactatcaaaccagagaagaagccaaagcagatattataaaatacattgaattattttataatcatcgaagaattcaaaagggtttgggttttaagacaccaaatcaaatggccgaagacttttataagttggctgcctag

SEQ ID NO: 68850 - DNA, 564 bp, Acinetobacter baumannii
  misc_feature (502)..(511): n is a, c, g, or t
atgtctgtcattgaagaaattaaccaacaagctcaatttgaacaaaagcagcaacaacgttcttatgaagttctgcaaaatgaaaaaagtatgccagtcaaaatgtggactaaaggcgtgcttgttgatgacaactcaaaacaacaattattacaaacagcacaaatgccttttatttataaatggatggctgtaatgccagatgtacacttcggtttaggagcaactattggtagcgtaattccaaccaaaggggcaattattcctgctgctgtgggtgtagatattggttgtggaatgatggcaactcgtacaagcttaactgcttcagatttaccagataacttacatgctctacgtactgaacttgaacgattaattccccatggaatgactaagcgcggacgtgatcgtggttcatgggaaactccaccagaaatggtagatcaagcttgggctgatctggttgcagattttgaatacatttgtacaaaacatccannnnnnnnnncatttggggactttaggtactggaaaccactttgtcgaaatctgtttagatga

SEQ ID NO: 68851 - DNA, 324 bp, Acinetobacter baumannii
atgagctttggattttggaatcgattgacagcgttagtaaggaaagaaactaagcagctcattcgtgacaaaagcagcctcgggattggtctggttttgcctgttattttaattttattgtttggttatggactttcctttgacttaaatcaggcacgagttggtgtcgtagttgatcagtcctcaccacagattaatcagattttagcgggtttaaagggttcgcgatatttagcaagtcaagagtttcctagtttacctaaagcagaacaggccattcgagatgaagaaattgatgccattttgcactttccttcctattaa

SEQ ID NO: 68852 - DNA, 528 bp, Acinetobacter baumannii
atgaatatgtgcctcaatcttaacttattacctcatgaattgattgttgataattttgcaggtggtggtggaacatctactggcttagaaaaagcctttggccgtcccgttgatattgctattaaccacgatcctaaagcaattgcaatgcatcgtgctaatcatccaaatactcgtcatttttgtgaggatgtttgggatgttgaccctgtaaaagttactaacaatcagcctgtaggactggtttggcttagtccagattgcaaacacttttctaaagcaaaaggtggaaaaccggttgaaaagaaaatacgtggtttagcttggattgctcttagatgggctgactttacacgaccacgtataatcatgctcgagaacgttgaagagttcaaaacttggggcagactaggaaaagatggattcccgagtaaaaagcacaaaggtgaaacattcaggtgctttgttaatgcattacgtcatcaaggttataaagttgaatggcgagtaatgagtgctcgggattaa

SEQ ID NO: 68853 - DNA, 249 bp, Acinetobacter baumannii
atgaaaattgaagacttagaggatgaaagtgatatagccgatgctgcggcaaaaatacttcgtgaaacttttattaaagtttcacgtaccgaaatagtactttatgtagagaatgatgctgtatggagcaaagctccaaatggtactcccatcctaattaaacaattgtctgaacgaagccccgatctcactaaaaaattttctagtcgaggaacttataaaattaaaaaaagaaatattaacacctaa

SEQ ID NO: 68854 - DNA, 384 bp, Acinetobacter baumannii
atgcaaatattacggttatctgattatcctcagagtatccagatttccattgatcaaaagcatgctattccacagtggtacattgttttaaatgaaaataagcatttaattgctggagcgggagtcattgataatgactttcatgagcgtaaagatttaaccccaaacttatgtgctttatttgtagaagagacctatcgaaaccaaaacgttgcaaaacacattttagattttgtacgtgaagacttgggtaatcagggtatccaaacactttatttaataacggaccataccgaattttatgaaaaatgtggttggcggtttttaacgttggtaaaggatgaggaaggcgagatggtacgtatgtatgtagcagatacctag

SEQ ID NO: 68855 - DNA, 153 bp, Acinetobacter baumannii
atgaaactcaacaaatctactgttgatgctattccattaactgaaaaaggtcaaaaaatatatagagatgcagaactgatcggttttgctgttcgggtaactaataaaagtaaaacctatattgttgaaaggaggcataaaggtgaactctga

SEQ ID NO: 68856 - DNA, 600 bp, Acinetobacter baumannii
atgaaagaagttgcattaagtgatttgatcaatcagcagaaagttgggcgttatcaaaaatttattctggtcacttgtttattgctaatgattatggatggttatgacatccagtccatggcttacgcagctccaatgattatagaagactggggcgttcaaaaaaccatgctcggcgttgtgtttagcgcaagcttatttggtttatttgtcggatcatttttattaagttcactttctgatcggtttggccgccgtcctatactgctcatctcgacctttatgttctcgatattaatgctgttaacaccacatgtaggcaatatcgagcaattgaccgtaattcgctttgttacaggagtttttttaggcggtatcatgccaaatgtgatggcttatagctccgaaattgttccatataaatctcgtatttttaccatgatggttatatcttgtggttatacggttggggcaatgctagggggcggtatatcagccttattggttccttggggcggttggcagtcgattttctattttggcggaattatccctttaattattttctttattacattctttaaaatgccagatcattaa

SEQ ID NO: 68857 - DNA, 2217 bp, Acinetobacter baumannii
atggtctttcttagtaaagctttgatcttgcatgaggctttaaaacaatgccgtatcttggttgttactgaccgtgttgatttagaagatcaactcagtaaaacctttgtttctggtggcgaactgtcagggaaaagagacaagcaaaacgctatggcgacttcaggcaaacgcttggctgaacaaattggtaagggtacagagcgaatcatgttctctttgattcagaaatttaactctgcaaccaaacttcctgaatgtgttaacacaagttctgacttcattgtcttgattgatgaagggcatcgaagccaaggtggtgaaaaccatgtgcgtatgaaactcgcactgccaaatgcggcattcgtggcatttacaggtacaccattgcttaaagatgaaaagaccgttaacaagtttggtcctattgtccatgcctataccatgcaaagagcggtagaagataaaaccgtaacgcctttgctctatgaagaacgaattcctgatttagatgtcaatgaacgagcgattgatacgtggtttgaacggataacagaaggtttaaatgatcagcaaaaagcagatttaaaacgtaaatttgcgagaaaaggtgaaatttatactgcggatgatcgtattcgcctgattgcgttagatattgccaatcactttgtgaaaaatattgatgatggtttaaaaggacagcttgcttgcgatagcaaggcttcagcgattaagtataaaaagtacttggatgaagcaggcttgtttgagtctgctgtggtgatgagcccacctgatagtcgtgaaggaaatactgatgttgatgaatcgactacccctgaagtgacccaatggtggaaagacaatgtcggcactcaggatgagcaaacttataccaaacaagtaattgagcgttttgaaaaagatgattcgcttaaattgctgatagtggtggataagctcttaacaggttttgatgaacctaaaaatgctgttctttatattgataaaaatttaaaacagcacaatctgatccaagcaattgcgcgtgtaaaccgacttcatccaatgaaaaagtttggtttattgattgactatcgaggtattttaaaagaattagattccacaattcttgattaccaagatctcgctgctcgtacccaaggtggctatgatatcaatgatcttacaggcttgtatacgcaaatgagctctgaatacaaacgtttacctcgtttgtataaagcgctatgggcgatttttgatggtgtaaaaaataaaaatgatccagagcagttgcgccaagttttagtcccacgcattgaagaacgtgagggtgagttagtcgatattcacttaaaagttcgtgatgatttttatgaagcacttacagaatttgccagttgtttaaaagttgcattgcagtcagcaaccttctttgaagataaaagcttttctgatgcagatcgtcagcactacaaagaaacagtcaaactatttacaagcttgcgtcagattgtgaaacgagatgctggagagactattgactatgatcagtatgctgagcaagtcaaaaaacttcttgataaacatgttgtgggtattgaggtaaaagaccctgatggagtctatgaagtcggcaagatgggcaaagtggcgcaacctgaagattggagtgaagagaaaacacgtaacgaaacggatatcatcaaaactcgtgtaaccaagatgattgaacagcaattgcgtgatgatccctatgctcaggaggctttctctaagctgttacgtcaagtcattgaagaagcagagaaagagtttgatcatccattgaagcaacacatgctgtttagagagtttgaagaacaagttgaggcacgtcgtttagatgaaatccctgatgtgttcagtgataataagcatgctcaagcttattatggtgtatttaagaaactattacctgaagcattctcgataacagatcaacagaatcaagataagtggattcaactcgcttttgaggttgatcgttctgtgatgagttctgtagctgaaaactcaattaatccacaaaatattgaagcagatatccgtaaaaaactattaccgcagatgttccgtgaatgtaaaaccattgggagtggtatggatcaagccaaaaaaattgtggaaatgatcgtacaaattactcgggtcggtttaaatgggctctag

SEQ ID NO: 68858 - DNA, 2160 bp, Acinetobacter baumannii
  misc_feature (2147)..(2156): n is a, c, g, or t
ttgtatcggactttagatttaagtgggcggataaataaaattcaaatcggaactgattctacatcaaattggaaaacattaggttatgacggaaatggtaatgttatacaaacaaaaacagcgcaaggaatcattgaaagctggacttatgatgcattaaatcgacctattagtcatattgatggatcaggtaataccgatactaaaacttatgatgctttagataatccaattactgtacttgatgcattatcctctggaactaatccttatctctatcggaatggtaatgtcttggctcaagagactaataaagattttggcattaaaagttatagttataacgaggctgatcaattagttcagagtatatacggtaatcgcaaatgtagtttctcgaatatagatgaaattgggcggaataagactattcagtgtcaaagtaatagttctagtacacctgatatgcttacttatgatgatacttatacatttgattcaagtcgttatagtcgattagataaaatagtctctaataagccttatggagttgatatcagttatgtctatgacttatatgatcgcattattgggaagagtcaatctaataaagctttaactgcatttggatctagtgcaaatactttatcgaatacctatgcatggagtattggtaataagatcacagggataactttaccttctggtcgtaagcttacttataattatgacaacacatcgaaaggccaaattacaggtttaactttagatggcaatgctttgttgagtaatattagttatgacgcaagtggacaaatgacaggctggacatggggaagtaatgctggaagttacacatggacttatagttcagcaaaagatggtgtcattaatcaaattagtaataaaaacagtggaggggctgttacttatagccttaattatagttttgatcgtgataaccgtattataagtattaagcggaataataacttaaatgataattttagttatgatcaggaaggacgtttattgacagaaagtcgaagtaatgatgcaagctctatctacgctattacctatacttatgataaaaatggcaatcgtttaagtttacgagcgtccggcactcatttacagcctgctgcaaatgtggattatgcctatacaggtaataaacttaccacattaacaaaaaatggaacagctcagccacttaattatactgcaaatgcagaattatatatgggtgaaatcttaccgagttacgattatgcagggcgacgtcgaggtgaagggacatcaacaactattaatcgttatatgagttataacgctaataatgaaagaacactaagtggaagtacaagtgcatggagtaatacggcagttcaattcatctacgatgaaaaaagtcatttgattggtgaatatacagctactggaattccacttgtagaatatatttggttaggagataaaccagttgcagcagtttacgagagtggagcaactaccaagatttattatattgtaacggatgtacaaaataccccgcgtcgactaattgatagcaatggtagtgttgtatggagttgggacagtacagcttttggcctaggtagtcctgtaagtacgataacatttaatttacgttttcctggacagtactatgatgcaactacagggcagttttataaccataatcgtttttataaccctgaacttggtcgatacatggaaccagatccgattggtcttgcaggtggattaaatccatacatatacgcattaaataatcctgtgatgtatgtagatatgactggtgaaaacccaatattaattgcaatgggtgtgagcgcagcaacagcaggtgcattttatacaggagaagtattttttaatgcagtatatgacgcatataaaaatgaccaaagtatattagatagtttttctaaatcattttcaattaaagagttaggtcaacaaatggttataggtgcagcatttggtggagttggtaaagctgcttttttagctgctgatgtacatataattagtaaagctgcacctactatcattccagcgggaacatcggttctgaaacggtgggggttaaaaggtttaaatgcaattaacaatatggnnnnnnnnnnctag

SEQ ID NO: 68859 - DNA, 366 bp, Acinetobacter baumannii
  misc_feature (19)..(28): n is a, c, g, or t
atgcaattaacaatatggnnnnnnnnnnctagtaaaattaataaaataagagaagtaactactcctgctggattggttctcacaggaaatataattgcaggtaaaacaacaacaaacttgatattaaatgatattaatgaacggagttctgctcgtagacaagggggtggtgaagttggtaatagtggtattaatcaaggctctgattatttaggttttaaaagttatcaacctaatggttatgtagcaggatattcagagatgtatattaacggtgtatataatggtaggttatggactatttactttgattcaggtgatactgttcaatatggttgttatcttaagtgcgcattgccattgtaa

SEQ ID NO: 68860 - DNA, 1107 bp, Acinetobacter baumannii
gtgacaattggtaaaaccaccgatattcctgcaacaaatgctcgagcaaaagctcagatgattctggcgaaaatttcaaacaatgaatatgaaaagcctatcaaattaaagaatgttgctaatcctttagatattacagtgaatgaagctcttcaaatttatattgatagaaatgactttaggccgaaaacaattaggcaataccataaatactttgatttatatttagggtggggcaacaaaaagcttttccagatatctaagcaagaagtattggatcgatttattgaggtatcagaagtaagtgagtcgtcagcaaatggtgctgtatctcttttaggtactttatggaagtatattcatgttctttattcaacagatgagaacccgatccttaaaagtaatccagttgacattatttccgtaacaagaggttggaataaaatagcaagtagggatagacatctccataaagacatcattcacaaatattacaatgcggtgcttcattatgaagatgagttgaatctggaaaatactgctaggtcaaacacgcatcgggatatcgtattgatgtgcatgtatacgggatgccgtaaacaggaggcatgttgtctaaagtgggctgatgtagatattaaaaatggtaccttaacttttagagataccaaaaatggttcagatcatacttttcctattggtgatcatctacacagtattttgcgtgaacgttggttattaagagaaaacgattgggttttcccagctactaagatgcctacttcgtggaatatgcatgcgactaaggtagatacattattgaatagagtgggtaaggaagttgactattacgtttcaatgcatgatttccgccgtacatttgccactatatgcaaccttttaagatttaatatttatgtgacaaaaagacttcttaatcacacggctaaaccaagaattgatgtgacaggtggttatgttcaaattccagatgaggaattaagagcttcgatgaatatgattgaggcggtttatcaaggcaagattgattgctttaattaccaatctgtctgggcagaaagattaaaagaaataaaggcggtctaa

SEQ ID NO: 68861 - DNA, 996 bp, Acinetobacter baumannii
atggattatttacaagatgaccctgatgttcgatccaataaccaaattatacgtattgcttatcaagctattaattttcttttttttattgcagagctttataatcttaataattttattgggattggtaaaaataataaaatatctttaagtagtaaaaataaaaaagtctctagagaaaataacaaactaaggtctcccccgagttattttcattattcgttccctccaccttcacctcaacgcaaacgctatcctgtttcactcgatgattataataaacttttgaatcatataaattactcattgaatgagcctttaagacttagaaacttgtgtcttattcaggcacttgaaaatacaggtggtagaagaacagaagtctgctctctatccatgaaatccctaagatcagcgttaaagagtgaatcagcctcacctttactagaaattataaatttaaaaaataatcgtttaactaagacacgggaaattcctgtttcaagaacttttttactcaatttacgcttttatgttcattactatagaaatccgatactgcaaaaaaagggcattaatcatgattatatttttatttcccacacatcaggccatccattacaacccgatactttgactacttatatgaataattggtccaaagaggcaaatctttcctcccaagtctgtgctcacatgtttcgccatcgatttatcacagaaaaatttaaatctctaattttagaacatgaattaacgaatagtgatgaatttcgaaaaatgctattaaatacatatcgattaaaacaaattatgcttgaatggactggccacagatctatcacatctcttgatacatatataaatttagcatttgatgagctttctgaaatcgataaattaaaagaattgatcctattatattacgtgaacttcttgatcagcttaaaaataaaattaaataaaatcttaaatatagctgattacttaatttga

SEQ ID NO: 68862 - DNA, 1386 bp, Acinetobacter baumannii
atggattattacgaccaaataaacgcaaatgttctaagtgctactttcaggcaaaatgctcaaattaaccttaaaataaatactagtagagaaaattttgttagacctgaagcttttggagcaaaagctaataatccaaattttgacaatacgaatgctttaaatgcagcttttgccacaggtaaagatatttatagtactcctgataaaacatattatgtaactaagaatctaagaactaaaggtcagcgattaatcggaggttggaaaattcattcaaggaagagtacctcccgtgttggtatatgggaaaaaacagtctcaaccgtagatgaacctgaagtaaatacaaaaataattagaatgttgtatgttgctacagcttatgatttatcagagtttttatatattaaatctctagggttcaatgtattacagcactattcaggtatgcatattcagggttgggacaatgacggaaatgtccaaaatatgctcgataacgctaaaagtgctggtttaaaagtaattgtaggaacacaaaatgatccaggcgctagagcaaacttagtatcatgggtgaagagtatagattctcaccctgctattattggctatagtgtatttgatgagccagttcacaacggaataagtgtcacagaacaaaatgcaaaaatagctttacttagagggataaccaataagttacttacaactgttgaatttacagtagatcctttaaaaaagagattatctaataattacgatattatttttttggatatctataatgattcaaatatggacttaaaagatgaagatgccactcaaaaagatttgcgtaaaatgctagtaacatttgatttatacaaaaaacaatatcacgcacgaattattccagttgtaatgggatttaaatatgtgaatggagcaccattaaatagagttgtaaaaacttcaaaaatatttgctaaagtaagcagtggaagtttaggggtttttatttgggatggtgatgctgagccgtctattgaaacttctgtacgtaattcacctcaactagaagatatgagtaaagaaattaatacatttaaaaatctaaaactgccatttcataaagctttattagagaactatagcatagaaactgataaaaaaaaatatgggtttaaacatgtgtcaaaacatcaacgctccccaaatttataccctataaatatgtttgaagagataaatagttatccattacaagtttttgatagatttaatgagaattttcaagtttgctcttcaaatataatatggaaggctttattaagtttgtggtttaaaggaacttatggtgcatatatatctaatattactatctataaatataataaatag

SEQ ID NO: 68863 - DNA, 255 bp, Acinetobacter baumannii; identical to SEQ ID NO: 65731

SEQ ID NO: 68864 - DNA, 804 bp, Acinetobacter baumannii
atgacatcgataacaattatgcatcaggggaaggttttagaggatgaaaatcaaaattataaacctgatgtattttcattaaattatgctgtcacggcgtttgagggtttaagatcatatatagataaaaaaggaagttttatttttaggcttgaagatcatgtggttaggcttttaaaaagtgcagaacatttaggttttaatgtgaaaaaatattcaaaagaatacatacaagaagagattataaaatgtgttcaattgaatataaataaagagctttatattaggcctattttcttctacgaaagtggtataatgaatctaaaaaatccaccgaccactaatttctctgtttttactttcgagcattcacgaaaggaattaccagatataattagtttagaggtttcaaaacatagacgagatatatcatcaatcgataaaaaaatatctaaaaactactatgatagttttatggcattgaaaaataaaagtctaaattttgacgatgtgcttttactatcgtcagataattatattactgaaaccagtgctcataatattttctttgtcacttcggataataaggttattactccatctttagagttttgtttggatggtattacaagaaatactgcaattagtctgttgaaaaaaagagatgtaggcgtggttgaaagaccaataaaccttaatgaattagatggtaacatagtagctgcatttacaactagtaccgcttcagaaatcagggtaattaagagtagacctcttgcgaaagtaaaaaccacctcaatctaa

SEQ ID NO: 68865 - DNA, 483 bp, Acinetobacter baumannii
ttgtcaacttgggaagaaattaaagggtttattgaatttataaaaccacatgaaactaaaactgtatatgtagcgggttgcttagagccatcagttaattatgttctacttggtggaatgagtatcaattatatcagccaaagtggatatacaggaattatatctaacggtttaattcgggattatgaggatctacaacaaatcaatatacctgtgtggaactatggatttggtgttatggactcacaaggatgtatgaaggttgatagcgtgggacaaggctgtatagttaataatcattttgttaatcaaggcgatttaattattggtgatggatctggagttatttcagttgatagacaatacattgatcaagtaattaaattagctttagaaatcaataaaattgaagaatcaattttatcacaagtgagaagtggagcaaatttatatcaacttgttaataataaaggacacatttaa

SEQ ID NO: 68866 - DNA, 255 bp, Acinetobacter baumannii; identical to SEQ ID NO: 65731

SEQ ID NO: 68867 - DNA, 252 bp, Acinetobacter baumannii
gtggcagggtcatacacggcagtggtgttggtgccatctgcaaagttaaccgtttcacctaacttcacattgtctgctgtgccaccattgacactaaagttcaggcctttgtctgctgtcgcctgggcagcagctgcattggtgactgccgtgtttgccgtattttgtgctgctgccgcattcgttaccgctgtattagcagtattttgtgctgctgccgcattcgttaccgctgtattagcagtattttga

SEQ ID NO: 68868 - DNA, 753 bp, Acinetobacter baumannii
atgaaaattcaagatattatctttaaaaaatatgataactttacagagcaatctaacttttctataaaatttaaaagttttaactctcttttagttcatgtgcttacggctaataacccatatttctttcaccaaaaatctcactgggaaactataatagaaaatgctttagaagcagatattcagattggagaatacattgcacttgatatatctgcgattctaattagagaccctgcatgccaaaatatctatgaggctatttttttttataaaggttttcatgctttggcatggtacagagttagcaattattattggaaattaaataataaattactagcaaggaaaataaatcactttattaattctagtttaggaattgatatacatcccgcagctagcattggccacagcatattcatagatcatggaacaggagtagtgattggtgaaacaactattatggaaaattacatatcaatgtttcatggtgtaacactgggagggacaggaaaagaaagcctaggttgtaggcatccccatatagccagtcatgttttattaagctcgcattgctctattattggaaatattaaaatcaatgttggtacaagagtcgctgcatcctctgttgtgttagatacaattcctgaatttgttactgtagcaggcattcctgccaaaattgtcagacacaattcaccacataacactgaatataaatggaattttaaatggtatgaagaataa

SEQ ID NO: 68869 - DNA, 762 bp, Acinetobacter baumannii
atgaataaagtttataaggtcatttggaatgcttcaattggagcatgggttgcaacatctgaaattgcaaaaggtaaaacaaagactaaatcaaaaactttaaatgtatcagcggtagttttaacaagtgtaattagttttgctccaaatgctttcgcagggacaaataccgaagggggagtaggtcaaggaacctctatttcaggtacaacttcatgtcgtgaggggaatgcgagtacagccaatgaaaaagatgttgctattggttgtggagctcaaacacaagacagaatgggctctaacatcgcaaaccgtaataatccttataataattctactggtgcttatgctggtgcaatgaaacaaggcggtgcgatcagtgtgggtactggcgctgtagttgagaaaggtttaggtaccgcaattggttcttatgcgacaactcaaggtatttcaggcgtagcaattgggactggagctttgtcttctggaaatactgctcttgcacttggacgacaatctgccgcgactgctgatttttctcaagccattggtaatgttgcagctgctaccggtaaaggctctttagcaattggtcactcggcaactgcagaaggttaccgttcaattgcaattggttcgccagatattgaaaatgctgacccagttgcggggcaagcaggtgctgcttaccaacctaaaatggcaacaaaagcaacgggtagaggtggatcaggaaatttgaacaacacttataagtga

SEQ ID NO: 68870 - DNA, 342 bp, Acinetobacter baumannii
atggctattcacaatcaaaaaccaaccaaagaactgattgtgcattcagacagaggaagtcaatattgcagccaggaatatcgaaatatacttgagcaatatggttttcaaggttcaatgagcaagcgcggagactgttacgataatgcaccgattgaaagcttttggggaatactgaaaaatgagttagtgcatcattacaactatcaaaccagagaagaagcccaagcagatattataaaatacattgagttattttataatcatcgaagaattcaaaagggtttgggttttaagacaccaaatcaaatggccgaagacttttataagttggctgcctag

SEQ ID NO: 68871 - DNA, 216 bp, Acinetobacter baumannii
atgaagcgccttattacattatttttattgccttatgctacgggtacattcgctcaggagcccttcgaagtcagtaaaagctgttttgttgtgaatggtaaaaatagtactgagacttgcttactctcttctacgaataacttaagttctaactttgaaatatttgttctcatgaggattcatgtatttctgtgggaagtaatttatcgaatttaa

SEQ ID NO: 68872 - DNA, 462 bp, Acinetobacter baumannii
ttgggtaagcagtatcaattaaaagtgattcatgatgataccaagccacaaggtgtaaaacttctgaggggtaaattagaagtgaatgccttagatgccaatcttgaaagtattcaatctcatttaaagcaatggtatagatctcgagcaaaagtcatattcgaagtacgtttgcaacgtattctagaacaagccttatgggttggagacaagcctgaaatccgtttagtgaccatgcgtacacagtggggaaactgttctccatcaggtgtgcttacgctcaaccctcatctagttaaagcacctacaatttgcattgattatgttattttgcatgagttgtgccatttagctgagcataatcacagtgatcgtttttaccagcttctcactcaagtgatgcctgattgggagacaataaaagagcgattagataatatggctgtgaagttttttgaatag

SEQ ID NO: 68873 - DNA, 327 bp, Acinetobacter baumannii
atgacaagaataattgtggcatccaaagagggtttggacgttctgcaagatggtcaactcaataaagtaattttaaatcagcctactattattcagattggtgtaagccaaaaagatattgcatccatggaaaaacagggtgggcgcttagttatccatttaaaaaatggagagactattgtcttagaaaatttctttaatgaagcaacaaatacaacagagcattcacttgtttttccgactgaacatggaaaatttgttgaagcgcaattcgatgctcaaggtaaagtgatcgattataaaggcttatctaatttaacagtgtag

SEQ ID NO: 68874 - DNA, 309 bp, Acinetobacter baumannii
atggcggttgatagtgatccaagttttacgatgggtaatgtactcaaagcaggcttagcagttttagctgcggaaggattatatctttgggcttttaagaaagatgataaggatgactcatcaagtgcacctgatttaatcgcacctgctgctcctacagctacgcttgctgatgataccgtgacagtgactggtaaaactgaagcaaatgcaaaaatctatcttaaagatgctgcaggcaatacagtcgcatcgggtgttgcagatgcaagtggtaactacactgttaaattagataagcctttataa

SEQ ID NO: 68875 - DNA, 255 bp, Acinetobacter baumannii; identical to SEQ ID NO: 65731

SEQ ID NO: 68876 - DNA, 267 bp, Acinetobacter baumannii
ttgcgtaaagattgggatatcccttcgttgatggttggacctttcttcgcttggctatctggtcgttttgcttcgattactaccaaaggaataccatttacaaagcaaacgatatcaggtcttcgattatctacaccacctgagcgtgtgacagcaaattcttctgtatatgaaaagtcattattatggatgttatgccaatcaatcaatggaatcgttgggctaactttttttccattcacaaattcagttacaggaatgccgtag

SEQ ID NO: 68877 - DNA, 261 bp, Acinetobacter baumannii
atgcctatggttattgcagaaggagctaaaggtagccgagcgtgtagccatcctgcccccgtggagttgtttaaggcggcaggaataactgataaagatattacgttagtagacagcaactcaaaagctgcacaactcgtaaaagaaaataaatatgatttatgtgtaacaacacttaaagcagcagaaaaatttgatctaaaaatcattaaagattttggtgaagttccgatgggttgggctgttttcgagcgagtttaa

SEQ ID NO: 68878 - DNA, 762 bp, Acinetobacter baumannii
atgttcagcttaatttcatgtgctagtttttctattgctaaaaatcctaataaacaaaatgaggactctatattactcccaattcgtttagatgaaggctatctttttggaatagctgatggagtcggttcatatgaaggtgcaagagaggcatcaaatactgcaacaaattttttaatgtctttaaatcagaaccctataataaaaaactcacaatttattgatataaaagacatttttgagaaaattaaatataaaattgaactcctctcaaatgaaaatgagatttttaaggatgctgcaacgaccttaactctttgttatgttgataactatgggatccgaatcggccacataggcgatagtcgtttatacctaaaactaaataatcagcttattcaaattactaaagatcatactaggcatcaacaacttttagatgcaaaactctatacagcaaagcagttaaaaaaagtaagtggtaaaaatatactaaccactgcgttatctaagaacatagaaatgaattatgatgaatattatttatccttagaagatcttaataagtatagagatgaagaaaataatatcataataaatattatgtctgatggtacacacagtatttgggaaacaagacctaaattctcacctaagacattaagctctccattagctttctctagcagtcttttacgccggattaatagagttggagctgaagatgatcattcattaatttcggtaaagatacaattttag

SEQ ID NO: 68879 - DNA, 762 bp, Acinetobacter baumannii
atgattgaacatggtaattatcgtataaaacccataagagaaattgggagaggcagctttggcttggttgaagaagttgaattatataatagggtaggaaagctatgcggaaattatgctatgaaaactctttccctagcagatgatagcgacttagaagaatttaaaaaacgatttcttcgagaaggtcgttatcaagctaattttgttcacaaaaatattgtaccgatatatctatacagtttaaatgttactaaaccttggtttattatggaattaggtatatctgatgcatatacagaattatctaatggtagtcttagtctcgcagatagattagaaataattacctgtttactatctggggtatcatttatccataaagctggttatatccatagagatattaaattacctaatctgataaagtttacttcaggatataaaatctcagattttggattagtaaaaaatattcaaccaaatacggattctgctctaacggctattggtgcacaaatgggaacccaaggatattgggctcctgaaacaagttatggtgattacagccataaatctgatatatattccataggagttcttcttagtactcttgttagaggggatgtaagcctaaacgggaaaatgacagatttgataaataattgtacttcttatatgccagcatcacgttatgaaagtattgaaaagattattgccgattttgacaaaattaaggaaaaactactatgttcagcttaa

SEQ ID NO: 68880 - DNA, 726 bp, Acinetobacter baumannii
atggatttgcattgtcacttagatttgtatcccaatcctttagagttagctcacaaagttaatgaacgatgtgagtttactttactagttacaactagtcccaaagcttggattgcaacttcgcaaagaatgaaaatctttaataatattaaggtagctttagggcttcatcctgaaattgctcatctaaagtatgatgaattatctctatttcttgataacatcaaaaatactcgttttattggcgagattggtttagatggtagtccaaaatataaagatacttttgaattgcaagttcagatttttgataaagttatggatgaatgtaacttacacggcaataaagttattagcatccattctagaggagcagtcaaagaagttttaaatatcttactgaaataccctaaatgtggtaagccaattttacattggtatactggtaatttaaaagaccttcaaattgctattaaattagggtgtagatttagtattggattacaaatgttaaaaactaaaaaaggaatagaaattataaataatattcctaaagaattgattcttttagaaacggatggtccttttgtcagtcttgataacaattttacatatccttgggacaccgagaaaataattccttatttaagtgaggtttggggggtaaataaggacatatgttgtaatcagttaagagataacttaaataaattattaaaaatttaa

SEQ ID NO: 68881 - DNA, 1284 bp, Acinetobacter baumannii
atgaaagttatatgtaaagataaatgtgattttctgacacagttagaaaataatacttttaatttttgtttttttgacaatagtggtaattctaatataggtacgattggtttaaagctgttaaaagatttcaagaaaaaaggaattacgcctagtactgtagtttttgactttctcagaattggtttagctattaatgcagctgatcaagtgtgtgatagatcacatagtcctgatggatggactagacaaatagatttagaagtttctttgtgtgatccgcagaaatgggaagataataaggaagatttgattaaacttttaagaaagcttacaggtgatttttggtctctaactttcattcaatctactaaagaatttaaatgggatacaccacatccatccaaattaaaactgtatcaagatgccacctgtgtatccttattatcaggggggatggatagtttaattggtggaattgatctgtgtgaggaaggagaaaaacctctctttgtctcacaagtagttaaaggggatagacaaaaacaaattcaatacgcaaaagtacttaaatcctcaaatcaacattttcaatggagtcatgcaactggtttaagatcaagaggtgaacgatcttcaagagctaggtcaatagtattttatgcatttgcgttggttgcttctgaattattaaactctaatacaacaaaaaaaattatcgtacctgaaaatgggtttattagtttaaatatccctctcaatctaggccgttttggtagtttgagtacgaaaacaacacatccaattgtattggaaatattagaaaatatatggaaaaaagttggattagatgtgcaactagtcaatccatatcagtttatgacaaaaggtgaaatgattaaaaattgtaagaatcttgcgctcttaaaaaggcatatatcaacaactacaagttgtagtcgttatctgacttatggttataagcattgtggtcgctgtgtaccatgtcttgttagacgtgcagcatttaaagctggaggaattccagacaaaactaaagaatactctatcaagaaaattgcaaaaggtggtattgaaaaagatgctaatgatattgcagctgttgcgatggcttgcttaatgagacagaagaaaggggtaaaatactttagtggggctttagcatttgctgatgcggaaaattatactcgatatgaaaaagttgtagatacaggtatccttgaattacaggctctactacaacaacataaagtgatttcataa

SEQ ID NO: 68882 - DNA, 828 bp, Acinetobacter baumannii
atgggtacttcaacttctagtaaagggccacaaggtggaatttcgtttgatcctccatggttggatcaaattccaaccagtggagggcctgatatagatactaataataatgttaatcaagatgctaatgatgaacaaaatactcaagtaggcggaatttctccacctagacgttttgctccctccagaactcctatgagagagtttctaagacacggtggtcaacaaaattttagaaaagtagccggaaactattctaaaactggaatgggtggagcaaaacaactttcttctagaatgagagttgctaccacagttggctcaaatttatttggtctaatacaaaatatagaaaacatacccagtattcaaaagtggttatcgagtttaaatggtgcaactcctaattttagagagttagaaaaccaaatcattaatatacttatacctgatggtggaagcgttgatgaggattcatgcagagattctttatctaaagcaatgagtgaactttatgagactaacccagatatagacttacaaaatattcaacaaaatgaaatatggtttttaattgaacgttttttagcaagtgagtgtctaaatcgtttatgtcatgatattggtcaagttatggaaagctcagaatttaaacctgaagttattgtgcacagaatggatgagatgagaagctatcttgaagcagatttaaaaagtaacttagaggttttgaaaactcatttagttaatccctcaaatagagaaattaaaaaagttcttgaaaaaagtttagaaaatactttctctctttatgagggtgaaatttaa

SEQ ID NO: 68883 - DNA, 1866 bp, Acinetobacter baumannii
atgtgggccgatactgaaactgaagttgatatgttgaactttgctgtggtggcaaatactgcggcggaattaattaaagaatcaaatgatgagccgctttctataggggtttctggtgggtggggggtcggtaaatcatcgttagtcaaaatgattaaggtctcgcttttagaagccgaaaaagatattgatgataaacataaaaaatatatttttattgattttaatgcttggttgtatcagggatacgaagaagccaaaatagcattacttcaagttgtggcagataaactcttagaggaagctaaaaaaagacaaactgttgtagataaagcagtagacttttttaaaagaataaagtggctgaaagcaattcaatatttatatccaatggggcgtaatgctgctattggagcagctgttggtggaccagcaggagcattgattggtgctggtataggtgtttttgaaactagggagcttccatctgctgaaggatttaaagaagctacaggaaatatagaagcattgggtaaagagttaggcaatttagtttctcaaaccgaagaatcaactttaccaaaagaaattgatactttgagaaagactttttctgaaattttgactgatttagatattaggttagtagtttttgtagatgatttagatagatgtttaccacatactgcaatttcaactttagaagcaatgcgtctattactatttatgccacgatcttcatttattattgcagctgatgaagagatgattagaagtgctgtgagagttcatttcgaagggcttgaaattacaaatagcttggtaactagttattttgacaaacttattcaagtacctttaagagtccctaggcttggtaccaatgaagtgaaagcctatctcgctcttctatttggagatttatccaaaagaaaaggacagttaacgtcaacagaatataacaacgcaaaagagttcattctcagtaagttaaagaaaccatgggaaggaggcttaagttatgaagatcttaaaactgcatatgctaataaagaggaattgttatcaaggctaaatcttgctgaggatatttctaaattcttaacaagtgaagatgaaatagcagggaatccacgtttaattaaacgattcatgaataatttaattattagagaaaaaatagcatcagcacaagggataggaatagatttcgaattattagtaaaaattcaattgtttgaaagatgtgcattaccaaatgagtttgaatatttaaataaaattgttcttagttcggatgatggtatttcagaaataattatagaaattgaagaccagatagcaagtggtggggaagttaagtatccgactgagtttaatagtgacttttgtaaaaaatggtttgaaattaatcctaaacttggaggtgtaaatctaaagccatatttatatttaagccaagatcgatctatagatattgtccaaggtcaagagttatcaaatgaaagccttcaaatattggcagcaattattggtgcaaaaagttatatggatcctttaaagacacaaataaaaagtttaaatgcttatgatgccaaagcaattcttaaaagattaataagaaatgcaaaattagcgcaatttactaaagaaagtttagcttgctgtttaaatataactcgtcattttcctgagctttcaccagatttggcaaattttcttaaaaatttacctagccaaaaaattgtagcgccattagtacctacgtttagaaatgaaaattggattaaagaagtatttgatgcttggaataaaaatccagacgtagaacaacgagtcaaaactgcaatagcacaaaatggatga

SEQ ID NO: 68884 - DNA, 894 bp, Acinetobacter baumannii
atgcagggtttattagcaccatttgttttatgcctggattgtaataattttcttaatttcagtacttcaaatattctagattttatacaaaaaaaaactatgaaatgtgaatcatgtcaaaatgatattaactggtttgaaactgttaaaaatggaatctttgataattttatgaagaatgctgctctaggatttataggatgcaaaagttctattttaaattttacaatggaacctaataccacctttgagttgaattttgaaaattatggaattcctcaaaatgcagaaattttatacattaactatacaccgcaggatggtaatttattcccagtagaaatgcatgggaatacctccacattaaggtttaaaaagaataaagtacttatctatcctattccttcttttgagccagaggcaaaatccacaatcgttaatgttttagttagttggtttttaccaagtgattttgatgatgccttcataaacttatttgaggcttttgaagaatatatccatggtaattatttaggagtgattattcctgctaatgttgcgatcgaaacaacaatatatcgtttaatgaatgaatttttgaaggaattctcaagtaataaaaaggtagaggagtttttaactaataatgctacttatggatatcaactaagtattttattaccaatgtttttaagttttaaaggaatggaagaaatctctgaccagattataggtaatttgaatagattgagaaagttacgtaatgagtatgctcataatggtaaaataaaaaagataccatcccaaattgaaatagctgaaattcttacctcttgtttatttgtttttcactatattaaatatttacatcaaattaattataaatatagttaa

SEQ ID NO: 68885 - DNA, 4800 bp, Acinetobacter baumannii
atgaaaaaaatagccagtatatttctacatagcctatggctatgtataggggggatgttgggcttgttaagccaactgacctacgcagcaccagatattgttgcacaaaactattctgcttcgcgttcgcctggaattcaatcatgtactgtaggttatgatttaatggcgggtgatataagttatggacaaaatttaattacaggagctttaccttttagtcttaattataaggcacctttacgtcaaaatctttcctcagcacaagtattcgcacaaccggaagaaagctctctcgggtggactgataattatcaagctcacgttctcatacaaaatttaagttttactactaaagaatatcaaaatttctcagcaacccaaattacatctaatcctataagctattatcttcaaacaaatactcctgtaacaactactgtctctgctaaagaaattatcgttaggttacctggagaaagtgttgacactatctttaaagagcaagatggtagttttacacgcttatattcagcagatggttttagggatttaaataactatggaatggaccagttaccttggaattcggatttaggtgaatatcaactgagtcgctctggtaataatcttattattataaaaaatggagtaaaatatactataactgatacttcttatacgatgtctccacagcaaagtaatacaagtacaataaatctttatgttgatccttatggatatttgagaaccacgactagtgcatggagtagtaatggattatatccaatagctatttcgaataccgcaccatatatacaaactacagccacagtttcagtagatttatatcgagtagcaaaaattgaagatcaaggtcgtgttctaaatttacaatatgatagtaaaatgaacctgactcaagtcagtgatcaatataataataagttagtatttgagcatacttttcatgatacgacgttaggcactacgcaaactattgatgaatctcgtttaataactaaagtgacttatactgctgcgcaaggcggcacacaagttgcgacttttaattacaaagcttatgcaaataaggttccaagtacaggagctgataccaccgtatttgctttaattagttcaagctcaactattgcaggaaatttcagttatgtgaatgagatgactgaaataggtgcggttaaagcctatgttgcttttaaaggtagaacagcagattcaagttattattatccagtattaaggcaggtaaaaaatacttctggtcaaatagtgcgacaatgggatgtaactcaaaactatgtgttgaatggaacaagctattcaactgcacaaactacactacggtcttacataccactttcttctggaacagctcaagactttactacggtatatgatgataacgctaaaacaattaatttaacgttgcagcttgctaatagtacagcaactagttctattcaaagtacagtaaatgcagataatagtttgactattacagcatcaggttatccatgtttaacatctaatggtacacctgtgagtagcgctgagtttaaaacagatcgcagtcgattagtgaaagttaccgatgccaataatgtcgctacgagttatgaatatgatacgcaagcgcgtattacgggaataactgatgctgatggcaccacgttaagccgtaaaacgacatacacttatggtctattaaataataatggtgttaatttattcttgactccaacgagcgttgttacacctaatcttactattactaatgtagttaacccaagaggtcagattgttacccaaactcaggcttcaagtcagactggaagtacaagtaaggtaactacttacgcttatgatgagacgaccacaagtaaacattttggtcgcctattaagtgttgatgggccacgctctggtacagcagataaaattacttatagttatgatgtttacggtaatttagcgagtcaaactcaaacagttaatggtattgcacgtgtaactcagtacttgggatacaatacatttggtgagcctgaacgaaacttaaatccaaatggccttgtaaaccaatttatttataatgctgatggaacattaaaaagccaaactactggtgttggtggagcgacaggtacaattacaggtcaaacaactacttatacttataatactcttaagcaaaaaatcagtgaaacaaacccagacgccgaggtaacacaatttgcatatgatctagctggtcgactaattcaaattacattaccaaatggtaaccgtattcaaaaaacttactattcaattggagcggtggcgagtgaaaagagcgtgaccagtgcaggctcagtcgctacagaaagttatcaatatttagataccaaagggcgaattagtaaaactcaacaaggcagtgatgctacacgtcgatacactacttttatttatgataataatggtaatgttattcaaactacgactgcagcaggtgtgattgaaaaatggagctatgatgtacttaaccgtgtaacaagtcatacggatggttcgggtaacatcgatacaaaaggttatgatgttaatgataatatcgtgctttcaaaagatgctttaaatgcaggaagtaacccgtttagttatcgcaacggtaatgtattaactcaagaagtgaacactgattatggaacaaagagttatagttataacgaggcagatcagttaattcaacgtttacatggcccacgtaagtgtaactataacacgctagatgaattaggtcgttataaagcatttgtatgtgctgcaaatagtgggactacagccagtgaatatcaagtaaataataattacacctatgaccaaagccgttatggtcgtcttgataaagttacaactggcgtgacaggctatgatgtagatacgttatatacatacgatgcatatgaccgagttacccaaaaaggtaccactaaccagttatttaaccgttatgcaggtacgacaggtaatacactcaatgttaattatggttatagtacgggcggtaaactgacttcaatgaccttaccatctggtcgtaatgttacctatagctatagcacaacgggaatgctgacgggtattaacttaaacggtagtgcgcttgttcgtagtattagctatgacggagctaaccgagttacaggctggcaatggggagcatcaggtaacgcgggttacactcaaagttataataatgatggctctatagcggctttaacaaataaagataatgcatcagcagtcaattattcgttaacttttgggtatgataaagatggtcgtattactctcgttactcgtaataatggaactaaggactcttacacatatgatgctgtaaatcgtttaatcagcgaaagtcgtacaacaggtacagcagcgacttatagtattagctatacctatgacaaaaatggcaatcgtttaactttaaatgctacgggacaacacatgcagcctgctgcaagtgctgcctacacatatacagctaataccaataagttagcgagttttacaaaaggaggcgttgcacagactttcagtcatactaccaacagtgagctaagctatggtacttatttaccgacttatgattatgcaggccgtcgcaaagtagaccgagcaagcacagattactatttcatgaactacaaccataaaaatgaacgtagttttagagataaagtcgttaatggtgctgtggctacaatgactcaatacatctacgatgaacaaagtcatttaattggagaatatgacaaaactggagcattggtagaatatgtatggatgggtgataaaccagtagcagcgatttatggcagtggtgcggtaaccaagatctattacatcattacagatgctcaaaatactccaagacgtttagttgatggcgtaactcatgcggtggtatggagttgggattcaacagcatttggtgtaggtaacccgactggatcaatcacgtttaacttacgtttcccaggtcaatattatgatgtgggtactaaccagttctataaccacaaccggttctataacccagagctgggtcgttatatggaaccggacccgattgggttagaaggtggcttaaatccatatgcatatgcaggtagtaacccagtgatgaatattgatccgagtgggttatcattgacgcgaatggatgactttatgatgggaaattcaattgttaataatttaaacaatatagatctgaatagagcgcaattatcatttgaaagaatggcatcgaatcttattaatcaagttagtaatgataattatctgaaaagtttaagtgttaaagatacaactcaattatcaaaatattatcatagtactttttacccaaatactactcaaatacaacaaagagcggaaaatttacaggctgctggtacggctatagatatattcgcattgggatgtgcatctacagtgatatgtctccctgtagcaggcgaaatcggcgcgattgggggagcggttggtgcatatggcactctcctagatcaaaatgcttcgggcccacaaaaagctatcagtatagctatacctccactagtatcattaggagcagtaaagtttatgactactattccagaagttaagggttttgtaatagatgcttatggtctatatgttgataaagttacgggaaaaacaattgatgcaacatatgaatgtgttaattcagattggaagcaaaaaggatgtaaataa

SEQ ID NO: 68886 - DNA, 762 bp, Acinetobacter baumannii
atgaataatcaaactagttttattaaaaaaataagcaatataatatttagtattagaggatttatttactttataactctatttttcataactattctgggacttatcttatttttaccttttggtgaggaaaataccttcagtgtaggtaatttacatatagtttttaaaccaattaatctcggagaatttggtgggtttctatccgggatatttgctccattagcatttttatggctaattttaaatatgaaacaacaagataaaaatattgaaatttctgaaaaagaattaaatattttgttacaagaaaaagaaaacagaagaaagattactaaagcaaactttacaatagctcctcccaagcctgaaatattcaatgtaaatgataagttacttaattttaaggttgagattactagtgacattcctctaaaagattgctacataaaaaaatttaatgataaatctccatttacagtaataagttctaatgtaaaaggccaaaaaagtttctccaccttcaaaaaaagtataaataaggatgagctttgctatttaaatattgtggtgaatataacgaattttagtgatgagctatctgttttaaaggacaatattgaaattttctatttagatattgatggctttgaacaaaatcaacttttcgaaatatttttttatttaccagaaagaggtactagtaccgataactctccacacatgtatgcgataatacttttagttccactgaataattag

SEQ ID NO: 68887 - DNA, 291 bp, Acinetobacter baumannii
gtggatttaactttacgtgatggaacgagtttacaagaagcgattatgactgcgaagcagattgatgaacaaagcaggcaggctggattttatcaggaggctttagatgaggtggcacgacaaggatatgccaatgccaagtttgaagtagagagtgaggagggattagacgtggttgaagagtttcatcacggtgatgaacaggaacaacagggtcaaacagaagtcgttcatactgatgttagaacattgcaaaagggattggcacagagtgtcagggcggtgaattga

SEQ ID NO: 68888 - DNA, 285 bp, Acinetobacter baumannii
atgaaaaacgaaattatgagcaaatcagaagtatggggattgattgctctttttttaggtttggctagttatactacttttatgttttatcttcttactaaaagaagtgaagggttaaatttttttgatgatttatcttcttttaattataaaatagcatatttactttgctttttaatttttatattaagaaagttgactgcaaaatataagagtaaattagcttttatgccatttttggcaggggtgcttttatctgtcatgttctttattgttattttatag

SEQ ID NO: 68889 - DNA, 891 bp, Acinetobacter baumannii
atggttaaaaattatgttgatgttccttttgaaatgtattatgacacaaaagatgggattcccattgaagatgcgattgaacaacttaaggcactgaataagataattggaaaacaagcagctatagtttcaagtgtggctaatgcaagtatcgaaaaaacagaaatatttgttaatgaacttatagaaggtagttggcaagaaaaattatgtattcgtttattttttaaatctgaggaagattatgaaaaatttaaaaatgcagctggcaatgttgaaatgaaagactggataaaagtagtcttagcaatggggtttggagcatttatgttctactccatacaacaaatgctacctaaaaaagatgaaaaacctcaagtaaatattgaaataaataataataatggggtggtttcattaggtaaaagcattgaattaactgatgaacagattaataaagtactagaaaaaaactcgaaacctaacaaagctgataaacaagctgctttagatgttatgaatcctgcaaaaaatggtggggctactaaagtaaaaatggctggttatgaccaattaactattccacaatctgattttgaatctttaccagatgaagttcctaatcaagaggggaacgaaagagaaattaattattctaatactgatatatatatttatgcgagtgatagagacaaatcaacagttgggtgggctggtatagttcccgatttatttgaaagccgagtcaaatttgaattagctgatgaagtaaatcctaatactcttcatggtcaacgaaaagtaaaagccgacataattgttcatgagaaatacaatacagctcaaaaagagtataaaccttttaaggttacgattcttaaagttgcctaa

SEQ ID NO: 68890 - DNA, 180 bp, Acinetobacter baumannii
atgcgtgaactcaaagctggtgatgttgtatctcttcaatcagatgggggccatatgacggttgagcgtatccttgaagatggtaaagtccaatgtttatggtttgttaatggtgaagtcaaattttttgaatttgcaccagaggctcttaagcttatccattctggagattttacgtaa

SEQ ID NO: 68891 - DNA, 1323 bp, Acinetobacter baumannii
atgtttaaaaccaaaaagactatagaccaaaaaacggtcgatcggtcagagatttataccactggccaattgggtcgtacacgtgaaataactccagaaggttatttactttgtcgtgatgtgccgatcgctcgcattggtacattgatgtatgcggatggtgaagttcccgtcactgctgataatactgggttgatcatcatttaccgcggtgaggatgttttattcgatccaattaccattgccagcgcagaaggcaagcctgttacagatgatcatccagcggattgggttacaccagacaactggaaagaattatcaaagggttttggtaaagatgttcgccgtggtgagggtgctgattctgattatcttatggccgatttattggttacagataaagaaactatccaaaaggttttggatggaaaagtagaaatttctctaggctacgatgctgattatttagaaaccagcaagggcaaagggttacagagcaatattcgggttaaccatattgcattggttgaaaaagggcgttgcggttcccgctgctcaataggagatagttttatgtctgctaaaaagacacaaaagaaagaaccttggtatcaaaatttgcttgggctaaaacgcactgtagaccaagcactcgaagaggcagataaaactgtggattcggatgatgatgacaaaacagaagatgatgaacctgacgatgataatggcaaaactaacgatgctgctattaatcgtgaaattcttaaaactcttaagaccttggatgctcgtttggttcgtttggaaaagaaaaaaaccaaagattcggatgatccagaaaagaaaaccgaagatgatgatgacgatccggaaaataagacaaaggatgacggtgatttaactgagcctgaaaaagctgaaaaacttgatgaatctggtacacaaacttataccggtgactcattaaaagaagttatttcacgtgcagaaattctttcaccgggttatcgcatgccaacctttgatagtgcgaacaatggcaaagctgttttaaacactaaacgatcagttctaaaagcagcatatgcaactgaagacggtcaaaaggctatttccccatttgtgggccctaatcctgactttgataaattgccttcatttacgatcgatgcggcatttgtcggagcatctgaactcatcaaacaacagaacaatgccaaaggtgtgcgttctggtatttccactcgagatttcggtcgagcagcaccaacgcctgctgaaatcaatcaacgtaaccgtgaattctggaacaaacaaggataa

SEQ ID NO: 68892 - DNA, 609 bp, Acinetobacter baumannii
atggataagttagaagagtttagcctgaatgggccaaaaaataccgatggactaactttattaagtggctttccatcaaatcagaaaccagcacggcagtggtttaactggttatttaactcaattactagaaagattaatgaaatcattgatggcaagctagacgcaaatgcaaatgctgtttctgcaggaaagttagaaacgggccgaaaaataaatttcactggtgtaattcaggggagtggcacatttgatggctctaaggatattactatcgataccattggcggtggaaccttaggtgagaaagcaatcgcgattattcgccttaatggttcaacattcgatttagtcaaaagtcgaggatttgcttcagttgcaaatatgggtaatggtcgaattgagtttactttatcaaatgaagcacctgatgatgactatggaattgtttgtacaggatccgcgagtggtactgcagccgtgagtttaaacgagagtgaagactttgcaagaacaaccactaaatttcaattgttaggggcattcggtggtgataacacccaagggcctcatactcctaagttctgtactgtagttgtctattactaa

SEQ ID NO: 68893 - DNA, 2508 bp, Acinetobacter baumannii
atggcaacaaactggaatgcggtactagcaaatatcactaattccgctgatatcttagcaatcctccgaaaagttttaggattgctcgatggtaaggtcgatttaacaaagatcgatgagatcattgaagatattacaaatatgcagactaatgtagatactgctctagttaatcttaactcagctttaactgaatttgatgcggaatctcaagaagcaattcaacaagttattgcagcagggttaatggaaggttatgcaacagaagccgagttgcttgcgaccagaccaacagaacccaaaaaatatgctaaagcagaagatacagatgttatctggttttggaataaaccagaaggagcgccggaaggtaattactggaatagtacaggacttagtgagttagctagagctaaagaatatactgataacttattacctctaaaaaatttaatagtagggtcagttgaattagttggaccaaatcctcggttgatagcaggtattggtgtaaatctgaatttggatattgttgacgatattcgttatacagcaatgataatcccatgctacgagaatacagaggttactctttggaattctagcaacggaaccgttgcgggtgcggggtttggttttacattccataatgcttatcctccttcccaagcaaacaaaattactccgcatcctggctttcatagcaccataagcggttcagatactttgattcacacaagaacaccttttggcgcaaagtacattgtagtgaataaaattattacatcgctggggttagatcttacttggaaaatccagaacggatacggcattgataagaacttagcttttagccctgctggtttaatgcttgatagtaaatcaagtgtttcatttagagcatcaacaccagataattattattcaagtacaaataatgcagttacgggtaagtatctcagtttaaccaatgggactatccaagatacaagtactaaacctaactggaaaatagccgtaattccagttgaagcgggagttacatatcaactcaagttaatgggtgatccaagttttattaaaccgagctttctcattaatactcgttcaattgcacaaaacacggtaacgacaccagcaacattaatcagcataggagataacgtttattcatgtgtcgcacccgcaggtgctacataccttgtgatgaatttggacttaacacctgattatccaaatgttgcaatctcgagttctcttgttttgcaaagaattaagaattcatcatctttatcagtgactagtattgccggaatgcctgttgcagatccgatcgcacaagcatacttgcttaaatcaagcacttatatagattcgaatatttattcacaatctttgaataaaactgattggtatctaagtatcgttaactctacagtacagccacgtacagactatcactggaaaatggcgatgatacctgtcaagccaggaggagtttatcgtgttgtatgtccgcggcctagcacaacttttaacttgcgctttactgatttagaaaatcctttagccacgaatactgcgacattagccccagctctaagtacagtaattgatgacaataatattgaagttgttgcacctactggtgctaaatacctgttaattaatacatatatcgtaggtgggagttttaactatgacataacatcatcacttgttgtaaatgatgtaagtaatgctgttaaaacaccgtcagagatttcattattgaatggctttagcctgcgagataattattcacgtaagcaaattgagtcattattaacacgaacatttgactctattttaaagggcaagaaagggggattcattggcgacagtattacggctgtcacagggcgttctcgctataactatcactactatttatctcaaatggtagggggtatgactgtttataattatggcatttctggtactggtttctttaatcgatacaatgttgctgatgctattattgaaacagatattgattttcttgtggtggctttgggcaccaatgattggggaaatcaaacttcggaaaaccaaaagttacttggtgtttttggtgatactgggaccacgacaatttcaggatgtattaatacaacacttacaaagcttattaataagtttcctttaattccgttagtaattttcacgcctttgccgcgtggaaataattacggcttaaatggttctaataatgaatatggctacaacttaaagaatttagttgacctattgcatcaatatgcaactcacttttctttgccaatttttgatttgtacagcagttcaactttatatccatggcagccagctgcaaatgaatattactttaagccgtacgatactacacagtatggcccaaatccggatggcctgcatccaaacgatgaggggcacaaagtatttgctcatcgaatcaagaatttcttagagtcaattcaacacaagtaa

SEQ ID NO: 68894 - DNA, 618 bp, Acinetobacter baumannii
atgattattgataaaattaaaaacactaactcaataccagaaatggttactttatttataactatcaattttatagtacagacaagctataagtttggttttttaacaaattacggaaactggactttatcccttttttctccaatagagttgatggttggaaatttagaactaattttgctgtatatcatgatttttacagggataatttatgaagaagcattttcagcaataattacatcaatcctttctttaacgatatatccttatatcagcgtttggatttacacaggagcttttacaattccagtgactagcatttttgcaatagttattggcctgataggttttcttttaaaaaacgttgaacaagatacaacccacgaaattttcctatttgtagttttattatgtatagcaccattattctatggtttaaactctaataaaaattcaccaggtgaaaatttagctttaatagaattgaaagaaaaagaaacagagaaatggtacattttggacaagttttcagatagcttccttttagtgaatgaaaaaaataatagccttaagattgttaaaattgaagaaacaaaaactattcaaataatcaaataa

SEQ ID NO: 68895 - DNA, 318 bp, Acinetobacter baumannii
atgtttgcagtccatgtttttgatataaactcttctgaaaataagtcaataaaagaaattgttacttcaccagaagtggcaaaaattttattagatttaagttatgaaaagtatccaattctatcgaatataacatttatagatgaagagttattcaatggagatgagcttctacaaataaaagatgaaatttgtatgctctataaagaagtaaataatgaaaatcaaaaacaatttttaaaagagatcttagaaattgtaaagttatctgaaaatttgaaattatgggtgttatttaatcctttttatgagacttaa

SEQ ID NO: 68896 - DNA, 165 bp, Acinetobacter baumannii
atgaataaatcaatggcgtatgcctatactggtgttgtaatcacaatgctgttttggggctcagcatttaatgcgatgtcttatgtgattcaatatatgccacctctttcagcagcagctgaacgttttacaattgcaagccttggcctatttcttctgctatag

SEQ ID NO: 68897 - DNA, 771 bp, Acinetobacter baumannii
gtggatttttcgttgaataaactgaagcaaaaaaattattataagagttacttgttaggtgttatattattaataatatataccttatgtcataaattaatttattcagaaataattttaatagctggagtttttgttattgaagtgggttttataatctgggcaattaatttttacaaagataaaataaaaggaaaaccattttatatatttgcgtttagtatagttaacttgtttatattgtggttttcaaatatttatgctcaggaattaattgtacaaagttttggtttaccagctgaagattttagtcttaccttacatttgttagtacttttttgttatattccagcagcaatattatttacaattttaatctttgttataatatattttggtatttttatatatttgatgttaataatgtttaagaattatctatatgtttttattcatccatttttagtaatgttgggtaaggctaatatgaattataaaattaatcttgatcatagagttttcttgcattttttagcttttgctattaatagtctattgttggtagggatgtttcaatttattgttaaccatcagtcttcattttatccatctattagatatattgcttataatatagattatcagtatttatataattacccaaaaatcgataaagataaaaaaactagattacacgcaaataattatttttcaattatggaaggaagtgggcagaatcttaaagttatagtaaaaaaaatagaagattaa

SEQ ID NO: 68898 - DNA, 531 bp, Acinetobacter baumannii
atgcggaccatctgccaacactggaagtgtattgtctgcaagcgtccaggtaccgtcaccattgttcactgctgggtaatccacgccatccacagtcactacaactgtcgcagtaggatcatcaatcgtaccggtcaatgcaggagttgtatcgttagtcgatacatccgcgaaagttactaccggtgctacaaggtcaacgataaagccgtctgtaccgtcaagtacatcgcctgtaccaaggttacccacaacatctgtgtagctaccatcagccacggcaatgcttggtgctgtacctgtaccatccggtgtgaacactgctgtccaggtgatgttgtccgttgtagtcaggccagtcaatgtaccgcctacaaccgtgatgtcacttacatcaaagcctgcaactgcttcactgaacgtgaaggtaatgttggcatcttcacctgccgcaagtgcaaggtcatctgtcgtgatcgcaagtgttggtgctgtcgcatcaacagtcactgtacctgttaccggagttga

SEQ ID NO: 68899 - DNA, 531 bp, Acinetobacter baumannii
atgcggaccatctgccaacactggaagtgtattgtctgcaagcgtccaggtaccgtcaccattgttcactgctgggtaatccacgccatccacagtcactacaactgtcgcagtaggatcatcaattgtaccggtcaatgcaggagttgtatcgttagtcgatacatccgcgaaagttactaccggtgctacaaggtcaacgataaagccgtctgtaccgtcaagtacatcgcctgtacccaagttacctgcaacatctgtgtagctaccatcagccacggcaatgcttggtgctgtgcctgtaccatccggtgtgaacactgctgtccaggtgatgttgtccgttgtagtcaggccagtcaatgtaccgcctacaaccgtgatgtcacttacatcaaagcctgcaactgcctcactgaacgtgaaggtaatgttggcatcttcccctgccgcaagtgcaaggtcatctgttgtgatcgcaagtgttggtgctgtcgcatcaacagtcactgtacctgttaccggagttga

SEQ ID NO: 68900 - DNA, 426 bp, Acinetobacter baumannii
atggatgaatattcaaagcaattaatgagatttttgaatgctatagtggaatatccacatgaatttaaattaaatattactaataaaaaaatagtaccagttattttaaattctcttccattttcattagattatgagtttaatggaatagtttttacagacttttcagtaattaataaattttttgatagtaaaaatatatatcttcaagtatatggaaaagattgtggtaaaataaatgtcggtatattacatgaacaatgggaaagtgatcttcctaatgcctttgatttttataaaaatataaaatcttcctattatattaaagaagcaagaagtagactaaatataataaatacagagcatattattgatgggaagattgttgtttttgatcgaaaaataatgacgggtgatattatgtaa

SEQ ID NO: 68901 - DNA, 138 bp, Acinetobacter baumannii
atggatgcaaacaataagcacgagttaaaacaaggcttatccaatcggcatattcaactcatcgcactcggaggggcgatcggaacagggtctgtctcttatacacatctgacgctgccgacgatactccttgtgtag

SEQ ID NO: 68902 - DNA, 417 bp, Acinetobacter baumannii
ttgaaacaggcttggaaaaacggtgcagaaagttattatggaattatgaccaagaattttcctaacctatttcaactggtcgggccaaataccgttttaggtcataattcgattatatttatgattgagtcacaagttaattatattttacagcttattgatctagttgaaaaatctggacagcacgctatagaaattaaaccggaagttcaggattccttcaatgaaagaatacaaacacaacttcaaggtactgtatggcaagctggtgggtgtagcagctggtatcaagctgccgatggaaagaacttttctttatggccaacttatacatggaaatattggctagacactcgtaaagttaatcctaaagattatttgttattaaataaatgctcacagagctatgcagcataa

SEQ ID NO: 68903 - DNA, 282 bp, Acinetobacter baumannii
atgcgttcgaaaaagaggctaagcgaaataagagcactaccatgcgttagatgtggtcagagtcctagtcaagccgctcattcaaatagctcgaagcatggtaagggtagaggaatcaaagccagtgatgagtttacagtacccttgtgtgcgatttgccatggtttattcgatcaatttaacttaggcacaagacaagaatcagaagccatgtttgagcggtggttggaaaaaactgagcggatgttgaatattgatggaaaatcacaagatttattttga

SEQ ID NO: 68904 - DNA, 618 bp, Acinetobacter baumannii
atgctcgctacggaagatttggaaattcgtggagcaggcgaattgttaggcgagcaacaaagtggctcaatgcaggcgataggatatagcttgtatatggaaatgcttgagaaagcgactaaagcaattcaacagggtaaaaccccgaattttgatgctccattgtcgttaactgccgaaattaacttacatattcctgcacttattccagatgattatctgggtgatgttcatcaacgtctattattctataaacgtattagtaataccgatacacaggaaaaactagataacatccgtatggagcttattgaccgtttcggtattccaccgcagtcggttaagcacttatttagcgtgcatcaaatccgtttgaaagcagaacatttaggtattacgaaaattgatattaatactcaaggtggaaatattgagttttcaccagatacgccagttcaggccattagtattattcagttaatgcaaaaaaatccgacttattaccgtatggaaggcggacaacgtttgaaggtgatggtgcagcttgaagagtatgaaaaacgaattcaatttatcaatgatttattgcaaaaattgatgagtgaactacatgcctga

SEQ ID NO: 68905 - DNA, 663 bp, Acinetobacter baumannii; identical to SEQ ID NO: 45704

SEQ ID NO: 68906 - DNA, 789 bp, Acinetobacter baumannii
atggcccaaaatgttatgaaaaatcaaaatgagcttattaatcaattgaatgcaaaaatggaaaaggctttcgaaaccaatacggacatattggaattagcaaatttgggacaaatggtagatattattgctcatgaattggctcgtataacagagaatacatcaaatcttttaattcgattaaaaaatagcgaagacaataaagaagaaacatcaaatataatgaatgaattgcgtaaacaaataattgcaactgagaaaagaattagaagtattgatgtattaagcccagcagtaagacaaagaaaagaaagttatgatattacagcgcagtttaaaacaatacttgaaggatacgcacctaaacttcaaagacataatattaattataaaataactgttgatgactcctctgaactaaaaccagtacaggttacgatggttagaggattagtagcacaaattatggaaaacttactgaccaattcagtatattggcttgaccaagggttaaaaattggcgaaaaagaaaaattaattgaactcaatattgagagcgatactaaaattatatatatccgagataatggcccaggggttgacccagcttatcatctagatattttcaagccctattttacaaatagaagagggggtaaaggccttggattatatatagccgcagaaattgcaaaatatcacgaatcaaaattatatttgtctaatgaaattgaacaagatggaaagttaagaactttcatcattgaattaccgaagagttctatttga

SEQ ID NO: 68907 - DNA, 1425 bp, Acinetobacter baumannii
atgagtcattcatttaaagttgcagctagaaccttacgccatttaggaggagaattaataacttctgatgaaatggctcttaatgaattaattaaaaatgcttttgatgcgggatcaaagagagtaaaagtatttattaactaccctatgaatttagcagtactctcaaaaacgctagaagatttcacatctctgaaaataaataaaaacaaagccttagagctaatagagatcaataccaagctctatatcaacccactcaacacggcccccctctctacttttctaacttatattgaccaagtattaaataccattaatgagcaaaataaacctaatatactctctgaaattaaagataatttttacaatataaagatatgtgatactggtcatggaatgaccgaatcagaactcgaatcagtttttttaacaattggtaccccttctaagttatcacagaaatcaaatggagatcgtattcttttaggagaaaaaggaataggccgattatctatgatgaagctaggaaataaggcaactgtaataactaaaacaattgatgatcaaatatgtaattcaatatcttttaattggcaagattttgacaaccctgatttgtatcttgatgaaatcaccattgaaactcaaaaaattaattatccagaaacatttataactggcacacaaattcatatcaccgaactattatctgattggagcttaaaaaaaacagaaatatttgtaaaagaatatattcaaagactaagaagcccttttagagaagggaagtctgattttccaatagatattttattaaatgataccagattaaatataacccctatcccaagctggttaaaagaacaatcaagcctacaggcagaatatatatttgagccttctcagatcaattcagctcttcatggaagtttgatatggaaagattcatcagcaccagatattagaagttggtctattgatgatctatctagaatactaaacacttcaagttcacaattaaatcttttaggaccgcttaaaataaagtttctctggtttaatcgtaaagatctaattggcaccatagaaagaagtctcaaaaatattaaagaagagttaaatttatgggtaggcggatttagtatttatagagatggttttagaataggatttacgggtggattaaatgatgattggctaaaaatggatagcaaggcacttaaaagtcaaggttatactttcaatcgctatcaaactgttggtgaaatatctattagtaaaataaaaaatccaaatttaaaagatacagcaagtagacagtcattagttaataataatgaatttgaactactacaagacctcatatcagaaataattattaaagatacaaaaagtcgaatcgaagatagaaaaaaatattag

SEQ ID NO: 68908 - DNA, 315 bp, Acinetobacter baumannii
  misc_feature (284)..(293): n is a, c, g, or t
atgaatacggcaatacaagcagctctcgaccatgcagtgcaaacccttcagcaagaaggtgtgcttccttcggattggaataattcaagcaatttaacacgcaccaaagaccgaagccatggcgattttgcttctaatattgccatgatcggctctaaagctgctggtatgaaaccacgcgatttagctgagaaaattctagcagcgctaccagaagttgcagacatcagcaaagctgaaattgcaggccctggttttatcaatttctttttaaatgcagatcnnnnnnnnnnaccgtccacgcatattcagtaa

SEQ ID NO: 68909 - DNA, 747 bp, Acinetobacter baumannii; identical to SEQ ID NO: 49089

SEQ ID NO: 68910 - DNA, 417 bp, Acinetobacter baumannii
gtgaaatttgaatatcaagagctagaacttgagctggatccccagaagattcatccttatggtaacggccacacatatgaagatgtacttctatgtaatgaaaacagaccactatgggttggatataaacattcagaagtagtagttactaccaaagagtttcgaccgtttcaaaatgttcaatatcctcaaatgaatgttaagatacaatttcttaatgcacagcaagtagcaactttaaattttttgcaacgcattgattttcggttaacaaattcctcagatgaggtacttagtctagagccagatgaacaatctatattaggtttcccaaatcttggaggtgtagatttttgttttccaagagatcaaatagttgaaaagctaagcaaggctattctgccatatattcaataa

SEQ ID NO: 68911 - DNA, 264 bp, Acinetobacter baumannii
atgcctgaattatttacgctgaccgagctacaaaacatttatgaaattattcttgggcaatctttagataaaaaagcgtttagacgccgtatgatagaagcgggtgcagttgaagaaaccaaccacagtaaaattgtgggcaaacggccagctcagctttaccgctatgcactcgattcttttgattttatatttcctcgttcactcgaattacctagaaataaagagggtgaaggcaagcaaaacaatgagctttctgactag

SEQ ID NO: 68912 - DNA, 252 bp, Acinetobacter baumannii; identical to SEQ ID NO: 56364

SEQ ID NO: 68913 - DNA, 333 bp, Acinetobacter baumannii
atgagtaaattttttgtacccgatattcgctatattttatttgccatcagtgtttttattttttggaaaacaaaactttatttccaattaaatgagcataaatttaaaatcccgatgttgcctgtattgtttacactcgcttttctgatctggattgctgaaaatattagtaccttttataaaatttggctttatccaagtcaggtagaggcttggcatatggtggggtggggtaaacttggatcatggtatttattattgcttttgagtttagtgttagtacttaaaatattaggtcatcgagataatcaaggtaattggaatttaagataa

SEQ ID NO: 68914 - DNA, 477 bp, Acinetobacter baumannii
atgcagcttgcttacgagcaagctgaattagcagccaagcagggggaaattcctgtaggagctgtaatcgtgagtcaaaacaagttaattggagctggttttaatgctccaattggtttatctgatcctacggctcatgcagaaattcaagctattcgtgcggcttgtgagtcattgaaaaattatcgtttacctgaagatgcgactttgtacgttacgcttgagccgtgcacaatgtgtgtgggagcattagtacatgcaagaattaaacatgtcgtatttggaacaacagaacctaaagctggctcactcgtgagtgcacgtcaattattagaaaatggttattacaaccataaatttacttttgagcatggatatttacatgaaaaatgtgctcaacagttaagtcttttttttaagcaaagacgtgaacaaaagaaacaagagaaacaacaaaaaacgtccttaaatgattaa

SEQ ID NO: 68915 - DNA, 351 bp, Acinetobacter baumannii
atgaagcctatgttttcagggcatgaaacttttcctttacgtcaattgtggttaaaaaaggcatatcaccaagtttttaagttttatgaagctgatagtgattatgctcctaaaaccgttttttcagctcctgacgctattgagcgatttggtgttggtaagaatatggttgcggctattaaacattgggcattagcttgtgatgttattagagaacatacggataagaatggattcgaaattggagaaattggatatttactctttgatgagaaaagtggcgtcgatcaatatttagaaagtgaagctactctttggttattacattggttactaaccggaagggcatga

SEQ ID NO: 68916 - DNA, 216 bp, Acinetobacter baumannii
atgaaaaatcaaaacagtccagaagttattacggtaaacgaccaaaattttggtagtcatggagagcattggaatctactgacttcccatccagagacagatgtaccaaaatggcttggactagcgcttgatgctcctgtaatgccaatgggtttatgccaaaatgaagacgaaatggatcattcaaggtccacaaggtcagaaggtcaccattaa

SEQ ID NO: 68917 - DNA, 501 bp, Acinetobacter baumannii
atgagaactggcaacctcttaacgggtcaaaactatattgctttagataagttccctaaagcaaaacctgccactctacaaatcttgaatgatggccgtgtggtaattccaaccactgcaacagagttaagtggtttacaggcacaggtttcccaaattgctgataagttaacaaaattcccactagtcgaaattgggcaggatgttcgcaaaacgcttaagaatatgaatacagccattgagtctaccgacaagctggttaaacagttagatggtaaagttgctcctggtttacaagcaaccttagacgatgttcgtaaaactgtaagatcttccgagtctattttgtcgagcgatgcgccgttacaacaagacgtacgtaaagcactgcaacaaatgactcgtgcggctgcgtcattacagttaatggcagactatattgaacaacatcctgaatctattattcgtggtaagagaccagaggccaacgatgaaaaataa

SEQ ID NO: 68918 - DNA, 975 bp, Acinetobacter baumannii
  misc_feature (824)..(833): n is a, c, g, or t
atgattgaatacgaactcctaaaaatcatatggtgggtgttagttggagtcctactcattggatttgccctaaccgatggtttcgatatgggctcaatggcactcatgccttttgttggtaaaactgataacgaacgccgtgctgctattaatacgatcgcacctcactgggatggtaatcaggtctggtttatcactgctggtggtgcactatttgcagcttggccaatggtatactcggtcgcattttccggaatgtattgggccttattacttgtgctatttgccctgttcttacgtcctgtaggttttgattatcgttctaaacttgaaaatacccaatggcgcaactcttgggactggggactttgtattggtggtgccgtaccagcacttgtttttggtgttgccttcggtaatttattcttaggtattccttttagtttagacagtacattacgctcggaatattcaggtagcttctttgctcttcttaacccatttgctttaatttgcggtattgtcagcctttctatgttgtgtgctcatggcggcgcttggcttatgctacgcacagacggtgccttgaaacaacgctctgctaaagcaactcaaattatggcagccatatttttagtttgtttccttgtaattggtgcatggttgtacttcggtcaagtcccaggttatagctatgctgctgcagttgatccaaacgcagcacttaaccctttagccaaagaagtagtcacaaacaacaacccaggctggatgaataactacagcagctatccgattacaaaagtagctcctgtactggcaannnnnnnnnnttttaggggcaattattgccttctttacagcatcaaaagccaaagcgggtttaagttttgctggcacaagcttaatgattgtaggtgcgattttaactgccggttttgcactcttcccatttttattgccatcaagtgttaa

SEQ ID NO: 68919 - DNA, 315 bp, Acinetobacter baumannii
atggctcgtggttttgagatttcaaatatcttaacggatggcgtaggcttccctctttcaggttataactataataatacgaatcctgatacttacttttatgatcgtgtagaagtagttaaaggagctgactcgttaactaatgcctttggcgatccgagtgcaaccatcaataatattcgaaaacgtccaccccaagaatttcaagcaagcggtggtgtaagttacggttcatgggatacgcagcgctatgaagctgacgtatctggctcaattctaccaagtggaaaagtacgtggccgtattatgggctaa

SEQ ID NO: 68920 - DNA, 2940 bp, Acinetobacter baumannii; identical to SEQ ID NO: 51338

SEQ ID NO: 68921 - DNA, 1104 bp, Acinetobacter baumannii
atggaagcaggactcatcaagcaacaggacttcgaaaaccggaaaacagctatcattcaagctgctcaggaccaacgcaatcagatcgctgccgaatatgctcagaatgctcaggatattgaagataagtatcaccaagatcgattgaatgctcaaattgctcttggtggccaaatgatgggttcactcacatcgatgtttggttcaatgtttggcgagcaatcaaaagcatacaagatcatgtttgctgctgataaagcttatgccattgcagctgcaggtatttctattcagcaaagtattgcaaaggcggctagtgttggttttccagcaaatatcccattaattgcaagtgctattgcacaaggtgcaagcatcattgcaaacatccgggcaattaaagatcaaggctttgctgacggtggttacactggatcaggtgggaaatatcagcctgctggtattgtccataaaggagaggtggtctggtcccaagaagatattaaacgctggggcggtgttggcttagtcgagaaaatgcgtaagagtgcaaaccctgaagcttttctcaataacaatgccttggcagatagtgtcatgcgccgtgcaatgatgagctctagtgcctttatagaaagccaaaagcaggctgacatctttaatcaaccggttcaagatactcagattatctataagggtaatagagacacacctaaattagcttcttctggaaatttagacttattccatgatggcaaggtctacttctcatccaatggtttagttcaggatcgttcaaatctggatgatgttcaggactttactttaggacgtacttcacgccctcaagctgagattatgccttcaattgagcaatcctctccaactatcaatttcaagattgaagtcgtgaatcaagtcagtggtgcaactgttgaagctgaacaattggatgagaaaactgtccggatcattgttacagatgaactggataagcagcttccaagaaaggtaccgaaacttgtaagtgaccaaatcgcaaatccaaactcaaccattagtcggtctttgactgagaatacgacagcaagacggaatcgttaa

SEQ ID NO: 68922 - DNA, 402 bp, Acinetobacter baumannii
atggactcatcagctgggaaaccgaaaagcggatttgttgaaaaccgaagtattgactttattcctgaaaatgaaaggcatggcagtatatttgcccaatttacgctttggttcggggccaatttacagattacagctattgttacaggtgcattagccgtcgtattaggtggtgatgtattttggtcaatcattggcctctttattggacaatgctttggtgctgccgtcatggctttacacgcagctcaaggtccaaaactcggcctcccacaaatgatttcgagtcgagtccaatttggggtatatggtgcctgtatcccatcattcttgtttgtcttatgtatattggctttacggccactggtgaggtactcgctggtaaagcaattgctcatctag

SEQ ID NO: 68923 - DNA, 279 bp, Acinetobacter baumannii
  misc_feature (204)..(213): n is a, c, g, or t
atgtgtgcaaattttaaaccccttaagaaagagcattcttatcaattagacttacttgaacccacctttgattacaaatcagatgtctatccaagtgatgattgcccaataatcttatctcatcaaaatgaatgggaatggcgaaaagttaaatttggaatgttgccaccatatgcgaaagaagtttcatttaaatatgcaacnnnnnnnnnngaactgaaacggttgatcacaaacgttcatttaaacatgcctggtcaaatgatcaatttggcctag

SEQ ID NO: 68924 - DNA, 690 bp, Acinetobacter baumannii
  misc_feature (622)..(631): n is a, c, g, or t
atgcttgaattcttttctcgattaagcttagtcactaaaattattatcgccattattttagggataggcgtcgcactattatttccaaccgttacgccgtacttaagcttgtttggtgaactatttattaaagcattaaaatcggttgctcctattttagtctttgtactggttctctcatctattgccaacttccaagtcggtcatagtgcaaatttacgcccagtattactactctatgtagtaggtatgttattagctgcttttagtgctgtgatcgctagcttatcttttcctagtacgctttatctcaacactgtttctcataataatttgcaagcgcctggtagtctcgctgatatattaaaaaatctgcttttaagttttattgcaaaccctgttcaagcaatcagtgaagcgaactttattggtattcttgcgtgggcaattggtctcggcttagcaatgcgtcatagctcggatacaaccaaacaagtaatgcaggatgtttcacatgctgtaagcgctattattcataaagttattgcgtttgcacctgttggtattttcggtctagttgcagtaacttttgcagatgctggactagcaacacttgaaagtnnnnnnnnnntatgcacaattacttgctgttctattaggaacaatgctgtttgttgctctagtgattaa

SEQ ID NO: 68925 - DNA, 240 bp, Acinetobacter baumannii
atggctcgcaagattgaatactcggaagaaatttggaaccggctaaaagaagtctatgaatcttcacctaagattacatggcaagctttagttgatcaggttggcgaagaactcggttgtgagatgccttcgccatccgttgtacgccgtaaagcacttgctgagaaatggaaaaagaaagctaaatcatcgtactcgatgccactttcttttttagccataaaaaatgccccattttga

SEQ ID NO: 68926 - DNA, 1386 bp, Acinetobacter baumannii
  misc_feature (1303)..(1349): n is a, c, g, or t
atgcaaaggactacgaaacactttcaaattaatgcattagcacttgctatagcaatgagcacaatttcagcgcatgcagagactgatcagcagacttcggaatatggaactcttcctaccattaaagtaaaagctggaagtggccaagaaaatgaaaaaagttatatagcagggaaaacagatacagcggttccactgggtttatctgttcgtgaggttccacaatctgtttctgtcattactcaacagcgtttacaagaccagcaattgtcaactttagttgaggtcgccgaaaatgttacaggggtaagtgtcaaccgttatgaaaccaaccgaggtggaatctattcacgtggttttgtagtagataactatattattgatggtattcccaccacatatagcttgccttggtcttcaggtgaaattttctcaagtatggccttatatgatcatattgatgtagttcgaggggcaacaggtcttacatttggtgctggaaatccatctgctgcaattaatatggttcgtaagcgtgctacgagtacagagccaacagctaacgtagaagtgagtgcaggtagttgggataattaccgtgttatgggcgatattgccaactcccttaatcaatcaggaacagtacgtggacgagcagtggcccaatatgaacaaggcgacagctataccgacttgttgtctaaagaaaagctatctttattgttaagtgctgaagcagatttatctgaaaatacccttttatcgggtggggtaacttatcaggaagatgatccgcgtggaccaatgtggggaggtttacctgtctggtttagtgatggcacaaaaacgaactggtctaaaaatatcactacaagtgctgactggacacgctggaatgttaaatataccaacctatttgcagatttaactcataaatttaatgacaactggtcagctaaactgtcttattctcatggtaagcgtgatgctaattctaagcttttatatgtttcaggtagtgtagataaaaatactggtctagggctatctccttatgcatcagcgtatgaccttgaggtagagcaagataatgcttctttgcagctcaatggtagttttgatttgtggggcttagagcaaaaggttgttttgggttatcaatattccaatcaggactttacagcgtatgctcgttcaactgatacaaaaatggaaattggcaatttctttgaatggaacggcagcatgcctgagccagtgtggaatgcacctacactcaatgaaaaatataatattgaacaannnnnnnnnnnnnnnnnnnnnnnnnnnnnnnnnnnnnnnnnnnnnnnattgaacaaaatgcactattcgctgcgacttatttaa

SEQ ID NO: 68927 - DNA, 417 bp, Acinetobacter baumannii
  misc_feature (361)..(370): n is a, c, g, or t
atggctcaaattattgcgattgcaaaccaaaagggtggtgttggtaaaacaacgactgcagtaaatcttgcagcgtcactagctgtattgaaaaaacgtgtgctacttgtcgatatagattcgcaaggtaatgctacgatggggtctggtattcaaaagaatgatctactttattcaattacggatgtgttattgggtgaagtgccaatcgaaacggcaattcaaaaagctgaggttggatataaagttttgggttcaaaccgtgaactttctggtgtcgagcttgccattgccgagcaagaaggtcgtgagttcattttaaagaatgctttgaatgaaattcgggactcattcgattacnnnnnnnnnngttccaactcagcagatacatcgcgagttaaggcattacgcgcctag

SEQ ID NO: 68928 - DNA, 189 bp, Acinetobacter baumannii
gtgcgtgtggtttatagccaagatcatcagtccgacattaagttacttgccaatttggcatggtatgccacagacaaaacaggacaaattcaggcttttttattaaaagatgatgctgaaaaatgggctaaacaacagggcggaaaagtatatgactttaaagctattcaacttgtaacacagagctga

SEQ ID NO: 68929 - DNA, 369 bp, Acinetobacter baumannii
  misc_feature (325)..(334): n is a, c, g, or t
gtgtttgttgatacccattgccatttaacaatgttagatttaacgccttataacggtgatttagatctcgcacttgctgctgcgcgagcagaaggtgtttctaagtttatggcaatttcagttgaccttgatgatcatattgctttagctgaaatcgcaaagcgtcatgaagatgtggggtatacggtaggcgtacatccgtgtgaggatgttgatactatggctcgagcaacgactgagtatttgactgaattggctcaatcagaaaaggtatgggctttaggtgaaacaggtttagactattaccacagcactgactttattnnnnnnnnnngctcgaataatatccaccgtatcatgttttgctga

SEQ ID NO: 68930 - DNA, 630 bp, Acinetobacter baumannii
  misc_feature (570)..(579): n is a, c, g, or t
atgacagaagctttaaccgttttaggcggtattactgctgaacagtttttaacagagtattggcagaaaaaaccattacttgtacgtaatgctatgcctgaaattgtgggtatgttagagccgaatgatgtaaaagaactcgctttagaagaccatgtaactgctcgtcttatccgtcaaaaagataaaaatccaaatgaatggcatgtaaaatcgtctcccttaactaaaggtgattttcaaaaactaccaaagttatggacacttttggttcaagcagtagaccattattcatttgatatagctgaattgtggaagaaatttccttttattccacaatggcgccgtgatgacattatggtgtcttatgcccccaaaggtggttcagtaggaaaacattttgacttttatgatgtttttcttgttcaaggatatggtcatcgtcgctggcaactcggccaaatgtgtgatgcaaacactgaatttgtacctaatcaacctttaaagttgctatcagaaatagatgttcattttgatgaagtattagctcctggcgacttattatatgtnnnnnnnnnnatgttccacctggattatcacattatggcgttgccgaagatgattgtttaa

SEQ ID NO: 68931 - DNA, 528 bp, Acinetobacter baumannii; identical to SEQ ID NO: 66029

SEQ ID NO: 68932 - DNA, 1005 bp, Acinetobacter baumannii; identical to SEQ ID NO: 49939

SEQ ID NO: 68933 - DNA, 972 bp, Acinetobacter baumannii
ttgttagtttctccttatttaacggctaaagaatttgatatctatttggctgaggatggagtagtcattaatgaagttgctcctgaaccagattatcaatggtatatagcaggaggtcctgccttaaaaatagattatgaaccaacaaaaactccaaaacatattatagaattattaaaaaaaaataatttatatgggaaacctattggtatttatagaatagtttcaaaaaaatatataagtgctcctgtatggaaagggatgtttaagaatatagatgatcgtttagttataaaatgtgaggagttaaatgtaaaacttaatttattaaatattagtctaagtttatcgcaagtaatttcgactcttacatttggtgcttatggggaagtacttgatataaaattaccgacctcagcggactcatttggtataccatttataatggagaaaattggttttttccctgctgatcttaacaataaaagattttttaattatattgaaatatatggtcatgcctcttcatgtgcatgggatgcacgtttaatgaatcttagagttaagaatgatttaagaagagattttgctaaacatcttgctaatttagatgataaaaagggaggggttatttcattcggtgaaaacatggagtgggttgaaaattatactaacagactattgaatttagaagttgcaattaatgagttcagacaagttttacattttcattcacatgagacagaagaagtttttcataagcttatggaaaagcatcctttattacttgatgtatatggaaaagttgaaagtaaacctaaattagtttatcccgctggtgagttttctcctattggaaaaacatatgtagagcctgattttataatttcctattcagatcagtcctataaattgatcgaattagaacgtgcttcaaaaaatgttgttacaagccaaggctttgttgcataa

SEQ ID NO: 68934 - DNA, 702 bp, Acinetobacter baumannii
gtgttctatatacaaatcccatcgccagcaacagttaaatctgttgctggcatgatgctaaaagccttgaatgatccagcacctctttctggaacaacagcacagatgacagaacgtttgtgctatctcttaaagctctgtgaaacggaactgatcctgatggatgaattccatcatttatttgatatgcaaaaggtatcaaggaagatgaatattgatgtctgtaattggatcaaaacagtgacagactcaaccaatataagttcctgcttaattggattgcctgaatttgcacctttattgcaaatagatagccagcttgcgcgacgctttccactgacatttaagttatctcggttaaatatcggttcaactcaatcaccaggaaccctttacgggttcctatcacaagtagaacaaaatattgaaaaaagactcacattaaaatttttaccgcgattaattgatccattattcgttctacagatttacgcttcaaccaaaggataccatcactacattatttcactgatcagagaagcaatgttattcgcccttcttgcagacagtgacgttattactcaacagcatttttctttggcgtgggataaaggcattacctcatataccaatatgaccacacagaatccttttcatatggacacgtcaaaactagtacaacgaatgaagggtgatcactga

SEQ ID NO: 68935 - DNA, 546 bp, Acinetobacter baumannii
atgcgggttttgtatcagtttcctttgtctcattattgtgaaaaagctcgctggttgttagaccataaagaacttgattacgttgcacataatttgattcctggatttcaccgtgcttttgcacaacttaaaacaggtcaaaatttgttgccgattttaaaagatgaccatcgctggattgctgagtcgactaaaattgcgctttatctggatgatacttatccggaacatgcacttttacgccgtgatgaacaacttagacagcaaactcttaaaattgatagtttggcagatgaacttggggtgcatgtacgtcgttgggcacttgctcatactttagctcaaggtgatcatgctctagagattatgatgggtgaacaaggctacttacgacagtttgagaaaatatcaaaaccgtttctcaagactctagtcaagaagaactataagcttgaagaagagctcgtaagtcagtcaaaaggacgcatggatgaacttattaatgagttaaaccactatcacgttatatggttggtgaccgcttaa

SEQ ID NO: 68936 - DNA, 222 bp, Acinetobacter baumannii
atggttggtgaccgcttaagcctcgctgatatttcagtatgttctatgcttgcacctttattagaaataaaaggtacaccatgggaaagggaagaagatggggaagtatcgcccgattggagtaattatcagaaatatttacttgatttgccgcttggacagtacgttttaagaatatatcaaactgaacgtaatgcacgcgttgattggcgaggaatttaa

SEQ ID NO: 68937 - DNA, 264 bp, Acinetobacter baumannii; identical to SEQ ID NO: 47948

SEQ ID NO: 68938 - DNA, 597 bp, Acinetobacter baumannii
atgaaagccgtaaaacgttttgacccaaatatgggcgtacgtcttgtatcttttgccgtccactggattaaggcagaaattcacgaatatgttattcgtaactggcgtattgtaaaaattgcaacaaccaaagctcagcgtaaacttttcttcaatttacgcagcttaaaaaaatcgagtaaaaagctcacattagaagaagcgcaatctattgcaaacgacttaaatgttactccagaacaagttttggaaatggaaggtcgtttaacagcatatgatgctgcttttgaagctcaaggcgatgacgatgatgacaccccgcacactgcgccagtgttatatcttgaagataatcgttatgaccctgctcgtttagtagaaaatgaggattgggaagaacaaagtacatctgctttgcatgacgcaatgaaccagctagatgaccgttcacgtaatattttgcagcgccgttggttagatgacgataaatctaccctccatgagcttgctgccgaatataatgtttctgccgaacgtattcgtcagcttgaaaagaatgcgatggaaaaaattaaagtcgcaatgtctgcaagctaa

SEQ ID NO: 68939 - DNA, 222 bp, Acinetobacter baumannii; identical to SEQ ID NO: 51477

SEQ ID NO: 68940 - DNA, 1083 bp, Acinetobacter baumannii
atgttggaacaattttccaaatcgccctctctcctttcggttactgattacgaagaacatatctggatgttgcaattacaacagcctgaacaagttaaacgacgttttaatctatggaaacttaatcaaggtttagacattcaactgctcattaaagcaattcaagacattattaaaactacacctgacttaaatgttcgctatacatttagtgacgaaggtgatttatacaagtatccatttgatgatcattcggcttgtctagaagtaaaaaaaagcaatgcagaacacgtatttgagcaggtcgccaccttaaaagcgcaagcatggaatgcagaatttcatccccctttttttacaagtctcatagaaacagaacaagactattttcttattttagcgctccacccgattcttgatgaaagctatcaaaagtcagatttcattcaggctatacaaaatcggtatcaacaatattcacccaataatgtgccattggtgctgacagaaattgatatctcaaatcatcttgcaagttctacaaaagcgccagaacaatctaaccaaaactatgtgtcagaaattattttagaagagtttcgaaatacgctcgctgaaccagaaatgagtcaacatgatgacttttttgattttggtggccattcattattagcaacacgaattattggaaacctacttaataaacatggaattgagattcaatttaatgatttctttaaatctccatctgcggctgacttagcccaatatgctttcgttaaatctgcaaaaaacgaaaaaaccaccttacaaagtgtagataaagccccgcttactttagctcaagatttcctgtggcaagcttattctgcgttcgattttagcccaatttataacttaccatttgccgtagaattccttgaagaaattaatgaagatgttttcttgcaagcgtttacagatattgttgagcgccatacaggtttacgcacaatttttaatagcgccaatggtcaaacctatcagcaggttgttcctacgtctgaacttcaacaattcaaatggttttggaacagtgcctaa

SEQ ID NO: 68941 - DNA, 390 bp, Acinetobacter baumannii
gtgcaacaaagccattggcaattaaagaatcagaccaatgccattggagcaatccataaagggtatttattttcagtcggtttatttgactgcaaaatcaattcagatgtttttcatttttggattgagcaattcctcataccagcattaccagaaaatagtgtagtggttatggataatgcagcatttcataaaagagcagatattcaggagttattggaacaacaagggcataaaattctttggcttcctgcatacagccctgatttaaatcctatagaacagatgtgggcatgggttaaacgtaagcgtaaagaatggttgatcgactcagtcgatgagttatttcgagtttttttcgaatcttgtatgaataataaagtagtttga

SEQ ID NO: 68942 - DNA, 342 bp, Acinetobacter baumannii
atggctattcacaatcaaaaaccaaccaaagaactgattgtgcattcagacagaggaagtcaatattgcagccatgaatatcgaaatatacttgagcaatatggttttcaaggttcaatgagcaagcgcggagactgttacgataatgcaccgattgaaagcttttggggaatactgaaaaatgagttagtgcatcattacaactatcaaaccagagaagaagccaaagcagatattataaaatacattgagttattttataatcatcgaagaattcaaaagggtttgggttttaagacaccaaatcaaatggccgaagacttttataaattggctgcctag

SEQ ID NO: 68943 - DNA, 3438 bp, Acinetobacter baumannii
atggcacaagaatcacgtctcgtcattgtaattgatgcaaaaaatgcggagcgtaatgcgcgtaatctaggcaatgagctggatagcattgagcgtaaaggtgactttgccaccaaatcaatggatgcgttatctgttgctacacgtcaacttgctggatacatggctggattggttactgtaagtgccgccatttctaagatggacacttacacgggcatccagaaccaactgaagcttgtgacagatgggcaaaaccaactaaatacagcaatggataatacctttgagattgcacaacgctcgcgttcttcatgggaatcgactgctactgtctatcaaaaactagcaatgaatgccaaagatgtagggctagctcaagaggatattgggcgattaacagaaactatctctaaaggtattgcattatcaggagcaacagcagcccaagcggatgctgcaattatgcaattaggtcaggctcttggtagtggtgcattgcgaggggatgaattcaactcagtaatggaaaatggctatggattaatgcaattgatagcaaaagggatgaatgttcctattggccaacttaaatctatggcagaaaatggagaattaacatctgagaaggtcaccaaagcattattaaaaatgtcagatgaagctgacaagcaatttggcaaaactgattcaacaattgggcaatcattgggcttattaagcaatagtttaactcagttcattggagaggcaggcagaagctcaggtgctgcgcaagtactttcaggctcaatagaaggtcttgctaacaactttgaattattggcagatggtgcagttgtattaggaattggagcaatcaccaaagcgataatctcgaaaacagttgcggttcaatcggatcttgttgcttctgctgctcaaaaggttgctgatcaagcacaaaaacaagatgcactcatcctcgctactttaaaagtaaatgaagctaaagcgcaccttgcaaatgttcaggcgactaatgctgagacgcaagcaaaatttggggcaactgctgcaaacgcaagatacaaaattgcttcagacgcagtaactcaagcggtaatagcccaaactgcggcacaaaatgcgttaaacacagcaacaagcgtaggttctaaaattttcggtctggttggtggttgggcaggtgttctaactatcggtgttacagcattagcagctggttatatgtatatgcaaaaacgcacacaggaagctaatgcagaattagagcgtcaagcgagtgttgccaaaaaagctaaagaggagttgttggcacttaaagggattgaaaaagacaaatctattgatgacatgactgcatctatggagcgacaaaatgcagcattagcagagtcttcaagcaaagtaaacatgcaacttagcgcaattaagcaattgtacaagggcaataaagaaattgtgcaagtagttgatgatgccaagaatggcacaattagcatgactgatgcgacaaaacgctttaatgagttaaaaatcaataaagaggtttatgaggcatttaagaaaaatgctgaaacatttagagaaaattcagttgaagctcaaacaactaaagcatcattaaagctgcttgggcaagaaaccaagcttgctggtaatgctgctcagaatgctgcattgcaaaatgatgcaaatgccaacagtttagataatgttgctggagcggcaaataatgcaactaatgcactgagcgactatctaaagaaattacagcaaagtacttttaagacagagcttacaaacaaacttattggaaattatggttttgatcctgaaagagcaaaagcctttgctgaggcatatgttcagaatggtaataagatatctgctcaagatgcaaagattattgatcagaatcttgccgccaaccgaaaactccaagcaagtgaggaggcagttgcccaagcaagacgtaatagtgcggctgctgcacgtaaatcaacatcagaatcgaagagagcagcaaacgaagctaagcgagaggctacagaatctgctcgtatagctcaggaaaatgcccaattagccaagcaaatcctttatgactatggcagtgaatttgtaaagattgaatctgatctgactaaagaaattcaggatattcagaaagcaagtttatctgataaggataaatcaaatttaattaatgaagcaaagtctattagtctcgcgcgcaaacaagtataccttcttgagtaccaacaggatgtagatgcttggaattggtctgaggaacaaaaactacttaaaagttatgaaattgctaaagcaagagttgatgcgactaaaggtatgactaaagaggagcgtgaagtaaggaaacagtctttggatgctatatacaaagatgagcttgcaatacttcagcttgctcaagagcaacaattatttcagattcaacagagctacctgcatgaatctgatgctattgcaaaaagatatgagttagagcgaaaaaaaattgaagaaattcgcgatgcaaaaatacgtgctggcctacttaatgcctcagcgagagctgaagataatgagtttgcagataagagaaaaggaacatgggacaattatcgacgcatgcagggagaaatggatggcacatcagaatatgtaaatctagatattgattatgaagggcaagcaaaggtgcttgaagatgcaaggaaatatgaacttatctctgctgatgaacatgaggctgctcttttaaaaatcaaacaagattataaagacaaaaaattagcattagaccttgcatatggtcagcaagctattgggtctttaacttcaatgtttgggtcaatgtttggggagcaatccaaagcttataaaatcatgtttgcagcagataaagcttatgcaattgccgttgcaggtattgaaattcaaaagggaatttcaaaagctatgggcttgggtttccctgcaaatatccctgtcttggctcaagttgcagcacaaggtgccaccatactcagtaatattagggcaattgctgatgttggtttcgccacaggcggctacacaggcaacatggggcgaggtgatgttgcaggtgtagttcatggtcaggaatatgtacttaatgccgcagctactaagagagtaggcgttgatacattgaatgccattaactctggtcaatcctttggtagttctggtgcaactgtcctagaaccaatcgtgaatgtctatgtcatggaaggtcaaactgctgacgtgactagaaatgacgatggttctttagatgttcgcattaggcagattgctggcgaagttgcggagaaggttttcctacagggaattcaaaaccctaatagtagaatcagcaaggcattcaagcaaaactacaatgcaacacctagacggcaataa

SEQ ID NO: 68944 - DNA, 162 bp, Acinetobacter baumannii
atggcaagacatgatccacagatgaacgtacgaatccctgagaatttgttaaacgaagttaagaaagaggcaggtgatcagcgaagaactatgacagcacagataaatctaattattgaagaatggttagatagcaaaaaacaacaggatgcgaaagcatga

SEQ ID NO: 68945 - DNA, 255 bp, Acinetobacter baumannii
atggcccgcacagatcctcaagtaaactttagaatacctgctgaattaaaggataagcttgataatgctgccaaagaaaatggtaggactttaactgctgaattgattcttcgccttgaaatgacattcgagcatgatgatcatattcaagatctaattgatagaattgaaaagttagaagacactgtttctgatttagaataccatgcaaacgaccatagtcgacgtattgataatcttgaaggtcgttattaa

SEQ ID NO: 68946 - DNA, 183 bp, Acinetobacter baumannii
atgtttttaaaggttgataataagcacatcaatgcgaagaagatcacttggtatgaggcaaatccagagcactcaaatcgagttaagattatttttgataatggattgtcgcaaatcctagagtttgaaaaacaagatgagcttaaggctttcattgaagcaatagataaagccaatagttaa

SEQ ID NO: 68947 - DNA, 324 bp, Acinetobacter baumannii
atgagtgagtttaaagcaaaagacatcgtcgccatgaatgtgcctactctgcctgagccagttgggagcttacaagagttacatcctgagtttgcaaaagtcttgcacgagaactttctagagttgctaggtgatgaatccaacactgttcaggtggcaaaagatgcaattgaacatggtaacgacttagcaatggtgtcaattgaaggtgttgagcaggtatcaattgcacatgtaatcaacccatttccttgtgaagagcttggcgacgacttccccatagaaaaccacatttcgcctaactgccaatcgagggatgtttga

SEQ ID NO: 68948 - DNA, 318 bp, Acinetobacter baumannii
atgaaaccagaacagtttattcgtgagtacggggtggataaggcgagagatttattggatcaattgcataagcttggctgtccagatgatatgaaaatcactgtaattaacggtatgtggcaacgtacgagcaatgggttcacgtatccagaactcaagcgtctcgttgagagtgttgaactggttgaagtatgtggaggacttgttgaagcaaaaaagaaaatgaatagtgaatcccttcgttctgcaacgattgagtatgttttatataaagccatccgcgaccacgaatcaatatacggaggcggggatgagtaa

SEQ ID NO: 68949 - DNA, 1740 bp, Acinetobacter baumannii
ttgatcgttgaacttctgcgtgaaggtcatcaggtgattgctgcgctgcgtaatgccgcaaccaagaaagataagctattaggtttcattgcaacagaaggactggtcgatccgtctatttcgtttgtcgaatatgatttaagccgcgattttaagctggactctctattatcggacgcccagacaaaaatccatgtaatttatcatctcgcagcatcatttaattggggcattagcaaagctgaagctgagcgtaccaatattaagtcagggctggcgttaattgaatgggctgcaacattgaagcagcttgagcgatttatctggattggcgggtatcgtgtggctgcgccgccgcaagaatcggctgatgagttgtattgcaaacatggtggttatgaggcttcaaaaattctaggacatcaagctttcattgaggcctgtaagcgtttaaatgtgccttggactgcaataaatccagccacagtcattgatggtttttataattatggcgatatgcaatatatcggtattgctgacatgattgataagctctatcagggacgtttactggcattaccaggtggtcgtgacacattcctacctctatgcaatatgcagtatatcgtgagctttctgatccgaacgatgtcttatcctgagaccattgctcaggagtatatgctgcttgatcctgcgacacccaaatttcatcgcctagttcacctagctgctgagcatttgggagttagctcaccacacttacaaatacctaaagttttgctcgagaaattaccagaggtattacttgacggttctaaagagcaactttctttcatttctaccgagcactaccatgttgctggggcagaggcgatggcggcgaagatgggcatcgcagacctgatcagtatcatgccttatttttctcgctggattgatcgcttggtgtttacacgttttggtcgtatgcaagtaccaacacctaattcttttagctatcagaaccgctattggatagaaatttatactaaacagccagttggttcagaaaaagtttctgcattatttttacacggcattccatttgatagtgcatgttggtctccaatcatcaataaaattacttatgatcaggtcgctatgatggacttaccgggacttgggcgttcaggtagttatgaaatgatggaagataataaccatcaatttattgatactgcggcagagcttttggcaccaaatagtgtggtgattgcccactcattaggatgtctttttgcattaaatcttgcaaagaaatatccagataaagttgcacgccttatccttatatcgccttattttattcaggcacaggctgcaagaatgtttcagatacaagcgatatctaaactcattttccgttttgtgccgaaagatgtgattgctaaagatttacatccggaggggcaacaaaatctgtcagtgagatatgcgatggattcattacgacgtttgtcagtatctaagcatattagtgagtatatgcaccacattaatttgccgcagcagcgcgcagcacagacagctttgctttctgagcttcgatctaaaatcgagattattgtgggagagaaagatccaattgttaccccaatcagtccagatatcccggtacatatcatcgctggcgcaggtcataatccacacgttacccagtctttggatcaagccaaatggaaatattacctcggttaa

SEQ ID NO: 68950 - DNA, 351 bp, Acinetobacter baumannii
atgaaacacaggacaagcggaaaaattattgctcttgacgcaaaatttaagaaaatggaaatgcgaaataatgacattgataggtctgatttacaccaaatacattcttattcgggttattaccaaaataacttaattgcaagtgggttgatctatccgctatcaaaacaattagatattgataagtcttactctgacactttatacggtaacaacaataatgatgtgctatttatagtggatggaatttatgtttatgaaacacagacaatggatgatctaattgaaaatgaaaatatatttataaaacgaattacaggtttgatagataaacaagacgtaactaattga

SEQ ID NO: 68951 - DNA, 219 bp, Acinetobacter baumannii
atggataatgcagcatttcataaaagagcagatattcaggagttattggaacaacaagggcataaaattctttggcttcctgcatacagccctgatttaaatcctatagaacagatgtgggcatgggttaaacgtaagcgtaaagaatggttgatcgactcagtcgatgagttatttcgagtttttttcgaatcttgtatgaataataaagtagtttga

SEQ ID NO: 68952 - DNA, 360 bp, Acinetobacter baumannii
  misc_feature (336)..(345): n is a, c, g, or t
atgacacaaaacctctcaccacaatacaatcctagtggacatagtttcagtggttggctcggtggtaaatcacaactagctagaacaatcattgatatgcttccagaacataaaacatatgttgaagtcttcggcggagcaggatgggttctatttaaaaaaaccccttctactgtagaagttattaatgacattaatgacgatctgattaacctgtatcgcatattaaaatttcacttcgatgcgtttttaactgaatttgaattattgttattttcacgtactcaatttgacgattttaaacgtgaccaatctggtcttactgatattcaaagnnnnnnnnnnatcttgtcttactga

SEQ ID NO: 68953 - DNA, 243 bp, Acinetobacter baumannii
atgaaaatcttcccaatcaccaaaagaaatgattttaaacaaacagtagtagttttagattctattgagttaaaccgacttattgctgagaccattgccgataaactgaagatagatctagcggataaaaagaatagattctatttcaccaatactgcaaatttaaataacctaatatctgatgaaattcaagagcatgcgatagcaattcattttatagaacggattgatggtcatgtctaa

SEQ ID NO: 68954 - DNA, 1011 bp, Acinetobacter baumannii
atgcaaccagttacccgattaaagttcaatgcagccatgactcaattggcagcactcaatgaagtagaaacagtctcacaaaaatttaatgtaacaccgtcggttcaacagaagcttaaagaaaaacttcaggaatcttctgaatttttgaaacgtattaatatttatttggtgaatgatcaatctgcggaagctattgggatgggtatttcccgaccaattgcatcgcgcactaataccaataattctgatcgacaaaccaaagatccaactgcattagacaaccgattttatttctgtcgtaaaacagattttgatacatcaattaagtatcaaaaaatggaccaatgggcgaagtttaaaaatttctacgctatgttccgtggtttgattatcaaacgccaagcacttgaccgcattatgattggatttaacggtaccagtattgcagccgatactgacattgttgctaatccgaaacttcaagatgtcaataaaggctggctgcaaaaaatgcgcgaagaaaatgaatcgcgtgtgatgaaatcaggtgcggttcaaaacaaaattacaatcggaaaaacaggcgattataaaaacctagatgcccttgtaatgaatattactgatgaaatgattgatgaggttcatcaagataatcctgatctggtggtgatgtgtaaccgtaaaactgtttcagacaagtatttcccactggtcaacaaagatcaggaaaattcagaaaaattagctgctgatatcatcattagtcaaaagcgtatgggtaatcttcctgtttacgcagtgccattttttcctgaaggcataattttagtcaccaccttcgataacttgtcgatctacatgcaagaaggtgctatgcgtcgtacagtcatcgacaatcctaaacgtgaccagattgaaaactacgaatcttcaaatgaagattattacatcgaagatcttggtcttgcttgtatggctgaaaatatcgaaattctgccggagtaa

SEQ ID NO: 68955 - DNA, 807 bp, Acinetobacter baumannii
ttgtcatctataccactaagtgaaatagctaaatttacaaaaaatccagaacttcaaaagaatattcagttagccaatcagatactcatacaagttcaaaaaaatttggaaattttttttagaagccctgaagtgcaaaccagtctgaaggctatccaacttacaattcaaaaattacaaatattcttgaatgatcctattgttaaaaaaaatatagaaagttatttaaaaactattgtagaaatctctaataataatgaatttaaaagtgagtatataaaaaaaagagagagaacaaattctgtagaggaagatactgccctttttaaaagtatgatagaggaaaggattgatgtgcctcaggcagttctggaaaatccaattctaaatcaagattttgatggcaaagcagtaaactcttttacttggataattacctgctttacattgatttttaatttgtatattagtcacttagattctttcaaagatttcaatgaagcttatgagtatgtgataaataatgtgcaagcagaaggtgtgaccaaaactcgaattaacttaagagaagctccaaattttgaaagtgaaaaattatttgtactaccaaaagagactgtgttgaagatgtataaagactcaaataacggttgggttaaagtttcagtaattaaagatggtgttgaagttgaaggatttgtaaatgaagcttatatcaagaaattaaaaaataagtacaaccatgatgattttttttcaataactacaattcagacacttatagattcaaaagaagatagggactag

SEQ ID NO: 68956 - DNA, 450 bp, Acinetobacter baumannii
atggaccagattagctcacaacttcgtattgttcgccctgtggcatggaataaaactgaagtcattagccaatgtattggtgttaaaggtgaatctactgaagcacgccgtaatcgtattcgccagtttgaagatttctttaacgtatcaggccttggtacaccagacgatttagttgaattccgtgaacagcaaaaaggttttcaggcacgacttgaacgttggagcgatatttcacgtggttgtcagtcttgggaatatggcgcgaccaaaaactcacaagatttaggcattcaacccgttattactggccgtgaatttacccatgaaggactctatgtaaaccagcatggacactggcaacgtctcatgctcgacggcttaaataaaaaagcgctgaaaatgcaggatattacttttgaaaacaatgccgtaatggatgaggtgtaa

SEQ ID NO: 68957 - DNA, 234 bp, Acinetobacter baumannii
atgagctcaatacatgatcctcgatacaaaaatttaatcaaagaattaatcaaaatacgtgagttgaaagatataactcaggtagaacttgctacatctttaaaaaagccacaatcatacatagctaaagttgaaaacttggacagaagaattgatgtactagaattgcatgattggttgtcagctttagataaacctattagtgaatttttagcatgctgttttgaacattaa

SEQ ID NO: 68958 - DNA, 501 bp, Acinetobacter baumannii
atgtctacaaatcatcagcttaaaaactgtttgtttgattttttgtcagatagaacattctcaggttatgagttcaaagatataagggggctctttatcttctttcaccctgaattcagttcaaaaagatattattcgaaaatctatcaatatgttagagagttagtttcatcaaaattaatattagctgatacatctaattgtacatataaatacacttcaaattacactcgatcagaattattaaattttaaagaattgaatgagtcagatcagattaaaggaaaactactactagaatatgatagggtcttctcaaatatggatcagctacgtaatgaacttcatatttatgaatcgtatcttgataaattccctgtactttcagaaattatccagaagtttattaacaaaaaacgaaatgaaataagtctcttacagtgtgagatacaggcgatcaacagtttattagaagctgggactgttctaaattttgtgtaa

SEQ ID NO: 68959 - DNA, 297 bp, Acinetobacter baumannii
gtgaaaataattagtatcggattggttttattgcttactggatgtgtgactttaaacaatggcccaatgaataaaattcagataatttcatcaaatagtgaattgatcaatggttgcaaaaaattaggcccaattcatgttgatatccaatctttaagtttcaacagggtggctcatgatgaattaataaaacaggcatctaattatggtgctgataccattgctattattgatcgtcaaaatttagcattagggcatgtaattattgatgccacagcattgaagtgctatagctaa

SEQ ID NO: 68960 - DNA, 249 bp, Acinetobacter baumannii
atgctatttagcttacttcctaaagagttggtggcagcactagcaggtttagctttgcttggtgcaattgccaccaatatttctgttgccatgaaaaatgatggtcaacgtgatgctgcacttattacctttttagctagcgcatcaggtatgcattttcttggattaagctcagttttctggggtatttgtattggtgtaatcgcccatttcattcttacgccacgctcaactccagtcacaaattaa

SEQ ID NO: 68961 - DNA, 423 bp, Acinetobacter baumannii
atgctgcaattgggtattgcattattcgtggtgggtaaaaacctcgacgctcaattaaaggctgcacatctttccggatggtttcagtttggtttagccataatcgttttaattgatgtgctgcgccgttttatatatggcagtgaaccagtttcaattttaatgattttaattgggggattagcgcttgcggccaacattagttgtctttatttaatgagtgaccataaggaaagtggggcacatatgaaggcgagttatatattttctgcaaatgatgtcatcgtaaacttaggtgtcattgttgcgggaatattggttgccatgacaggctcgcgttatcctgatttaattattggattgattattgttttgttcgttttaaatggtgcacgaaaaattttacagttaaaaaatgaataa

SEQ ID NO: 68962 - DNA, 153 bp, Acinetobacter baumannii
gtgcaaaaaaaatatgctcttattgaacaagaagttttaaaaaaatttaaagaaggtaactatcactcatatgcggactttgcaaataaagaacttcagaacttcgatgtgagttatacaacattaacaagatggcttagtcaattaagttaa

SEQ ID NO: 68963 - DNA, 174 bp, Acinetobacter baumannii
atgatggcgaatggcaatatcattcctcagaacctgcctcaagcaaaacagatctttactgagcttgctaagcaaaatgttcctaatgctagagaatctttagcttcggtcgaaaaaattattgctgagaagaataaacaagctgccgccgctcctacgcagccaggctcctaa

SEQ ID NO: 68964 - DNA, 219 bp, Acinetobacter baumannii; identical to SEQ ID NO: 68951

SEQ ID NO: 68965 - DNA, 294 bp, Acinetobacter baumannii
gtgggaccacctctatattgcagccatgaatatcgaaatatacttgagcaatatggttttcaaggttcaatgagcaagcgcggagactgttacgataatgcaccgattgaaagcttttggggaatactgaaaaatgagttagtgcatcattacaactatcaaaccagagaagaagccaaagcagatattataaaatacattgagttattttataatcatcgaagaattcaaaagggtttgggttttaagacaccaaatcaaatggccgaagacttttataaattggctgcctag

SEQ ID NO: 68966 - DNA, 1551 bp, Acinetobacter baumannii
atgactagtacccaacaacgagcagcacttcatcgccagatttggcaaattgccaacgaagttcgtggggcggttgatggttgggactttaagcaatatgttctaggtgcattattctatcgttttatttctgaaaactttgctcattatatttcgggtggtgataaagagattaaatataatgaaatgcctgatagtgttataacccctgaaattaaagatgacgcaataaaaaccaaaggctattttattttacctagccaaatttttagcaatgtggtaaagagcgccaataataatgagagcttgaatacagacctagctaaaattttttcagcaatcgaaagttctgcgaatggttatccatctgagaaagatattaaaggcttatttgctgatttcgataccaccagtaaccgtttgggtaattcagttcctgaaaaaaataaacgcttagctgctgttttaaaaggtgtggccgcgttagattttggggatgatttccaaaatagccaaattgatttgtttggtgatgcctatgagtttttaatctcaaattatgcggcaaatgcaggtaaatcaggaggtgagtttttcacacctcaacatgtatcaaaactgattgcacaattggcaatgcacaatcaaacgcatgttaataaaatttacgaccctgcatgcggttcaggttctttgcttcttcaagctaagaagcattttgatgcgcacattattgaagatggtttttttgggcaagagatcaatcatacgacttataacttagcgcgtatgaatatgttcttgcacaatattaattacgataaatttaatattcaactcggtgacacgcttcaccatcctcattttattgatgacaagccatttgatgcaattgtatccaatccaccatattcagtgaaatggattggttcagatgacccaacactaatcaatgatgatcgatttgcacctgctggtgtacttgcaccaaagtctaaagctgattttgcttttgtgttgcatgctttaaattatttatcggctaagggacgtgcagcaatcgtttgtttcccaggtattttctatcgtggtggggcagagcaaaaaattcgtcaatatctggtcgataataattatgttgaaacagtaatttcacttgcgcccaacctgttttatggtacgaccatcgctgtaaatattttggtgttgtcaaaacataagactgatatgtctactcagtttatagatgcgagtggtttgtttaaaaaagaaactaataacaatatattgaccgaacagcatattgaacaaatcatgcaggtgtttgatcgtaaaaataatgtagatcattttgctaagtctgttccttttgagcagataaaagccaatgattacaatttgtctgtaagtagctatgttgaagccaaagatactcgtgaagttgtcgatattgtgcaactgaatacagagctgaaaaccactgtagctaaaattgatcagcttcgtaaggatattgatgtaattgtgtcagagattgagggcggtgcatga

SEQ ID NO: 68967 - DNA, 1233 bp, Acinetobacter baumannii
atgagtttagttgagctgctagcgggagttcatgtggaattgagaccgttagaaaatgtttgtcgatttatcaatggcagggcttataaacaatctgaattattagaacaaggtaaatatcctgttctaagagtaggtaatttctttacaaatactaattggtattattcagacttagaacttgataaagataaatattgtgataaaggtgatctcttatacgcatggtcagcctcatttggacccaaaatttgggagggcgataagactatttatcactaccacatttggaaaattattcctgatgtgggcattattaataaaaagtttctatattacttattggagtgggatgctaaagctctaaaagaagagcatggtactggatcaacaatggtacatattagtaaaggcgcgattgaaaaaagattaatccctatcccatgcccagataatcctgaaagatctctaaaaattcaatctgaaattgtgagaattttagatgcatttagtgctctgactgccgagctgactgccgagctgactgccgagcttagcattaggagaaaacaattcaattactatcgtgaacagttatttaattttgtagatagagaggttaaacgactaccaatggggcatgaggaagttggttttttcgtccgtggcggaagtttacaaaaaaaagactttacggaaacaggtgttggctgcattcattatggtcaaatttatacatattacggtacttacgctaatgagacaaaaacttatgtttcacataccctagccaaaaagtgtagaaaggcgcaaacaggtaatttagttattgcaactactagtgagaatgatgaggatgtatgtaaagcagtagcatggttaggtgatgaggaaattgctgtaagtagtgatgcttgtatttataaacataagcttaatcctaaatatgtttcttattattttcagacagagcaatttcaaagtcaaaaaaggcaatatattactggagcaaaagtacgacgtgttaatgcagacaatttagctaaaatattaatacctgtcccttcagtacaagaacagattcaagttgttaaggctcttgataagtttgaaatattaaccaattcgattaaagaaagtctacctcgtgaaatagaactgcgccaacagcagtatgaatactatcgtaatttgttatttagttttccaaagtctgaaacggtagtggtgtag

SEQ ID NO: 68968 - DNA, 1182 bp, Acinetobacter baumannii
atgagcaagacactgaccgacatagcaaagcagttaagtacgcctgtaaacttaaaaaaaatgattaaggaggaaaaaaggagcattccacctaaggaggtagaagaagtaaaacctgttccaaaggtacagctgatctacgcttttaatgggacaggaaaaacacggttatcgcgtgagtttaagaagctaattgtgggaaatgagggggaaggtacatcgcctacacgagaaaaaattctttattacaatgcgtttacagaggatctattttattgggataacgatttagacggtaactcaaaccctaaacttaaaattcaatccaatacttatacagattggctgcttaccctattaaaagatcttgggcaagatggaaatattgttaaatattttcaacattataccaatgacaaattaacaccgagctttagtgcagatttaacagaagttacttttacttttgagcgtggagatgatgaaaactcggaaacgcttaagatatccaaaggtgaagaaagtaattttatttggagtgtattttatacgctattagatcaagtaattacgatactcaatgttgctgagccaacagatagagaaacgaatgagtttgatcaattagaatatgtatttattgatgatcctgtcagttcattggatgaaaatcatttgattgaactggcagttaatttggcaaatttaattaaatctagtcaatctaacttgaagtttgttattaccacacataatccgttattttataatgttctttataatgaattgaaaaataaaagttgttatttgttagaaaaattcgaagatggtagctatgctttggctgaaaaacatggggattctaataaaagtttttcttaccacctatatttaaaagaaacgattgagaaggcaattgctgaaaagaatgttcaaaaataccattttactttattacgtaatctgtatgaaaaaactgcgagtttcttaggttatccaaaatggtctgaactattacctgatgataaagaagcctatttcaatcgaataatacaatttacaagtcactccacattatcaaacatagcagtttctgagccgagtgatccagaaaagaaaacagtggaattacttcttaatcatttagtaagtaattacggatattggcaacaggaacaataa

SEQ ID NO: 68969 - DNA, 219 bp, Acinetobacter baumannii; identical to SEQ ID NO: 68951

SEQ ID NO: 68970 - DNA, 567 bp, Acinetobacter baumannii
atgcctgaaaaagcagatacgtctgaacaagcaaaagttttaaaaattcttttagcgattaatctcctattattctttatagagtttatcagtggtttggtagctgcctctacaggcttgattgctgactcattggatatgcttgctgatgccacagtgtttggtatagcactgtttgttgttggtaaaagtgtaaaaaaacaattaaaagcagcgcatctttcaggctggttacagttaattctcgctacttctgtaattgtagatgttgtgcgtcggttcatttatggtagtgagccagagtctttcttgatgattggaattgctgctttagcgctaattgccaatttttattgtatatacctaatgtctcatcaaaaaaatgatggtgcacacatgaaggctagttgggtctttttatccaatgatatcatagtcaattttggtgtgatttgtgcagggatactagttgctttgacaggttccgcatatccagatcttgttataggaataattgtttcacttttcgtacttaacggtgctcgaaaaattttggcattgaaataa

SEQ ID NO: 68971 - DNA, 249 bp, Acinetobacter baumannii
atggttccagcctattacttgatgatttgcggggtggtaggtattgctactgcaatgtatttaaaggaaacagccaataagcctttaattgggggcgtgcctattgctcacaatatagaggaagcacaagagttacttgaagagtttcatgaaactattgaacagaaaattgaaaatattgatcagaaaattcaggagcttcaacaaaaacgtcaaaaacttgcagataaacaccctgatatagcatga

SEQ ID NO: 68972 - DNA, 219 bp, Acinetobacter baumannii; identical to SEQ ID NO: 68951

SEQ ID NO: 68973 - DNA, 930 bp, Acinetobacter baumannii
atgaaaaatagtttagtcgtgaaagataatgctctaataaatgccagttacaacctagagctaacggaacaacgtttgatcatgctagctatcattaatgctagagaatcgggacaaggaatcactgcggatagtaaactggaaatacatgctagtgactacgccaagctattcaatgtatctgccgatgcgtcatataaagctttgagagaagctgtaaataatctgtttaatcgtcaatttagttatacagccgaatataaaaaaacaggcaaagtcggcattgttcgatctcgctgggtaagccgtatattttatgtagatgacctagcattgttagaaattacttttgctcctgatgtagtgcctttaatcacacgattggaagaacactttacaaaatatgaagctaaacaagttgctcacctaaccagtaaatacgccactaggctttatgaattgctgattgcttggcgtgaagttggaaaagttccacaactagaacttagtgagtttagaaacagattaggtcttgttgatagtgaatacaccgccatgagtgactttaaaaagcgtgtgcttgaaccatcaattaaacaaattaatgagcatactgatattactgtaacgtatgaacagcataaaaaaggacggatcatttcaggtttttctttcaaatttaagcaaaaacaacagccaaaagttgaagcaaaaagagatccaaacacgcctgatttttttataaaaatgaccgatgcacaacgccatttatttgcgaataaaatgtctgaaatgcctgagatgggaatatattcacaaggtacagaaagctaccaacaatttgctattcgtatcgctgatatgcttttagagcctgaaaaattcagagagctttatccaattttagaaaaatcaggatttcaggcatag

SEQ ID NO: 68974 - DNA, 312 bp, Acinetobacter baumannii
atgaataaagcagatataattgccaaacttgctcctaaattatatataactcaagatgaagccagagttattcttaattctgttcttgaagtatttactgaagcattagttgaagagaagagtcttaaattagtcgattttggaactttttccgttcaaaaacgtgctgaaagaatcggccgtaatcctaaaactggcgacctcattaatattcccgaaagagaagttgttacttttaaacaaggaaaggctttaggtgagaaatttcttgttaaagccaaaccaaaaggaaaaataaaaaatgcaaaataa

SEQ ID NO: 68975 - DNA, 279 bp, Acinetobacter baumannii
atgagtattgaaaatttagaacagaaaattgaaaaacaagaagagcgtttaaaacaattaaaagctcaaaaacaggcaattgaagctagggaaaaaaagaaaatttcagagcaacaaagaaaagacgaaactcgcaaaaaaatattattaggttcttatttgcttaaagaaatggaagatgaaacagagaaaacaaaaatactcgctaatctcaatacatatttaacacaagatcgagatagaaaactttttgatttaccaagtattgaggaaaattaa

SEQ ID NO: 68976 - DNA, 1197 bp, Acinetobacter baumannii
atggcgatatatcatttttcagtcaagaatataagtagaagtgacggacgatctgccgttgcttgtgctgcttatcgttctgctgaaaaattgacatgcgactattacggtaaagaacaagattacacaagaaaaataggagtcgaacatacacaaatatatgcacccgaaaatacaaatattaatttattaaatagacaaaaattatggaactcagttgagaaagttgagcgaagaaaagatgcaactctagctagagaatttgaaattgcttttccaaatgaacttaatgcagagcaacgaaaatcaatgctcgatgatctatgtaaaaagctcgttgaaaaatatggtgcagttgttgatgctgcaatacatgcaccacataaaaatagtggaagtgatgaacgaaattatcatgctcatattatgtttacgacaagatcaattgatctagaaacaggtgagttctcagcaaaaaaatttcgtgattttaataaagaagtgggaagtaaaacagttaaaaactggcgctcatactttgccgatttaactaatttacatttagaaaaagcgggttttgatattcgtgttgatcatcgtagtaatagggcacgagggctagacctcgaagcaacactacatgaaggctcaaaagtgactcaacttcgacgaatgaatattgaaacagaaatcagtttaaaaaatgatgcgattaaacagcgtaacttattgagttcaatgcctgatttagagcatgagatcattgcgacatcaaaactgctgcaacagctcaaatttgagcaaagcaaattacaaacacaatcaagagaaagtgcttttgatgacattttgaatactgcttcaagcaaattgacagaaattaatgagacttttgacaaaataactgaaaatgttaacgaaaacggaagtcaaaaaaatatttttgatacgctcgactcaagcatttctagtttgagcaaaaacgaattgttttcaagcttgtctgactctatcaacaatcaagctgagcatgagcgacaagctgagcatgaacgacaagctgagcgtgagcgacaagctgagcatgaacgacaagctgagcgtgaacgacaagctgagcgtgagcgacaagctgagcgtgagcgacaagtcgagcgtgagcaaactagaaataataactacacaccagatttttag

SEQ ID NO: 68977 - DNA, 1230 bp, Acinetobacter baumannii
atgagcgatcaagtttcagcaacattgaaaacacttttaaacacgatgcaactgctttcagaatcacttgaaaatgaaaagcaacaacatattgaattactgaaaaaacttaatagtcatgtcagcaattcacaaactgaaattaagaatgatttttttgattttctaaacaaaattgagcttcaagagttcgtgtcaatcgttcaagattcaaagcttaatatcgaaaataatcagaaaagcattcttcaattaaatgctgaaatcatgcagatcagacagactgcaaagcaatcactcgcagagctggagcaacaaaacttagatctttctaaaaaaattagtggcagcagtgacaaaataactagcgatattataaaaaatgttgctaacgacgtaaaagaaagcgtgacacaaaacttttcactacagtttaaagagcaaaaccaaacactgattttagaagctaaaaaagcgaacagcactgtcattacgaatattatagaaatctataatcacttaaacaaacaagtattgagtgtcacaaaagatcatcgagaaagtctctctcagtttaaaactgatgtcagcgcatttacagaaagcattaatattgcaatcaacagcgtaaaagattcatttgctgaagttgaagaattaaataaagatcagatgaaacaactttatgaatcatctcttaattttagaaagcatgttcttgataaaataaacgcagaaacggaaaatattaatagtatttttgatgatgaaattaataatatttcaaaaaatgtgcagactcattgtaataatgttttaaataaaatgagtgaaacagaagatttagttgatcagaaagcaaatttgatcagtttaaaactaaacgatagtttaacgacaactgaaaagatcatagtcaaacaaacaaactattatgaaaacctatataagcgattgaattttaactattttgcaatcaacacaagttcaattttagctttttttttggttgttctcagcgcactatgcattaccgcatttattcaaaataaaagtttagaaaaagataatttagcgcttcaaagtcaaaacaaaaagcttaatgaagatggtgtattactcgcgtcgataaaaaatgactcgatcaaacttacaaaacaatcaatttcggatgtaaagaagaagtttccaacgctgatagtcactctcaactgcaaagcacttgattag

SEQ ID NO: 68978 - DNA, 411 bp, Acinetobacter baumannii
atggaatatctacttgataccaatattgtgggctatattttaaaaggtgttgccagtaataagctaaaaaataaattaatgatgattaatcccgatgatgttttcatttcacagattacccatgctgaaattatttatggtttgcagaagggtgggaatatcatcaaacatattaatcgagttaattcttttttagaaacactgagtattttagattgggatgaacaatgtgcccatgcttatggcaaagttcgtaatgaattacgcctacaaggtgttactgttcaatcaatggacttaatgattggtgctcatgccattggtcacaatatgactttgattagtaatgatcatatttttgatcatttcaaacaatttggattagtgctagaaaattggcaaaccgcctga

SEQ ID NO: 68979 - DNA, 240 bp, Acinetobacter baumannii
atgaatcatattgcaaaaatctttatgaatgggcaaagccaagcggtacgactaccaaaacaatttcgctttgaaagcaaagttgtttatgtcagaagaaatacaaaaggagaggttattctttctgaaaaacctcgtacatggacagagttttttaatgaaaatagtgatgtgttgggttttgaaaccctaatggctgatcgtgagcaagatatgccatttgaaagagatcttttttaa

SEQ ID NO: 68980 - DNA, 636 bp, Acinetobacter baumannii
atggactatctagcacaattcaccacatatattttcactttatctttagccgcaattcttccagggcctggtatgacaggtctaatgtttaaaacactgacacagggctataaaaatggcttgattatgctaattggtctaatcacaggtgatctaatctttctattaacctctatttttttactgacttctttaactcaattttttccaaatttttctttttatatggtcctactatcgagtatttatttattgtatttagcttatagtttttggtcttttaatggtgatctgctacaaactcaggctcctaatacggtaaatgaaactatattctcttatagagatgggctattgataacactcagtaatcctaaaaccatttcgttttacctagcaattgttccagctatttttggagcatatagtctgaaagatcaaacttttgccttaatgataattacagttctgactttaactgttattggcggtttttatgtatttttttctttaggcctaaaaaagtttttacgtaatttgaaaattcaaagaactttgcttaagggactatctcttatgatgtttatcttagctctaagcatgatatatagagaatttacgcctcatttaacataa

SEQ ID NO: 68981 - DNA, 483 bp, Acinetobacter baumannii
atgcctaatcacaaaaaaattgataaaaccgatgtaaaaattttggagttgttgcaacaggactcacgtattacaacagcccagttatcagaagaattgagcttatcaacttctccatgttggcgtagagtcaagcaacttgaagatactaagattattaaaggatatggagtattacttgatcgtaaaaaaataaatttaggtgtaatggtatttatacgtgtatctattgatagccatagtgaaaaagaagctaaaaaatttgaggaagaagtgacggctttagattatgtcgttgcatgttacagcattggaggtgatgcagatttcttacttcaagttgtatccccagatcttgatacttatgctgaattctctatgtcaataataagaagattgccgggaataaaagaaatgcagagtatgtttgttttaaaagaaataaaaccattcataggttttccagtgaagccttctcaatag

SEQ ID NO: 68982 - DNA, 219 bp, Acinetobacter baumannii; identical to SEQ ID NO: 68951

SEQ ID NO: 68983 - DNA, 342 bp, Acinetobacter baumannii; identical to SEQ ID NO: 68942

SEQ ID NO: 68984 - DNA, 486 bp, Acinetobacter baumannii
  misc_feature (461)..(470): n is a, c, g, or t
atgtcctcactcaataaacgtactaagcaaactcgaacactatatgccgaagcacgtagaaaacaagaccgactcgatcaggaagaacagcttcgagtagatgtagaacaggagctaattcaatacttccaagaacaagatttggaacaaaaagggcatcttgaatccttatatccagcaatttatgagtttattaaacgcaaagctccaagcttggcctggaaaaaatatgcacatgaattttttcggtcatatatcaagcaaatcaatttaaatcgtcgtgagactttgcccctaccgaatctgacatttgagatgaagcgtgatcagccagtttttacgatggactggatcgagaagggacagcaggttgatgaagttcttgataagctttgggactactggattctagcaaaagatagcaagacattttctgatgatgaaatcattggaaatattgnnnnnnnnnnttgcttcaacatttaa

SEQ ID NO: 68985 - DNA, 342 bp, Acinetobacter baumannii; identical to SEQ ID NO: 68942

SEQ ID NO: 68986 - DNA, 561 bp, Acinetobacter baumannii
atgcataaagatatttcaatttggatgccactctatattggcgacctacaagcgaaatttgcacgaatgacagcagaacaaattggtgcagcactactgttaatgatggatttctggaaaaatggtgctatacctcatgacctagctactgtgtgtagcatcacgaaattaccgcagcacaccaaagctaaaactttgttaaatacgctaatagccctggaattgtttgaagtcgagtctgagcagattcattcaaattttttaaccagtttaaaaagccaggcattacaaaatcaacaaatgaaatctgataaagctaaaaatgcagctcaagcacgttggggcaaatccgcaagtaatgctcaagcatcagccaagcaacgaaagataaatactcaagcaaatcatgagtatagcccaagtattactcaagtcatgcttgaaccatgcccttcatcttcatcttcatcttcatcttcatcttcatcttcatcttcatcttcatcttcaaattttgaagcaaaaaatgaggatttttcagaaaactccaaatggatttag

SEQ ID NO: 68987 - DNA, 186 bp, Acinetobacter baumannii
atggaaaaatggtcaggctatcatcgccgaagtttggtagaaaccaaaatacattgccttaaattattaggcgataagttgtcaactaggcatttttcaagtcaagtaaatgaaatacatgctcttatagccgtacagaataaatttaaggaattaggccgacctcataccctagttgtaacttaa

SEQ ID NO: 68988 - DNA, 1386 bp, Acinetobacter baumannii
atgtatataaataatatttttatagaaaacatgggagcaattgaaaaactccaacttacatcaagtcaattaattaaggctgataaaaatcctaaaaccctgattcttgtcggtaaaaatggtacaggaaagacaaccttactatcaagcatagtagactcattatatgagctatctaatagtgcatttagcgatattttacccaagaatggtaatggctatatgtattttcgtatctctggtgcttccaatatgcgagtaggctcgagctatgcatttgcctatatagaatataaaaatacagataatcatagctatgaatatattgagaaaaatggtcagatatcatcaagctttctaagagaaaaaacccaaaatttattaagaatcaatatctctgatggagatggtaattttaaagaaataacgaatacagcggaaaattcagaatttaaaaaagatttctcctcaaactcatactgttatttcccttcagatcgttatgaacttccatattggttaaatagagaaacgataaaacaaagtgaacaatttgttgatatcaaaagatttagtgataaattagatcgagaaattttagttcgtagatccattgatgacattaagcaatggattttagatgtttttttagactcacgagcagatctagtttttcagggacagaatgtttccacaaaaatttcgaccaatactttaagattgttaaagcaatcaattgaaaatattgaaaatattatttcaaaaattgttcaaacagatatttccattgacctgaatttcagaggacaagggcattcacgtattaagttagttgaaagaggctcaggaaaaatttttagccccaccctagataatctatcggcaggtcaaagtacgcttttaggtatttttgctactattattaaatattcagatagactagagatcaataaaagtattcatctaaatgaaattgaaggaatcgtgattattgatgaggttgatctacatttacatatagagcttcaatatcaagtgttaccacagctaattcaattatttccaaaagttcaattcattatcacaactcactcacccttcttattagcaggtatttcacataacttttcattagatgattacgtaatggttaatatgccagatggagtgcttattgaaagagctgatgattttgaagagtttacgaaagcttatagcttattccaagatattaccaatgcacacaaagaagaactaaatattctcaaagaagaaatattacgttccactaaactgatatacgctgaattatcaggagactttcccttgggagattctaggcagccaatttataaaagtcttcggccatttgatttggtgtcttaa

SEQ ID NO: 68989 - DNA, 321 bp, Acinetobacter baumannii
atggagttcagcggacgcttacattcagacagaggaagtcaatattgcagccatgaatatcgaaatatacttgagcaatatggttttcaaggttcaatgagcaagcgcggagactgttacgataatgcaccgattgaaagcttttggggaatactgaaaaatgagttagtgcatcattacaactatcaaaccagagaagaagccaaagcagatattataaaatacattgagttattttataatcatcgaagaattcaaaagggtttgggttttaagacaccaaatcaaatggccgaagacttttataaattggctgcctag

SEQ ID NO: 68990 - DNA, 1908 bp, Acinetobacter baumannii
gtgattaaaaatgattcatccttaggcgatggctatgctgctattggttactatccaaactttgtagcacgtggttttgcactcgatttaggctcaagctatctcattaatggccatactatccgtggtgagcaaaatgtagctttagaaaataaagaacaagttgaaatcttaaaaggcatttctgcaattcaaagtggaatgtcgacaccaggtggtgtggttaactatgtaaccaaaagacctgccgatattaaaactattacggtcgatgcaaattcagaaggcggctatacactggcaacagatgttggcggctttgttaatgatagttttggttatcgaatcaatttagcccatgaaagcatccatccaaatgttgatcacgcaaatggtaagcgtgagtttggttcagttgctttagactggaaaattaatgagcgttctaaattattgtttgatattgaagctcagcatcaaagtcaacgttcagtacccggttatcaactgcttgatgggcaagaagtaccaataaatgtagatcaagaccgtttattgggttaccagtcttggagtaaacctgttgtaaataacagtgtaaatgcaagtttgaaatatcaatatgcatttaacgatcaatggaatggtagcttaagtgcatctcaaagccgtgttgtgattgatgataatagtgctttcccatggggatgttatagcagcatttgtgaagttaccggtttgggcaatacttttgataaacacggtaattatggtatttacgattttcgtagtccagatgatacacgtattactaaccagttcgctgctgggttaaatggtcaattcaacactggcaccattcagcatcaaatcgcttttgaattacaacgtacttacaaaactttaaaacgctataattctaactcaatggagctggatcctattggaacaggcaatatcaatgaagagacaaatgattacgcaccagctcaagtagatttgagaaattactataaagccctaggaagtgatcagactgctttcaccatatctgaccgagttcaatttaacgatcaatggtcaactctactcggtggaaaactgattctccttgatgagcaagcttataattcagatgggcagcaaagccgtgatacggatttaaacaagtttttgccgcaattagcactcatgtatagtccaacttccacgactaatctttatgcttcatatgccaaaggtttatcagacggtggcgaagctccatggtatgcagaagcgaatgcttatcaagtcctatcacctagaaactctgaacaatatgaacttggtgttaagcaacaaatacgcaatttcttggtaacagcagctatttttgatttaaaacaagacaatcaatatacgactacaaattctgcaggagaagtagaatttgttgagcaaggtgaacagcacaatcaaggtattgatttaggtttaactggtgccctaaccgatacactcgacgtaagctctggcattacctatacgaaatcacgtcttgttgatattgataatgacagctacaaaggtcatcaaactcaaaatgtaccgaaagtacgcgcaactgcacagttatcttataaagtaccttcagttgaaggtttaagattattgagtggtatgcaatacagtagtagtaaatatgcaaataaagagggaacggcaaaagtaggtggctatagtgtctttaatattggtgctgcctataaaacaaattttgctgggcatgacacaacttttagattcaatattgataacttatttaataagaaatattggcgtgatgtaggggcatttatgggagatgactatctgttcttaggtaatcctcgcacagctcaattttctacaacttttagcttttaa

SEQ ID NO: 68991 - DNA, 255 bp, Acinetobacter baumannii
atgactttaggagctccagacactacagtttcatctacacctgctgtagtttctttaatggaaacaattgacaaatctaaacctatcggtgcagcagtatcattagataaaacattaccagtaataagatctgtattattaatggttgctactacatcgtcagacgataatactaaattacctaataagttcagagataataagttacttaaagcactcgaggttgaggaatttggagcaagaataaatttatag

SEQ ID NO: 68992 - DNA, 1185 bp, Acinetobacter baumannii
atgaaaagaacggctttagataacatcaaacaaatcaaagatacccatcttcttaatcttgaacctgaggataaggagtatcgtatttcatgtgatgctgggctttattttcgtgtatcaccaaaagggaaaaaaacttggcaagtccgtttcaaggatgaggttaggaagtggaagtggcatagtattggaagatatccgcagttatcgcttgtagcagctaaacttgaagcttcaactatttttctcaagttacagcaaaatgaaaaagtattaacaaaaaaagaaattgaattgcaaaagattgaggaacaacaacttaatttaaaaagcttgatgtatgactggcttgatactaagaaaacaacttgggctgcaataacaataaagaaagaaactcaatcaattgaaaaacgtatcttatctgtttttggtgaattggatttcaccaaaatttcacctcaacaatggctgacattttttcaggatatgcttagaagtgaaagtatttacaatcgtgtagagaaactagtttcacattgtcgcaatgcctatgatcttgcaaagtttcatggacaaatagagtcgaaccctttggatggaattttgaagtatcttgataaaggtagtaaagggaatatgaagcatgtcagtcttcaggaactgcccgagttggtgcagtctattcgaagctatagaaattcgcatacagcaattgctttagagttactagttattcttttcccgcgaccacaagaattgcgctatgcaaaatggcaagattttgactttgagaaaaaaatctggataaagcctgccgaaacaatgaaatgtggtattacccatgttgtacctttaccaaaacaggcaatagaactgttatttaaattaaaagaaattaggacagtatcggattttttatttcctagcagagatagccttatacagccaatgagtgaagcaactttaaataatgctttgaaaaatctaggctatcgaggtcggcaaagccctcatggttttcgacatatagcaagtactgccttaaacaatcaatttagtgataaggaacaagtgattgaagcttgtttagcgcataaaaaacatggtgtaaaagctgtttatgacaaagctacgcatttagaagaacgtaagcgtccgctgaactccatgcctattttttaa

SEQ ID NO: 68993 - DNA, 135 bp, Acinetobacter baumannii; identical to SEQ ID NO: 63935

SEQ ID NO: 68994 - DNA, 312 bp, Acinetobacter baumannii
  misc_feature (300)..(309): n is a, c, g, or t
ttggcaaaccgaaaacttaaaataggcattgtagttggagaagtttctggagatacgctcggcgtaaaactcatgcgtagttttcgtgagcagggaatcgatgctgaatttgagggaatcggtggccctcaaatgattgcggaaggttttaacagttattacccaatggaaactctgtctgtgatgggcattgttgaggtattaaaagacttaaaaaaactattcgccgtacgtgatggcttaattaatcaatggactcagcatccagttgatatttttattggtattgatgaaccagannnnnnnnnntaa

SEQ ID NO: 68995 - DNA, 177 bp, Acinetobacter baumannii
atgccaatgatggacttagcaatcatcgcgcgatatgaaacctatgcggattcttatactgaatattgtatgcgtagatatttttatgaatcctttgacgtcgaacttccacgagagatttcaacaacagaaaattggcagttaatcagtgactacattgaagcgcagggtttataa

SEQ ID NO: 68996 - DNA, 567 bp, Acinetobacter baumannii
atgacagagctaaaaaatcgaggagtacaggacattcttgttgcctgtgtagatggattaaaaggctttcctgacgcgatagcctctgtttaccctcatactgatattcaactgtgtattgtgcatgttgtacgcaatagcctgagatttgtaagctggaaagactacaaggctgttacgtcgggtctgaaagcgatttatcaggcaagtacagaggaaaatgctttaaagtccctagacatcttctgtgatcaatggaatcaccagtatcccaaaattggagaatcctggcgggccaattgggaaaatatccgaacgatctttagctatccagccgaaatacgtcatgcgatttatacaacaaatgcgattgagtcgttgaatagcgtaatacgccattcaacgaagaaaaggaaaatcttttcatctgatgactcagtaaagaaggtcatttacttagcaacatcaaatgctgcgaagaaatggacgatgccaattcaaaattggcgtttagcaatgaattggtttacgattcagttcgatgatcgattaaaagatcatttataa

SEQ ID NO: 68997 - DNA, 339 bp, Acinetobacter baumannii
ttgtttcttcttacatttttcattccttggagtgcaattaatttagttgattactattttatttctaaagaagaatgcgatgtagatgccttatatgacccaaatggtaaatatggccgctggaacacgattggaatcgcttgttattgtattggtatcttacttcagttgccctttattgatagtaaattctataaaggacaaattgccgaaatgttgggtggagtcgatttatcttggctagtgggattgttatccactgcagttttatattatgtacttgccaaaagagctcaaataaaaatttcaaaagctcttgaacttgaacgagtaaaataa

SEQ ID NO: 68998 - DNA, 225 bp, Acinetobacter baumannii
atgagcaagcgcggagactgttacgataatgcaccgattgaaagcttttggggaatactgaaaaatgagttagtgcatcattacaactatcaaaccagagaagaagccaaagcagatattataaaatacattgagttattttataatcatcgaagaattcaaaagggtttgggttttaagacaccaaatcaaatggccgaagacttttataaattggctgcctag

SEQ ID NO: 68999 - DNA, 285 bp, Acinetobacter baumannii
atgaaagcttttttgcttactcttactgtagatataccttgtaaggaagaaattcattctttaattaaaatattttcatattgtgaaaatcactcttcattaattgaaaaattatcattaggactaaaatctaattcaaaaggtcttgtttttaatgggcttaaagaagtaacaggtgatttttacttgttggaaaaaattgatgacttgtttttctatgatggaagggctttgttgcacaaacctatctctaaaggcttattccacaatataattttcaaatga

SEQ ID NO: 69000 - DNA, 768 bp, Acinetobacter baumannii
  misc_feature (750)..(759): n is a, c, g, or t
atgatagatactaaacctcttatagcaattgatcttggaaccagtaactcactagttggtatttttgaaaatggtcagtccaaacttattaataatccttatggtatgaaaactacgccctcagctattgcattggatgagcaagggcaaatcttaattggacaagctgcattagagttaagaagtcgtggtaaagaggtattaactagttttaagcggttaatgggtacttcaaaaagattaaaattaggtcaacagagcttttcagcagttgaattgtcttcattaatattaaaatctcttaaacaggatgtggagcaggctttgcaatgtgaagtagaggaagccgtgattacggtgcctgcttactttaacgatatccaacgtcaagccactatatctgctgcagaacttgcgggtttaaaagttagtcgactcattaatgaacctactgcagctgctctagcatatggtttagggcaaacgcaggatagttgtttcctgatttttgatttaggagggggaacctttgatgtctcaattgttgagttgtttgatggcatcactgaggtgcgagctagtgcaggagataactatttaggtggagatgactttgttcagttgttaatgaaacaatactggaaacagcatgcaactatttttggctatactgaaaatactattccatttgatattgaaacagcattaagagctagagcacaacatagtcttcatgttttaagtaaagannnnnnnnnnaatatttaa

SEQ ID NO: 69001 - DNA, 369 bp, Acinetobacter baumannii
ttgggctgtggctcggggcgggacactttggcatttaagaaaaaaggctatcaagttgaggcaattgattattctaccgagctggttgaaaaggcgagagagctgacaggcatcgaggtacgtcagcaaagtttttatgagctgaatgaagtagctaagtataatgggatttgggcttgtgcttctcttttgcactgtgaaagagatcgcctgactgaagtgctggcgcgcatatttaaagcattaaagccaaatggtgtgtgttatatgtcttttaaatatggcgatacagaccgtgagaaagaagggcgcagctttactgacttgaatgagcagcaagcttacgacttactcaaacaaatagattag

SEQ ID NO: 69002 - DNA, 273 bp, Acinetobacter baumannii; identical to SEQ ID NO: 54601

SEQ ID NO: 69003 - DNA, 1296 bp, Acinetobacter baumannii
atgacagcatccgaaatcatgcagtcttattgcgttagggttaatgctggtagtggcgtacttgtcaatgctatgacgcaggattactcctatgtgctgaccgcagcccacgcaattgagaatatcactgaccatgtggtaattgatcatctgggtaataatcttcctgttttagcagtgctcaagtatccagaatcgcaaaatgtggaagcggtcccttatgattgcgcaattttaaaagttgaatatcaggcaagagttgcacaaagatgtattcctgcatcaagcttacctctacgttccgatcttgtattagttggattcccagggaccgagagaaaaagttcgaatcctataaagcattatgatgggcatttgactagtgtagccaatgagctggtcatttttacagttgaaggtactcctggaaaagcgacgatcgacggcatgtcaggcggaggagtttaccacgtccaaggtgaaagcccatttcttataggtattgagttccaaatggatggtactggtcaagatcagcaatatggtcgagtgcaatgctacagcctaatgagatttgaagaaatcataatggcacatgcaagtgcattgatgattcctgctcatttggaatgcttttctagaatgcgggagatgatatttgcattcaatgtgattgaccaaaacaacgtctatcatcttaaagcagcgttagagagacttgccgattcgctaattgcaaatgggatgcctccaccttatgaagtcatgatgcaatataatttacagctgctagttgattccaaacgccctgatgagctcaaaaatcaagaattatggacagcttatttagagtttttagtaatctgcgcattgatggataatattggagtcacaaatgttgactatataaaaagtttagagcgaaagcgcaggttgttatataccagtgacggcacgaattggattagtcgcttggaagagctgcttaaaattgcgcgaaaacttttagacaaagatggcacgcttattgttgcatcaccagatgcggcagcaaaacatctacctccaagttttgtgcttgatagagtgataagtgatattgctgttgtaccaaatcaaggaccattttctattgatgcggttgaaagctctatctatacgagtttcaaactaactcatctggaagggcttcgtaatacttgtgtgatcgatagcgaatttgaatataaaagtctgccatctggcatggcacaattacagcttcttaaggacaagcttaatgaaattattaagtga

SEQ ID NO: 69004 - DNA, 135 bp, Acinetobacter baumannii
atgcaggaggcaactaaaacggctgttaaaaagtttatcgatactgcagacgcaatgtcttctgcatttaattcattagaaaactttaggactaattacttgtgtagttgggatctagcagctggagaggattaa

SEQ ID NO: 69005 - DNA, 630 bp, Acinetobacter baumannii
  misc_feature (558)..(567): n is a, c, g, or t
ttggcaagagagacaaatagtactttcaatgtaagaaatgaattaccattagtaaaaaaaatagaaagtactgaagaaatatttgccaaattactgttatctggctcagagggtgtaagtactaatgtaaatggttcagatacattgtacccccgaatagactcattaattagtttagataatacagatctatattcatcagtattatctagcaggctttttcacttagcagaaaatgagagtatacatcagccaagtcataaaattattgctgaatttacagctgctaattatttagttaaaaaaattaatgccgatcgtaacaatatttcactgcatcaatgtctttcaataattgcacctaatggaattgtacgggatgagttaagaggtcttgtggcttggatggcagctttaggtgataaatctatacaagagacattaattaatattgatccttatgcagtattagccaacggagatccttctcagctcctaccatcatcaaaaaaatatttattagaaaaattaatatgtcttgttgaagaggatccatannnnnnnnnntccgtagaagtgatatgtggagaactttttctatttcaggattttttgacaatgattccgtaa

SEQ ID NO: 69006 - DNA, 573 bp, Acinetobacter baumannii
ttggctcaattaggggcgctttgcctttcaaatctttgtgcaacaaagcctaataaaggcggttttattgcaaatgttcgggatgggatgtttgttaataatattacgatgattaaaaatgacaaaggattattccttgaagctccacaaggtaatgcctcagtttcaaatagtatattagtaggaaatactattaattgtcaggctagctcaactgataaagcaattattcaaagtaatctggttatatctgactgtaatcggaatgctacctcaaagcttcctaatatactctttcccgtcaatgaaaaattaattgctggcaacaatgatgaaggtatatgtgatgtaactgaaaaagatggcttgttatgtccatttaatacaccaaaagatagctttcttggtttctttaagccgcgactgcttgaaagctataacactttggctgactctttaattattaacaaaggacatttatatagtgatgcctcttcagttggtttagctggctgtgaaaagtttgatcaaagaggaaaaagggtagtggttacgatgaactttgtgatttag

SEQ ID NO: 69007 - DNA, 315 bp, Acinetobacter baumannii
ttgaaaattatacaaaataaagatactccaatttcaaaaggaactttaattcttgatcagagtggtaatgtcacttacacgccaaatggaaattggcatggtgccgatatttttagtattcaggttgtgacgagtgtaactcgttttaatgaaggggttgattttcaatatatttctattcctacgactatttcacaagctcctttatctggaattgaagataaatctgtaagtactggtgggggcggtagtataggaggaggatttttattaagtttattttccttaattgcattgcgccgtttaaagtcataa

SEQ ID NO: 69008 - DNA, 597 bp, Acinetobacter baumannii
ttggtagctgcttttgaacagctaggtgatgagtacgctgagcttgatatagagtttcttaaatatagcgatgagcttaaaatgggatcatccgcattgaaaactatgttagaaaacttaaagaaagttcctcaatctagaaaaataattggcatatttgatagagatgaacctccaattttaaaggagtatggtggaaatctttatactgatttaggaaacaatgtatatgcattatgtattcctaagataagtgaagaattagatcagatatctattgaatattactatcctgcttctgatttaaagaaagaagatcaacatggaaggcgattatttgatggtctagaatttcataaaagcggtaacagtaagtgtggaaattttcagactcaagagaaaagtaaaacaggtaaacaagtgattattgatagcggagtttttaaggctgatgatcttgactggcagagttcaatagctttaagtaaaaataattttgcagaatatattttaaacaaagatgcaggattttctgacattcaattttcaaattttaaaaaaatatttgaaattattaaaactatatcaatcggctaa

SEQ ID NO: 69009 - DNA, 318 bp, Acinetobacter baumannii
ttgacaaaattaaaatatacccctgaaatcagagaaagagcggttcaattattgattgaatctgaaaaagattatccatcgaattgggctgcgatcaccgctattgctcccaagataggttgtactcctgaaacactacgtgtttggtatcaaaaatatttagataaactaaatccagttaaagtacagcagctttcagatcaagaacgtattaaacaactcgaacgtgaaaataaagaactgcaacgcgccaatgagattctacgtaaagcagccgcttttttcgcccaggcggagctcgaccgcccacacaaataa

SEQ ID NO: 69010 - DNA, 177 bp, Acinetobacter baumannii
atggaggaagcagaatattgtgaccgcattgccatacaagatgcaggaaagttactagccctaggttctcctcaacaggttcgcgaattggcaagtaaagataaacatattgttgatatgaatgaggcttttattgcaattgtggaacaagcacgtgcattaaggcatgcgggttag

SEQ ID NO: 69011 - DNA, 534 bp, Acinetobacter baumannii
atgatgctagatgaaattcaaactggtaatggtcgtactggtaaatactttgcgtatcaacatacgaatattattccggatgttttgaccacagcaaaaggtttgggtaatggttttccggtgggtgctgtaatgactcaaggtaaagcagtaggcttgttagggcctggcagtcatggttctacttatggtggtacagtattgggttctcgtgtggtttacacggtaattgatacgatccagaaggaaaatgcagtagagaatgcagcagtagtgggtaattatattgttgaccaattacgtgcccaattgtcggataagaatgtgcaagtacgtggtttcggtatgatgattggtatccaattacctaaagattgtgctgagctcgttgcgattgctcgtgatgaatacaaacttattattaacgttacggcaggttcggtggtgcgtttattaccgccaattaacatgacacaagctcaagctgatattttgctagagcgtttagtcgcattaattacgaattatctttaa

SEQ ID NO: 69012 - DNA, 378 bp, Acinetobacter baumannii
gtggttagcgatggggctggagggttgatatctcctatcctttattttagtgctgctcaaacaaatattcttagtttgagtgtatttctagcgagtgcgcttcatgcgaaggatgatgagggtaatcccgttaacgttattatgattgatgatccaatccaatcaatggactccattaacatactttctacgattgacctcctgcgaagtatttgcttgcagtttgacaaacaagtcattatttcaacgcatgatgaaaacttctttaaattactccaacgcaaaattccaacacaaattttggggtcaaaattcttgcaattggaaaagtttggtgtagccgtgtcagtcgaaccattcctcaactatgctttataa

SEQ ID NO: 69013 - DNA, 447 bp, Acinetobacter baumannii; identical to SEQ ID NO: 58748

SEQ ID NO: 69014 - DNA, 219 bp, Acinetobacter baumannii
atgcttgaaatagaaatacttgaacttatagtcgataatgaagttgtagaaaaaaagaaggtgaatgggatacagagaatgaaccctaaaagaatagtaatagcagtaaaaatgctactatcaacctcttctagaattttctttgatgttaatacccaaatagcgaccacaatcgtagatactattaccaagaaacatccaaagaggttaatgctgtga

SEQ ID NO: 69015 - DNA, 177 bp, Acinetobacter baumannii
atgacagaaaaagataataatttaaatgcaagttttttagatcatagagttgcaacttataaggctattgcaggtttgataccaggatttggttcgatcctttcagaggttgtaggagctattattcctgatcaacgaatggatagattagggtttgttgacatttactgttcataa

SEQ ID NO: 69016 - DNA, 1239 bp, Acinetobacter baumannii
  misc_feature (166)..(175): n is a, c, g, or t
atgttaagaatttctatatcatctccccaaattaagggttcattcccgctcagcttactcagtttaatgattttaaatattcaaggtgctaacgccgaggaattgattgactcctcatcaaaagccgcagccaccatgccaaccataaaaatcgaggccatgagtnnnnnnnnnnccataaaaatcgagggcatgagtgagctcgacccgattaaaagctatatcgattatgacaaagccaatgtcactcgtaatggtttagataaaaaagatatccctcaaaccgttgataccattgatgttcagaaatataaaatttatggatcgaatgacttaagcgtcatgctgcaaggtacaccaggggtatcaaccagttacgatatgcgcggcgatgggatcacgattcgtggttttggtgctgatacaggtgatatttaccgtgatggcatacgcgaaagcggacaagtacgccgcagtacagccaatatcgaacgtatagaaattttaaaaggccctgcttcggttttatatggccgtagtgctggcggcggggttgtaaatatggtgagtaaattcgccaattttgactctaaaagttcagttggcgcatatgcgggttcatacgataactacggaacaaccgctgacatcaaccaagtacttaatgacaatttagcagtgcgtttgactggagaatatggcgaggcaggcagcttccgctctggtattgaaaataagattgagatgttttccccaagctttacctataagaatgacgatggaaagctgacctggaccacacaatatacctatgacaaattaaatcgtgtacctgaccgtggaccaacacgtgacaacttgcctgcgggaacttctattaaaatgggatttgcccaagacggcgattatgttgatgatattttgcaagtcattcgctccgatgtgaattatgaatatgcgcctgactggaacttccactgggcagcgagttaccgtcaagcagaacaaaactttgaccacttttattttggcaattattgtggtttagatggaaaaaactcaaagaatgaggcgtgtacaaaaaaggttacatcgatcaaatttactactggcaacaaaccagcaataagaccaccaccaatacatttgatattaagggcaagttcaagacaggccaacttgaacaccaaattatggttggtacagactggacttatgaacaacgagagccacgtctag

SEQ ID NO: 69017 - DNA, 297 bp, Acinetobacter baumannii
atgcaagttcaattcaatacacgcacaattttgccgtctgtttaccgtactgagaaagacggtgtagagaaagtttatttatcaacgacagtgttttcaccagtccgttacaacttaactccagcacctggagttatgccaattgaacagattcaatctgtgttagctgaatgtgctgacaatgctcaggaagtagagattcagttcattgaaaaccaaactaagtttggtgcacagatgcaaattttcagtgtgaagccattaccaaagaaaaacccaatggaatcaaaggcttaa

SEQ ID NO: 69018 - DNA, 150 bp, Acinetobacter baumannii
atgttggcttgtttgatttatggttcggaccagacgacatgtattgggtatttgaacatggaactggtgatcgcattgtttggtgttttcacaattctgtacggtctcagctatgtttttaaaattgttctgaaactaatgggtttttaa

SEQ ID NO: 69019 - DNA, 231 bp, Acinetobacter baumannii; identical to SEQ ID NO: 51560

SEQ ID NO: 69020 - DNA, 513 bp, Acinetobacter baumannii
atgactgctctaaatcaatatggaatgagtttagaaattacgccgcataatggatggtctcagcggttttgggaggatcttttaccagtgaaggagcgggtgagtaaacatccgttttttactgaaatggccaatgggggattgagcctagaaagtttccgttatgctttacttaatttctatccattagtagcgcatttcccgtcctatatggctggtgcgttagctaaagcaactgcttttgcagaacctggcgttactgaaacaagagattggttaattcaaaatattaaggttgaagagcgccatttacagtggtatcgggattgggctagaggttttggattaacggtagaacaactcgatagtgttcgcccaccagcttcgatgaatgcggtgaatcattttctttggaatatgagtcggcgacaggtgactggtctattcaagtctataaaggcatacacgcttatacggatcatccggaagttaccattgataagcgttctttag

SEQ ID NO: 69021 - DNA, 147 bp, Acinetobacter baumannii
atgagtgaacatgatcctcaatatccacaacaagctctgcctgacccttactatggtggagatgagggctttgaacgtgtactcgaccaatgtgaatcaagtgcgttggcgtggattaatatcctaaaaaaacaattgaatgtttaa

SEQ ID NO: 69022 - DNA, 405 bp, Acinetobacter baumannii
ttggtcaataaaagtctaaacttcattgtaactttagaaggtaaagacgcttttggacgtcaaattgatttagctattgtgccggcaccgcgttcgttaccaagacttgttaaaattccagaacatatttctggcggtgcggagcattacattctgctctcggccattatccatcaacatatttcggatttatttccgggtatgaaagcgacgggctgtcatcaatttcgtgtaactcgaaatgccgatttaaccgtttctgaagatgtagaggacttggctgctgctttaaaaggcgaattatcttcacgccgttttggccaagcagttcgtttggaagtagcaaaaaaatgtcctgaagaaattgctaacaggtgcaaaagaatcaaatggatgatgaagtag

SEQ ID NO: 69023 - DNA, 888 bp, Acinetobacter baumannii
atgattttagctattctattgatagctattttacttattattggacctactcgttatttatttaataccttatttgaggctacaggtaactatacacaaaatcttataagcatgagcttatggagtgatgctcaaaaagattctggctggcaaaattggtggacagctttctactggccatggtggatgacatgggggccttttgtaggtatgtttattgctcgtatttctcgtggacgtaccattcgagaacttattgcaggcgtacttattgttcctacacttgtaacagctatatggatgtctgtagtaggaggatcagctctaaaagtagaacaagatgctcgtcatgcttatgaaaaacatgctgctgctttagttaaagctggtgagccagctccagaaccatttacaggtgggccaatagtaaaagcgactcaagctgataatactcgtgcgctttttacaatgtttgataatattgatagtggtacactcggtaaagctcttagtatcattacctgcttattactggcgacattccttattacatcaaccgattgtggtacacatgtattatgttatatggacgcagaaggagctacggaaacaccaattaaaattcggatcgtctggggctcacttattgccattctggctggcgtattactttatgctgggggtttaaaagccattcaatctgcgtctattattgctggctttcccatagctatcttcctggcaattatgagtgttactttatttaaaaatttacgtagagaacctcaagcatgtatgttattaccagaacatgcacggcctaagaatgattcattagaggaaagtccccctgaaaaaagttcacttcaagtaattattgaaaagtaa

SEQ ID NO: 69024 - DNA, 516 bp, Acinetobacter baumannii
atgaactgcgcacgctgtggccgccagaatttcgtagatgcacatcgttgcgctcactgcggccaccacttctttgacggtagtgacgtggtgaatcttctagacaaggctcagaagcgcacttggttaaggccgcgaaacatcgccatattccttgcggccttaaccaagtgcgcttctgagccttgtctagaagattcaccacgtcactaccgtcaaagaagtggtggccgccagaatttcgtagatgcacatcgttgcgctcactgcggccaccacttctttgacggtagtgacgtggtgaatcttctagacaaggctcagaagcgcacttggttaaggccgcgaaacatcgccatattccttgcggcctgggcgctactggtggtggagatcgtcacctacgcgggtaaagcgccaagttctcctcagggctgggcggcgctcatactgctcgggcctattgtgtacgtcgtactagcaacctgtgcagatacaatttttcgaaagccatga

SEQ ID NO: 69025 - DNA, 288 bp, Acinetobacter baumannii
atgcgctggcacgcgaactcaccccagcttattctaaaagtttcaaaggatgattttacttaccattgccgtcaacacattgctgattcagaaaataacttactcgtttttgaccctaaattagatttttctacccaaggtggagcctattttttacagctcgttagaacattgatggatgctttagcatgtgatcagcatccgctccatcatcctttagcctttaaacagtttgagtcaaatctattatgcactgatttatggtcagcccaacaatgcattacataa

SEQ ID NO: 69026 - DNA, 291 bp, Acinetobacter baumannii
atgattaatttacaagggactcttattaatgcttttcgtctggatggtggtaaaggtaaagacggcaaagaatatgaagcgcgtgacaaggtgcaaattcttggttcgcttgaactgccaaacggagaaattaaacacgaacttgttgacctaacagttgaggattctcgactgtttgaaccattcaaaaatcaggttattagcatctcatgtggtgctatggctatcggtcgtaatgttgttttttatgttcgtaaaggcgcaaaaccagttttagcagaacaaatgtga

SEQ ID NO: 69027 - DNA, 159 bp, Acinetobacter baumannii
atgccccttttaacccctctggattcagtagaagaagcagtcgagtactttcgactgcttctacaagaacatttaaacgatcaacgctctgtcacatatttccaagtatctaaacaagacggacgaattaaaatttttgaggtacagcaaaatgattaa

SEQ ID NO: 69028 - DNA, 369 bp, Acinetobacter baumannii
atggaacacggtatcttttttgaaaatggtaattctttagctcaaactcgtattgatgccaatgaagaaattgcagctacatcctctattaaaactgtaacttttaaagctccagactatatcgttgaagctatagacgcttttgcttcttatgccgatacaactcgtagtgctttaattgcagatattcttaaacaatattttggtatggctttcgtcgagttttccgaaggctatttatctaatttcacctctgacatttctcttgaacaaagagttttatgtgaggctttacaggtatctgaaaacttatctcctaatgctcaaagctttgtagctgcttcaacgcgtaaagttttggaagactga

SEQ ID NO: 69029 - DNA, 900 bp, Acinetobacter baumannii
ttgaaacatagagcgaagctacaagaacaatatttgtggacgcaagttgattttaaatctgaaggtgaaaatgatctatccaataaggcgcttaaggctgcaaccaaattaaaaggatgtggccaatttctgttattccataattactacacaatagaccaagttaaacttgctaaggcctattactgttctcagcatttgctttgccctatgtgcgctggtgtaagagctgctaagtcaatgagtcgatatgttcaacgtattgaagaattgatgcgccagaatcgccatttaaagcccgtattgatcacattgaccgttaagaatggcccagacctacaagaacgctttaaacaccttagaagctcatttagaacgcttttagatcgttacaacgattacaagaaaaaaggtcgtggttttaatcaattttgtaaaattgatggtgctttctattccactgaatatacatacaatccaaaaaccaaagaatggcatccgcatattcatatttttgctttgcttaatgagtggattgatcaggaagaactttctgaaacttggcatgacattaccctggattcttatatcgttgatattcgtagagtaaaaaaaaccaaagaacacggttatagcaaagctgttgctgaggtctgtaaatacgctcttaaatttagcgatctatcacttgagaatacttgggaagcatatctttccctaaaaggtaataggcttactggctgttttggttctatgtatggtgtcaaattgcctgaaaaactcactgatgatttaccgcttgatgatcttccatatttggaactgttatatcgttttgtctttggtaaaaaatcctattacaacttagaaattacaaaggacgtaaaaccacaaaactag

SEQ ID NO: 69030 - DNA, 501 bp, Acinetobacter baumannii
ttgcctttacctgaaaatggtggtctaggtattgttcaagctgatcctaatacgcttgcccgggaagccatgaaagacaagtgggaaaaaatgaaagaaatgggtgctcgacttattgaaaaaggttccgcagctaaaaagactgctactgaatctaacagtgatgatgccgtgcagcattccgttctttcactttgtgttgtgaatatgaatgaagctttttctatggctttacgttgggctgctaaatttgtagtacccaatgttgatgttctgactaaagatgaactgatgttcgaaattagtcaggaatttaacaagcaaggttatttagctgagttagctagacagttatttgaagcagctctacaaggccgatcttcatttaaatcgtggtgggaatacaaccaaacaggtatgttccctaaacaaaaatatgaagaagagctacagaatgttgaagcagagcaagatgggactttaaatcaaaaggtagagtga

SEQ ID NO: 69031 - DNA, 501 bp, Acinetobacter baumannii
ttgcctttacctgaaaatggtggtctaggtattgttcaagctgatcctaatacgcttgcccgggaagccatgaaagacaagtgggaaaaaatgaaagaaatgggtgctcgacttattgaaaaaggttccgcagctaaaaagactgctactgaatctaacagtgatgatgccgtgcagcattccgttctttcactttgtgttgtgaatatgaatgaaactttttctatggctttacgttgggctgctaaatttgtagtacccaatgttgatgttctgactaaagatgaactgatgttcgaaattagtcaggaatttaacaagcaaggttatttagctgagttagctagacagttatttgaagcagctctacaaggccgatcttcatttaaatcgtggtgggaatacaaccaaacaggtatgttccctaaacaaaaatatgaagaagaacttcagaatgttgaagcagagcaagatgggactttaaatcaaaaggtagagtga

SEQ ID NO: 69032 - DNA, 240 bp, Acinetobacter baumannii
atggagtcattaattgagtctaatataaacttttctatattcttttataatcctaatattcatccggtaaaagaatatctcattcgtaaagaagaaaatatccgcttcgcagaaaaacataatattccctttattgatgcagattatgacaccgataattggtttgcccgtgctaaaggtatggaaaatgaacctgaacgcggtattcgctgtaccatgtgttttgtgggtttagtctaa

SEQ ID NO: 69033 - DNA, 381 bp, Acinetobacter baumannii
ttgcttaatgagtggattgatcaggaagaactttctgaaacttggcatgacattaccctggattcttatatcgttgatattcgtagagtaaaaaaaaccaaagaacacggttatagcaaagctgttgctgaggtctgtaaatacgctcttaaatttagcgatctatcacttgagaatacttgggaagcatatctttccctaaaaggtaataggcttactggctgttttggttctatgtatggtgtcaaattgcctgaaaaactcactgatgatttaccgcttgatgatcttccatatttggaactgttatatcgttttgtctttggtaaaaaatcctattacaacttagaaattacaaaggacgtaaaaccacaaaactag

SEQ ID NO: 69034 - DNA, 567 bp, Acinetobacter baumannii
gtgatcaatacgggctttaaacaccttagaagctcatttagaacgcttttagatcgttacaacgattacaagaaaaaaggtcgtggttttaatcaattttgtaaaattgatggtgctttctattccactgaatatacatacaatccaaaaaccaaagaatggcatccgcatattcatatttttgctttgcttaatgagtggattgatcaggaagaactttctgaaacttggcatgacattaccctggattcttatatcgttgatattcgtagagtaaaaaaaaccaaagaacacggttatagcaaagctgttgctgaggtctgtaaatacgctcttaaatttagcgatctatcacttgagaatacttgggaagcatatctttccctaaaaggtaataggcttactggctgttttggttctatgtatggtgtcaaattgcctgaaaaactcactgatgatttaccgcttgatgatcttccatatttggaactgttatatcgttttgtctttggtaaaaaatcctattacaacttagaaattacaaaggacgtaaaaccacaaaactag

SEQ ID NO: 69035 - DNA, 396 bp, Acinetobacter baumannii
atggctgctcttgcaatctctggtggttctttagttgcttgccagctacaaccagctttccaaacaaaacacgcacctactctttttacacctaaaactcaaccaagtacttacggtgtgttaaccgcaaaaatcacaggtaaacattctggcgttgctgtaattaaattagatagcttccgtttaaacgttagctttgattttgaagctcatccagacagctacggcgttccgggttctgaattcaccactgttgatattacccaactcacagtaaatgaaatcactgatattaatggtaagtcatataacgatttcaccgaatttgaagacatccgcaacatcaatgaccttctaaaaggcttcatcgaacgtaacaagttggtggaggcttaa

SEQ ID NO: 69036 - DNA, 513 bp, Acinetobacter baumannii; identical to SEQ ID NO: 50974

SEQ ID NO: 69037 - DNA, 381 bp, Acinetobacter baumannii; identical to SEQ ID NO: 69033

SEQ ID NO: 69038 - DNA, 513 bp, Acinetobacter baumannii; identical to SEQ ID NO: 50974

SEQ ID NO: 69039 - DNA, 513 bp, Acinetobacter baumannii; identical to SEQ ID NO: 50974

SEQ ID NO: 69040 - DNA, 399 bp, Acinetobacter baumannii
atggctgctcttgcaatctctggtggttctttagttgcttgccaattgcaaccagctttccaaacaaaagacgcacctactctttttacacctaaaactcaaccaagtacttacagcgtgttaaccgcaaaaatcacaggtaagcattctggagttgctgtaattaaattagatagcttccgtttaaacgttagctttgattttgaagctcatccagacagctacggcgttccgggttctgaattcaccactgttgatattacccaactcacagtaaatgaaatcactgatattaatggtaagtcatataacgatttcaccgaatttgaagacatccgcaacatcaatagccttctaaaaggcttcatcgaacgtaacaagttggtggaggcagcctaa

SEQ ID NO: 69041 - DNA, 267 bp, Acinetobacter baumannii; identical to SEQ ID NO: 49403

SEQ ID NO: 69042 - DNA, 183 bp, Acinetobacter baumannii
atggaagtacaacaaaaaagaaagcttctcgaagctgttgatattttggttcgtcgtcctgcttccgcaacagagacaacactggctgaagccatggcctatttcaagatgctgattgaggagtccacacaaggacaaattgaagttcggtattcagacactactcagcagttgccattttaa

SEQ ID NO: 69043 - DNA, 444 bp, Acinetobacter baumannii
atgagcgaacgtatttttagcttccgtggtgaagacaactggtctgattacagctatccagaagaagcccttcaagagatggatgataacgatgctcttgaagttggcaacatctttagaactggcattaagcaaagcatttcatctactcgctacttccctgatgctgaggatgttttagagcgctatgacgagaatgtccttgataaccatgactggtcatatgcagaaggaaacacgggcactgacacattaaaggatgaagcaaaggctgagctagatagctttctaaaaaaatgggcagacacatatctaacagtgactttctttgaaatagaccatgaagaagaaatcgaagtaactcaagaaatgattaatgcttttcatgcaaacgcaccgattccattgcctgagtttaagcacaaggagccctctcatggataa

SEQ ID NO: 69044 - DNA, 387 bp, Acinetobacter baumannii
atgaaaccagaacagtttattcgtgagcaaggacttaaagctatcaagtattgcattgaagaggctgaagcttatggcggcttgtatgtgaatgctaagactttggagctttcagagtacatcccttcatacgatgcagtgtcgatcacagacctcaagcgtctaatggaatctttggacattgtaagagtgatcggaggtattgaatacacacgctcagtattagcaaatgcgcctactgatgcaattggctacgacacaatgtatgaagggtattttggtgaaaaaaccaaacattattacgaggatttaagaactttcagtattgaacaaattaagggtgcagttgccgtccacgaatcaatatacggaggcggggatgagtaa

SEQ ID NO: 69045 - DNA, 267 bp, Acinetobacter baumannii
atgagtaatgaattgtacataaaacttattgttatctggatactgattaagtgcttggtaaggctgattgaaggtatctcatatttcatttcaccattaaaaatggagcgtatgcaaatcgcatcacatcgaagaaatataaccagctctcaagtaatgattaatgacttaaagcaaggtaagggcttgataattgttagaaccttggcattggttgaagtagttttcttcgcagcatgtataaaagtttttattggcttatggtga

SEQ ID NO: 69046 - DNA, 270 bp, Acinetobacter baumannii
atgaaggcaaaatcagttgtttgtattggtggttgtatggatagccttgttgtccaaaataaaggtcataaatatgttcctttaagccgattagatcaaagagactattttgtagaattaacaattcaagagcaaatggactttcctgaacctaaagatgaatatgagcttattcctggcggaacagattttgattattatgttttatcgggagatttagcattaatgaacgaatcattagataaaattaaaagtttagtcaaacaatag

SEQ ID NO: 69047 - DNA, 225 bp, Acinetobacter baumannii
atgtatactcaacaagaacttgtaaatattgcctcatatggtggtggtttagaattggatgctgctaaacacacagtcgcagacctaaccaatattgcttcttatgctgccagcaaaggtgcacgaattactatcagccttaagaacaaaaaacttagtgcagtagaaatgacaaatattgcctcctatgggcagggcagtgtgagttataaagatatttactaa

SEQ ID NO: 69048 - DNA, 330 bp, Acinetobacter baumannii
atgaaagcaattcaatttaagaaaacaggtcaatacactggtaattgtgaagatgtcacaagccttcttgctggtgcaataacatatagtgggcaatgtggagttgcgggtattcaggtaagttatgaacgagatggggaaactttccctatccaattcgatgattggcttgtagatattgaaggtgtgattcttgttttgagcgagaagcaatatcaagcgcttaattcagtagcttataaacctataggtttgggtgaagcaattggtcggcatgtcaatgagtacttaagtcaacaacagcgacaaggcggtttattatcaaagtaa

SEQ ID NO: 69049 - DNA, 429 bp, Acinetobacter baumannii
atgaatgcacaaaaaggttttacattaattgaactcatgatcgtggttgccattattggtattttggcagcattttcgattcctgcatatcaagattatattgcacgttctcaggtcgcagaaggtatcagtttgggagatggcctgaaatcagatattgctgataatttacaaaataatcaatgtgagccgactagcggtttatcggtaacaggtaaatatagtagtgtagaagtagaaggtgatactaaaaacgctaccgcaacaactacaggatgtcagattaaaattacttatgctactactggtacatctgggaaaattgcaggtaaaattttagtgttagatgtacttagtaacggaacgctgaaaaaacaggctactggtacagatttggatgagaaatatacacctaaaggtgttttataa

SEQ ID NO: 69050 - DNA, 1233 bp, Acinetobacter baumannii
atgagccaattaccacgttacgaaagttataaggatagtggcgtgcaatggttaggggaaatccctagccattgggatgttaaacgcatgaaatttgtagtcgctaatgttggggataaaattgatgctaaagaatctgatctcagatattttggtctagaaaatattgaatcatttacaggtaaattacttgattcagtagagcttgaaagtgaggggataggtcatagattccaaaaggatgatgttctatttggtaagttaagaccctatttagctaaagtttttttagctcaagaagaaggtttatcttctaccgaagctttggtgtttagatcttctgaagtaatttatccaaagtttttaagttattactgcttatcgcaagatttcattaatgaagttaacggaacaacttttggctctaaaatgcctcgtgcaagttgggataatatttcttcatttagaatggtttatccaagtttggatgaacaaaaactcattgcaggttttttagataaacgtcttgcccaagttgatgctttaattgccaagcaagaaactttattggaaaaattggctgaacaacgagttgctttgatttctcatgcggtgactaagggtttaaatcctgatgttgagatgaaagagagtggggatgttttctttagaaaagttccaaatcattggaaagttttggcattacattacattgtgagattagttagtggagatagcattacagcattagattttgtagcagatggtgattatcctgtttatggtgggaatggttttagaggttatattgatagatatactcatcagggtgattatgtattaatcggtcgtcaaggtgctttatgtggaaatattaactttgctacgggcagtttttttgcaactgaacatgcggtagtagttaatccattggttgatataaattttaaatggctaggctttctgttaatggcaatgaatttgaatcaatattcaactactgcggctcaaccaggaatatctgcggaagtgattggtcgattaaaaattttacttcctgatgtcaaagagcaaaatcaaatagctgaatatattgaaaatgttttattaaatattggtgagtttgaaaataaagtaattttattgaaatctaaattaaaagaataccgctcaaccttgattacgcaagtggtgacagggaagatcgatgttcgaaatcttaaagtaaactaa

SEQ ID NO: 69051 - DNA, 894 bp, Acinetobacter baumannii
ttgctttttcttgggtcatatcatctgcctgaagtaattcaaaatgttatagcaaatggctatctagctttgcaccaaggtcaagcagaaggttatagtaatggacttttaacaaaatctattaatctattatatgctactttaggtatatttgtggtacagaaaagtaatattctaaagaaaacgcatctttttatattttttatatttacatgtatctatttaatgcttggttcaagagggacattcgtttgtaacaccctatttttcctttggttatactatgattttggtaggaaaaaagttgaatttggtaagctgtttttatatttgctattaattggcttgtttttaagtactgtatttgcatattttagccttagagaagttgataaaagtagcttgtcgatgtatgactctgtgcttatgctactttatgatcaaggaataactttaatggtttttaatgagtcattaaatgtaaataattatcctatattaccaatgatccaaaattttataccaggtactgttttcatagcttctcttttggggggcgtttcacctgagaacattagttatcctaattatttagcttacaatttagatccagtactttttgctaaaggttatggtttaggctggagcgtttttagtgacttatacgtattatctgctgggttccttcccttattcggtataattgttttcatatttagcttttttattaactatactgaaaaaatgctgaatagaaatttatattggaaagctatagttatttcaacattaccagctttattattcttacctagagctggtttatactcttatttccctttatatttctatgtttttattatattgattattgttaaattgaaattcaaatag

SEQ ID NO: 69052 - DNA, 873 bp, Acinetobacter baumannii
gtgaggtatgcctttattcaggacaatcagcgtatctggcctattcgacgtttgtgttcaactttagatgttcatcacagtggttattatgcatggttaaagcaacctatcagtaagactgctaagaagcgacaacagctttcagcattgattaaacaattctggatcgaatctggtggagtctacggctatcacaagattcactgtgatttaaaagatattggtgaaggctgtggaattaatcgggtacatcggctgatgaaagcggatgggcttaaatcacagcgtggctatcgcaagcctagatcttatgcaggtatgccaagtgttgtctctacaaacactttggaccggcagtttaatccaactcagcctaatcagcggtgggtgactgatattacctatattcgtactcatgaaggatggttatatcttgcagttgtgaatgatttattttcacgccttgtagttggctggtctatgaaatcgagaatgactacagatctggttttagatgcattattgatagcgctatggcggagaaaaccacagaataaagttctgatccactctgaccagggcagccaatacaccagccatgaatggcaagcattccttaaacaacataatttggaatgcagtatgagtcggcgcggaaactgtcatgataatgctgttgctgagagcttctttcagttgctaaagcgagagcgtattaagaagagaatttacgtatcgagatcagatgctagagcagatatatttgaatatattgaaatgttttataactcaaaacgaagacatggttccaatggacaacgttctccactagattatgaaaaggcccatcaaaagatggttatgtgtgtctag

SEQ ID NO: 69053 - DNA, 1026 bp, Acinetobacter baumannii
atgtcaataattgatacatccttcaattttaaattgagaaatatacaattgagccataaatttcagttcttatttatgagcctgtttctcgtatttatcggtttttttagcaatgaggcacatgctacatgcacgcctgtaggtacaacaacatctacctatacctatagtgctgcaaccattaatagcgatgcaactattacatttacaggtacaataagttgtaatgaaaatggaagtgcaataaaaacgtcgccatatatgtgtatgaaaacgtctttttcaggagcgactagtgcaaatagttcaacaacactgccttatactgtaaaagcaactgttggaggggcaggttcatcttcaaccaatcaagtttcagatatatggtatggccctgtatcgacagtagcgactaacaatgtatttaattattctgccacagtgactgtgccggccagatcatcctcactaattgcttatccaacgggaacatacattggaactgtacagttatattgggatatgcaacaaagttctgctacggtatgcgaaggtagtagtggaggtggatgggatgctggcaatgtcacattgacagcaaactatattgttccaacactttgtcagcttaactcaacttcaaatgtagattttggtaatattagcgatattggaacaacaacgaaaaattatactgcgcaaggtgctatttcaaccacatgtaatagtggtacaccttatactatatatttgggcaatggtaacaactacagcaacagttatcggcgaatggtaaatagtaatagcgaatatattccttatcagctttataaagactcctcttatagtacgttgtggaacacaactggtggtactaccgttgtaggagggagtggaggtgtttctctcacaggtaccgggtccgcacagtccagcgtggtctatggtaaaatttcatcaggtacaagtattgcatctaggccaggaagttatactgatagcgtggttgtaactgtaacatattag

SEQ ID NO: 69054 - DNA, 1851 bp, Acinetobacter baumannii
atgtgtataagagacagtaataaatgggttcgcttagattctaaatggcaatatattgatcctataaaaatcagattatatacaattggtgattttatttcgaatacaccagactggggtaatagtgtacgtttaggcggtatacaatggtcaagtgcttattcacaacgttccgatattattacttcagctttaccacagttctctggttcagcagcactgccttcgacacttgatttgtatgtaaaccaacaaaagatttattcaggtcttattccatcaggtccatttgatgtaaaacaattaccttttatttctggcaatgaagttaccttggtaacgaccgatgcaacaggaaaacaaacgttagttaaaaaagcttactacttttcgcctaagattttagcgcaaggaattaatcagttttctgtcgatattggtacgccgcgttataactatggttcatattcaaacgactatgatcatggtgttgtttttggttcgggtgcttttcgctacggatatacgccatctttaactttgagcggtggtatcgaggcttcatctgatggactatccaatttaggtacaggatttgctaaaaatttatggggattagctgtcttaaatgcagatgttgcgtttagcaactataaagatgagcaaggttactccacgctagtgggattagaaggtcgtattagtaaagatatttcttttaatacaagctatcgaaaaatatttgataattactatgatttagcacgtgtttcacaaattcgctaccagaaagaatatcggaacagtacagataatgaatatgattatttaactgcaagcgcatttgcagatgaaatttttagagcgggcattaactataatttttatagtggatatggaatttatcttggttacaacgagattaaatcaaaagatacaaaatacagtttattatctgtcaatgttaacgctgatatcagtaaaaactggagtatttatacatccgtttataaagattttgatgacagtcataattatggcgcttatgtagctttacgctatacaccatccaataaatttaatgcaattactagcctttctaatgacagtggtaatgtaggttatcgtcaagaatttaatggtttgtcaggtcctgaaattggtgcattaggatggggtggatatgttgaacataataaagaaagctcagatacgaatgcatcaatctatgcaaattatcgttctcgtcctgcctatttgacagctagatatagtcaatatggtgatgtagaccagactgcactatctgcaacaggctcacttgtttttgccgcaggtcgtgtttttgcggcaaatgaagtgggtgatggctacggtgttgtaacaaatgctggaccgaaaagtcagattatgaatggcggtgtaaacttaggacaaactgacagtcaaggtcgattcttaatttcaaacttattaccttatcaagcgcatcatatttttcttgatccgacttatttgcctttgcagtgggaagtcaaaagtacagatgaagccgtaataacgggctatcgtcaaggtacactcattgattttggtgcacacaaggttatatctgcgattgtgaaattagttgataaaaataatcagcctttagcaccaggttacactgtaagtattaatggcaaaagtacttctatagttgggtatgatggtgaagtttttgtacaagatttattgcctaaaaatacccttgatgttgatttactggatcatggtacttgtcgagttcattttgattatagcagtcaacagtattcaacgaaaaaactgggaccatatatatgtcaataa

SEQ ID NO: 69055 - DNA, 240 bp, Acinetobacter baumannii
atgcttttatcaatagacataaaaaaggcaggattaaatcctgccttttcatttgattattcccactcaatcgttgctggtggtttagatgacacgtcgtataccacacgtgatacatctttaatttcattcataatacgcgttgagattttatcaaccaattcgtatggtaaatgtgcaaaacgagctgtcataaagtcaactgtttcaactgcacgaagcgcaattacccaagcataa

SEQ ID NO: 69056 - DNA, 2253 bp, Acinetobacter baumannii
atgacattgtcaatttcaaatcagtacacaatattgaatgatctagacggcaagccattagattcaggttatttgtacattggagaggctggtaagaatcctgaagtttatccgatccctgttttctgggatgaagatttcaccaagccagctcatcagccaataacaaccaggaatggctttatttataacaatggtggtccttctaagctttatgcaaatgttggcagttgctccattgttgtgaagaacaagaaaaaagttactgtttatacggatctaaatgtaactgcaacaagtgcctcatctatttttgatggcgatgagagccaaaaagacatcaatgacaagtcgcttgcgatgtgtgagacggtggctcagctacggactttgaagccacgaaaagatggcgctgtcatgtttgttaagtcacactctaataatggtagtggcgggggaaattacatttggagtgaagatagtcttttgccagatgatgacggttacattattaaatccgaaaccactgacacgggccgctggattgcggattatggcacatcgccaattacgcctagacactttggggctaaaggtgatggtgtaaatgatgagcgccttcaatgcgaaaagtctatcgttgtagctgcaaagttaaagattaaatggctagtccaaaaagatgatatttatcttctcaattcttatgccaactactctgaaatagctagctttagctctggactactacctctgttttcagaacagatctatgatattcaaggtaaattaaaagtaggtccgtactttgatgataaagatttccttgtctttacagatattaatgcttcaacacctgcaaactttaagccggtaacgaactggcagatgtatggtggaggtacatttgattttagtgcagcaggaactcgaaagacgacttataaaaaccgacaagggatttatacggtttattctgtaggtgtttcagttggtggaatgaactttatcaatggtgatctaccaaactgtattactacctcattactgggcaaagacttcactattgaaggatgttctttcattaatttaatgggtactaacattgcaaatgatgaccactcaacaatttatggaacatctgctcaaaccaaagtaagaaactgtttttttcagatgactacaacaaatgcgaagttaaatgcatgtgctgtagagctgcacaattcaaattcttattttattgattcaatagtcaaaggttatcgtgcatcacatattattgctgccataactgtagaaactccatacattgttgatatacgcgtttctggcttaacatgcgagattcatcgaaacttctctattatcgatgtgtggactggctctactctagtggatgctaaggtgtacggaaatacaattactgtactaccttttcctgatgcagctgaattggcagcagcaggttttacaggaaataaacaaggtggaaatgcttttgtttatgtgacaaatgattcacaagaggggcatgatcttgtccaaggacaatgttttagtgttcggtattatgacaatacttacattaatccacctgactccaatcattcttccgaatataaatcgctgctttatatttataaagctatgagcctaggcattgaattttataataacaatgtttcggtacctaatatcattcgagttgaagaagggcaaaagagtttcatcacaagactgcgaatagatagtttgattattcgggataatgtctatgatggtacagttctcaataaggatgcaccaattgatttatggtgcagaaatattcaagcctcaattattaacattggccttaaaacagcatcaatagttaatactttggctaatatttatgttgagtcgttacctttctctgaaggaaatacattcaaagtaaatgctgagcattcagaaaatattgctaagtgttttaatgttacagatgggcttttgaatattccatctaataaattgtcatatcctgctacagtcggggtatatgtaaacaatgttcaagttggagtctcggacttctacgtgaataatatcaaaacagcaaaagttattggccgaggcgcactaccagatacaatcacagtttcagattacgtatcaaattcggacacaactaaactttcagctattgcatttaattcaggctcatcttttggaacattcaacgcacgtctattattaagcaacatgtaa

SEQ ID NO: 69057 - DNA, 942 bp, Acinetobacter baumannii
atgacaagtttagcacaaaactttttaaacccaaacaataagccattagttattggtgattttactattcgccaagaagatggtggttattactgtttaaatgatttacatcgagcaagtggttatgacaaaaaacatcagcctgcttactttatgagaaatcaacaaaccaaagacctagttgaggaaataactcaattcaaggattctcaaaatgacccctctgcaaatttgcagaagcccccatttattaaaatcaatgatggcgaaaacaacggtacatatgttgtcaaagaactagtctatgcatatgcaatgtggattagtccaaaatttcatttgatggtgattcgtgcttatgactcacttgtgatggaatggcttctaaatggcaaacaaacaatttcaccagagcaagcaggagttctttacaacattgttcatacacgagcgaatggtaataaaaacctaatcgttcaaatgtggagccgtttaaagaaccactttaaatattcagcaagctaccgagaattacgagctattcattttgaagatgctaaacactatctagaagtcatggatttaaatgctaaacctgaaaagcatgattctcctgatattgtggcacagttagatgaatatttaaaaacattagatagtcggttcccagcattaagcaatccaatagcttatgaaatcgggcagaagatatcccagtttcttcaataccaagatttatctgatgaacgattattctatacagtaagcattaacagtgggcaggttgttgtaatgccacaatctgctcaccattgttcattagatatagtgaagctttcagatgcatttgcccctttatgggagtttatgcagggttatgaagttcgacatcgcgctaaccatctgcgaaagcttccactaaaaagaattccaaataaataa

SEQ ID NO: 69058 - DNA, 162 bp, Acinetobacter baumannii
gtgaacacaagagtaatccaattaaatattcgaacaagtattgaggcaaaagaatacttggctagaaaagctaaagaagaaggccgatctttaaataactacattgatcaattatttaaaaaaatggctaaggaagaacatgaaccgagtgcgaaagcatga

SEQ ID NO: 69059 - DNA, 435 bp, Acinetobacter baumannii
atgagtaaaaatggtggtcatcttacaattcagtacaacttgcggtggaccgaggaacttcgtgataaggtagcaaagtctgctaaagcttataatcgttccatgaatgcagatattgttgcccgccttgaaagaagctttgagcaagaatcagatttatctccactgaatatgccaccagcagaacttaaacgacgtctggaaaatgccaaggctgaacttcaatctcagaaagaaaaccctcatgaattaaatcttattgtttcatctgaaggtgaagatggtgaaaatgtcgttattagtaagaagtttttttctgaactaatggaaatcaaatccgcacttcgcaatctttcactcgctgttctagacttagaaaagcataaatacaatgtagaagatgctgtggaagagtggaaaaaagataatttataa

SEQ ID NO: 69060 - DNA, 234 bp, Acinetobacter baumannii
atggaaatctttggctggatagtttttgcatgtctcgtgtggtacttagcttctcaacatgataaaaaaatgaatgaaaattttctgaacttttcaattagatgtgattatctggaaaagagagtcgaagatttggaaataattaatgaatacaaggaaagggatataaaggaattagaagaaaatgttcgagatctaaaggaaagactctttaagtttgagaaccatctttaa

SEQ ID NO: 69061 - DNA, 1296 bp, Acinetobacter baumannii
atggttcaacctattaactatatgttagatgtggctaatcctatccaatctacattacaaggttttacggggggattgcagttaggtgcagcatatgctgatcgtcagcgtgcattaaagattgcgcaacaagatcgactcgaaaaagagcaaatgaaggaggatctatctaaattagcgtctaatcctagccccgatggttatacaaggttaatgactaaatatcctcaactttcagaaaaccttaagcgcgcatatgatgctatggatgatagtcaacgcaaaaacacgttaagtcttgcctctcaatcttatgctgcattagccaacaatcagccagagattgccaaacaagtacttggtgatgctgcaactgcttatgaaaatagtggtaataagaaagattcaggtgttcttcgtggctatattaagatgattgaaaacaatccttcagctgccagaacatcaattggtatgctaatggcttcaactaatcctgataaattcgcagatatttatggaaaattaggagaagagcaacgtgctaacgaaatgcagccttacgaaattgctgagtctaaagccaaaactgcatatacagaagctcaaacaaatgatattcctttagcagcagaagaccgtcgcgctggtgttgataaccaaggaagaaagattgaatacgacaatcaatacaactatgacaagttgagtcaggatcaacagcagttctatgacgatttaagtcaaaaggagagattggaagcggaaaaattaagagcagctaaagcagaaacgcctattaagcgtgttgaacgattagagaaagcagaagggtttgcagtggctgcaaaaaatgctgctgatgcttctacaaatgcagcacgtctcgctcaactaacttctgaaaatggtggcgcatattgggataggctatggcgtatagtgcctggcacttctgaaaatacatttgtaaaagatatcgagacactaaaatcacaggtattcttagctcaaattgacaagatgcgcggtttgggggctttaacagaacgtgaaggagatgcattgaagtcatcaatcgcatcactggatattaatcagggaccaaaacgagttcaagaaaacctaactcaaattgcaaagatcatgtcagaagctgctaaatcggctaacaaaaaagcaataatttactcaacaaaaggacaaggatattcgccagcagttactgaagctgctaagacacttggcatttctcctgctgaggcacagaagttcgttaatgagaatggattgtaa

SEQ ID NO: 69062 - DNA, 333 bp, Acinetobacter baumannii
atggcagtaaaagcaaaaaatattattccatctaaattcgctgaaaatgctcaaactgttcaatacactgcaagtgctccaacgatgattgataagtttacagttacgaatacaactgcatcaccagttacctttagttgtaatttggtcagttcaggtggatctgcagattcatcaaatttggttattaaggataagcagattgcggtaggtgaaacttatgtttgtccagaattagttggtcatacattagatgtcggaagcttcattagcacaatagctagtgttgcatcagcaatttcaatccgtgcttcaggaaaagaaatcacgtga

SEQ ID NO: 69063 - DNA, 366 bp, Acinetobacter baumannii
atggcaatagttgattctatagctccacttcgtaaagaccttgaagttatgtgcggtggcaatttacgtttggtaaaggcttttgaagcaatatttcgattaatcccaaccgaacttaataatctggatggttcaagttttgatgctcaattgagcgcagatagtgctgctatgcaagcaacacttgcacttacacagataaacgaattaaagcagctgcttgagcttttattgttaaattcaagcttatgtgtatgccaaatcaatcaagactttaatgtcagaaccgaacttgttcatgagaacttaattcttagtccgacccaacttaatgtgccagacaatctttatcttgaggttacataa

SEQ ID NO: 69064 - DNA, 1401 bp, Acinetobacter baumannii
atgcaaatcccaattttaagtggtatttatacagatagtagttctgacttccgcacttcatatcctcgaaacttaataccagttcccaaagaaaatggtctagctaatggctatttaagacctgctgaaggtattaatcatcttgcagatttagctggtatagatcgcggaggtattaattggaatggtgtctgttatcgagtttgtgattctaaatttatccgtgtaaatagagatgcatcgatcacagagttaggtacggtattaggatctggttattgtaattttgattattcttttgactatctagcaatcaattctagtccatatttgtatttattttctcctgataagggattaaaacaagtaactgacagtgatttaggtcctgtgaaagatgttgtttggattgatggttattttatgtcaactgatgggaattatttagtagttacagagttgactgacccatttgaggttaatccattaaaatatgggtcatcagaagcagatccagatcctataaatgcacttttcaagttacgaaacgaagtatatgcgcttaatcgctacattattgaagtcttcgataatgttggtggtgagaattttccgttcagtaggattgatggggcaatggcaacgcgtggcacccttgctgcaaatacatgttgcttgttcttggatacaatagcctttcttggtagtggtaaaaatgaacctatttcagtttacttaagtgcgaatgggactacccagaaaatagctactagagaagttgatcagattctcggacaatacactgaaaatcaattaagtacttgtcttgtagagtcgagagtggttgatagtcatcaatggctgtatattcatttgccagataagacaattgtttatgatgcctcagcatcacaagttacaagccagcaagtctggttttttttgtgctcgggatttggtgaaaaccaatatttagcacgtaaccatgtttggtgttatgacaaatggatcgttgggcacccaaggaaaaagatgcttggtgttttaacaacattaacaggtgaacactggtctgaagtaacagagtgggaatttacgacttctattttatataacgaatcacacggtgcgattttccatcagctagagcttgttgtactaaatgggagagctttattcggagaggctccaaagattagtactcaatattcaattaatggatttgattggtcgaatccgaaatatatattcactggtaaaactggacaacgcgataaaagacttgtttggttccagcaagggtatatgaacaactggcgaattcaacgctttacaggtacgtctgaaagtcgactatcaatagcaagacttgaaggccagattgagcctttaggagtttaa

SEQ ID NO: 69065 - DNA, 453 bp, Acinetobacter baumannii
atgagtagacgtcttaatgaaactgatgctttaggtgttggtgaccaattcgttttatataaagggaattgcacagattttcgcgcagtaccccaagatattataattaagtgggtactcgataatattcctgtggttaatcccgtttctgcttccatacagctttttaatcctaatgcagatttcaatgtgccagtcgacaataatcctaatggaacctatttagtaatcaatccatctgtaactataaataatggcaccatttctcttcctcagatgcctgatgtagcagatggacaagcattattcgttactagttctaagcaaattacaaacctaaccatttttcctaatggtgcagctttagttggacagccaatcacaataggtatttcaggattctttaagcttcagttcgataagacatcacaaacgtggtatcgagtggggtaa

SEQ ID NO: 69066 - DNA, 480 bp, Acinetobacter baumannii
atgtcatggactaagcgggaaattatcgaaacagcatttgaagaaatcggaatggctgcttatgtctttgatttgcagcctgaacaggtggaaagtgcaagaaggactatggatgcaatggctgcaatgtggtcatcaaaaagaatccaaattggctacccattgccaagtgaggcagatagcagtgatctggatcaagaaagtaatattcctgattatgcctatgaaactttctacttgaatttagcaaagcgtcttgcttcaaaatttggtaagaccctaacaccagaaaaagcactacttgcaaaagaaggttacgaaaacttacttcgtatagctgtttctcgcccaccacaaatgaaatatgcctgctcgctgccttctggtgcagggaataaacgatgtgatccattcattgttaatacacaagacaatgtagttttagcacctaatcaagatgcggagtttttcaatgagtag

SEQ ID NO: 69067 - DNA, 282 bp, Acinetobacter baumannii
atgcgaactttaaatatagaagaacttgaaactattggtggcggtgcaggtgaatctggttcttctgcaaaagggactattactgatggtgttgttggatgggctatcggtgaaatggctgataaaacacaagagtatatcgatgcttatgatagaggcgggatgactagcgtaattgttgaaactccagcatttgaagcaataattggtgctacttcaatgattggtgaagcattaaatggaggaactgattattgtggtggtagtacagattacagttaa

SEQ ID NO: 69068 - DNA, 366 bp, Acinetobacter baumannii
atgaatttggattattttggttttggtgttactagatttattattgtttttctaatagttagtttattttctctcttacttcgctttgtttttagttttgataataataattcaatagaaattggtacttatctaacttatatactttttatctatttaggatatatatatactaaaaatgctaagggtttaagatatttaaactctttgtttttatcttttttagtaatttcaatatttattataatttgtgttgcttttggttattttgatctaaaaggcgcttttcgctctttactattatatttatttttaatgcaacttggatcattaatattttttattaagaccaagtttttgaaataa

SEQ ID NO: 69069 - DNA, 123 bp, Acinetobacter baumannii
atgaaattattatttaaatcaattgtgatgagtagcagtttggccgtagttagtctattggcccctttaagtacctatgcagaaagaggtggatcaggaaatttgaacaacacttataagtga

SEQ ID NO: 69070 - DNA, 1239 bp, Acinetobacter baumannii
gtgttatttgattacgtaaagttagaacctaaggatattttggatcttggaagaactgattctgaagcagatatcgatttatcatcagatgagatagaactcaaagcagctgaaaaaaaagaacgtagcgtcttattgcaatctgcatcgacagaactaacttcaaaattcagagattggtggaagcaaggtgaatatcgatttagattcgaagcagacggtaatcattttagaatatgggtttctgatgataaacgtcctgaagatattgaattagaaggaagaagtacgggattacaatggtttttgagcttttacttaacctttttagttgaaagtaaagatgcccataaaaattcaatattattattggatgaacctggtctatcccttcatcctttagcacagaaagatttatcattattttttggtaacttgtctaagactaatcaaattttatataccacacactctccatttctagttgattccaaccatcttaatcaggtaaaagccgtatatattcaggatgatggcaccacaaatatttcttctaaccttagagcaaatgagggcaactcttctcaaacaaaatcaatttatccagttcatgctgccttaggtttaagcgtgtcagaaatgttattcaataattgcacccctgtattagtagaaggtccttcagatcaaatttatttatcagcaataaaaaccttattaatttcttttggagagttaacacccaaaaaggatataatttttattccatctggaggaacccgaggagtcaaacctattgtaagtcttttaacgggaaaaaatgatgaactgccaattgttttattagatggtgacactcaaggttcaaaaatggcagaagctctgagaaaagatttgtaccaagacacgcctaattcaattctaatagtttcagaaattataggaatggatcaagctgaaattgaagatttaataccaccttcaatcatgaaaaaactttcaagatatcaattgcgttccaatgacccagattgtgattttgaagattattacgctaaagacttacccattcttaaacaattggaagagtttgctgttacaaatgaaatcatgcttgagaaaggatggaaagttgaattcgctaaacttgtaaaaaatcatttactcaaaatttcacgagacaaaatttctgaagatactattaacgtatggaaaactcttttttctaaattaaattaa

SEQ ID NO: 69071 - DNA, 1638 bp, Acinetobacter baumannii
atggaaaataaatttttactttatttgcttgctcatgaattttctcctattactttgaccccaacagcacgatggttgttactccaaataattaagaggtatggagagcaagaattttgtttaacgactgcaatgagtgcaaaggaatttgtatttcatgaaaaaaaattgcagactacgctgaatgaattacaagagcatcaaactatcattcaaagaactgatgataaatctggcaaagcatttgtaaaattagatattgaaatgtttagtgttaggggaagtttaaagaccacaagtcattttgatattgagcgatggtttactaagttgatgaatcatgaccttccgcttaaggcattattttttcatcttgttgatacaagactacatgacttttatgtacatcacttacaacatgttaaaccgatattatctggaaaaatcgatttcaaaacagcattagtgttaatggtattgattagacatagtaatcaatttggtatcaccaataaatgtggaattcataagttaaagcataaaactggactgtctaaagatgcgatttttcgatgtgttaaaaaattaaagcaacagggactcatacgtacacgagtcgatggtactcaatcaagtaaaattatcagccaaataaatccattttacgcactcaacttatcgcatgaactttggggtgataaagctcgatatggtcgattttatattgagaaaaataaacctactcagctttttgaagtgcaaagcgtaagtcgctttcttaagttttttgaaacctatgataaagaattagactaccatttaaattataaacaagagccacatgcagcatgggtttgtttgaagcagcatgagcctagaatattgagtgatcgcttatgccagcgaacagtatttaattttgaaaattcatctagactagttcaggatgatttacaaaaagaactagttcttaatttattgagtggttattttgaattaaagaagttccccttagctaagaagttgttgggagaagtcataagttataatgagttggacaccaagccgaataattttgctaacacttcgatggcttgcgcattatttcagtgttatttggaacagtggaatttagagctgtattcttcctcaaatagactaaaacaattattactgaattttgatgctatagatgtggatgatttcaagcgacttgaaaataaatttaagctaagctcgttgcttcagatggctgatcgtgacttgagtaaatttttcgtactagaaattcaaagtattgcacatttaattcgttttttactgacaatgattacaaacaataagctttacccgttccttactaagcaaggtgatattaagcagttgaaaccatttagtattatgcctcgttcctatcatcaacaaacatatagctgcatttttatgcttgatcctactatacgagcaaatgaattttatttaatagataatacagatgatgactctatcatgagtcaacaacacaaaaataatgattcagatttcagttcatttaattcactttgcttgccacaattacaaaattttggcttacttcctaccgaatgtagagcgatagatggcttcgcagatatttaa

SEQ ID NO: 69072 - DNA, 927 bp, Acinetobacter baumannii
atgtcaagaccatacgaaaattttgaaaattggatgaagaaagacaataaaacgaaggaagatttcattcaaaaaaataaagatacatggagcaaatcaatcccccaaaagtttaacgtatctatatcccaaccccttatcctattcggttatgatcaagaacaagccacactttcaacaaaagaaattgtcaccgtatctaaagagttttatgaaactattcgtaagaagtttagagagtacaagtaccaactctctaaacaacataaaagtcgtattcaagcgagaataagtaaaagcactacatctaaacttgaacaaatcaaaaaaaagcttgaacatagcagtgcttcagggacacttgaacatgtcattaatagttttgacgaagacaaattaaagcaacaaattcaaattaataaattacaggaacaaattcaaaaactgagggattatgaagaatatataaagagtaagcacaaattagagcttgagacagcacatgcactcaatcagaaaattcaggattacttattcagccaatgggtttcaacccagcaaaaattggaagtcctagaaaaccaatttccgaatgaagatgaccttgaccaaatttatgcttctcaaagtgacgaaggaaaggagaactctcgcaggataataaaatcaaatttacaatctgattttaataacaaccttctccgcataacagcgacactggaactcaaatcagaaaccacaaatccccttcatacaactattgcgcctatttctgaaaacgattacccacctatttatccacgaccttcaggatttattaaacaaggggaaattagtcataatgacatagaagaaaaaattaataataaacaagaagctatgccaaagtatcttacaaaccaagtaaaactatttaccaacaaataa

SEQ ID NO: 69073 - DNA, 897 bp, Acinetobacter baumannii
atggaatcaaaaataacttcagatttagcattacttgaacagaacattgttgaaaatttctgttactactatcagtgtgatttggtggcagagtttgggaatccattatatgcagctatgaaagaaaaaattatgcttcgaatgaaagataatgatttttcactcagtgagcaagccttaagtctgatagaggtgagtagtgacattaaatcaattccttttaagcctgtccaaatttttgaacttctagtgcagatcaatagcttaagacaagatatggagcagttaaaaaagacgctccaaaaaaatcgttactcaaatattttaatggcgtatgtagatgcattaagtggaaggttttatttaatctgcgatacgaagcttgaaaggcaagctaaagcaacacaagcagcggtggcaagccataccaaaaatttatacccaagacaagaaataatatacagaattttacgtgagcaattagctcaacgtggtcgtaaatgggataacctgaatcaggccgtcacttcaatcatacctatattactcaaagaatttgaaaaatatgatgtcatttggatcaagtctgaaattacgcacatgcatgctgagcttcaaaaacttgaaaaaggtgatgagttcatgtctgaaccacgctcagataactcagtaaaacgtaaaaaagtatcatctgctgtaaaagctaaaaaaatcaataaaatccaagttgaaattaaaaaactagaaagtattcttcattctaaaaatccttcacttaagctgaaggatttgaattataaaatgccatataacaacactgcttatttagatgaaacgatcatccattggttgaggggacagcctgaaatattggaggaaatattaaatccaatttaa

SEQ ID NO: 69074 - DNA, 681 bp, Acinetobacter baumannii
atgatagatataaataaaaaaactttaaaaaaaattatatctatatgtattttaacaattttcaatatcggatgcgtttcattagaatcccaatcagtaagtctaaaaacacaagataaaaaaataaccagtgaaactgtattcttagaagaaaaagactctataaatcagcttttgcaaaaagtaccagagccgctagaagtaaagattgtagggtatgtaaataaagaccttctgcagatgttttcttctccaaaccgatcagtagtggttaatcatgtaactaggggaactagagtactaatttttgatacatcagggaacctagccaatatttcagcagatattgaatatccttattgggtagatttagcagggatatgtttcacggaaaattgttggaagcaagaaaatacacccacagtaaaatcatcggtaaatacacgtaagacttctcctagcctaattacgcaacctaaatcctctactcaaaataaaagaatcagttcaaaccaaggaaaaggctatacaaacgtagatggaaagtatgttccaagtcctcggaaagcaaataagcagcctcctaatgcaacagcgaagtgtagagatgggacttggtcttttagcttgaataggagaggcacttgttctggccatggtggagtagctaactggctttag

SEQ ID NO: 69075 - DNA, 957 bp, Acinetobacter baumannii
ttgaaacttaactactttacgtattgttttgaaaaatttgaagataaaagtcaatttagaatggatatcaataattttattaaagcttcaacttcaaatgaagctttaccattcgccaagcaaaatagacattcaggggaaaatctttatttacttccagttgtcagtaatttctacttgtttgtacaaactaaagatagagaaattataaaaaaaattgagaaaaaagatgacgaaattaaagcatctgagattcaatctttattaagtgctgatgaaagtcttggttttgcatcttatgtttattttcatccaacactcaaagtattcggatttgcatcaagggttctttctccgaaatttacagcattccaaatgtatataaataacttgcttgttatgctgagaattcaggatatcagttttgttgttcatcctttaaaaactgaaattacaaagagcgaagctttaagacttccatttattggatctgcaagatttttagtacgtaaagacagtagcttaggagaatctataaaagaatttttcttaggttcaactaatgctaatgaattagaaatagttgatagctttgagattgttgttaaacctgcaccaagaaagtctctgacagatactgttaaacaaaaattagcttcactcgaagatgatggtgtgaaaagtattattttacgggctaaacaaaatcttgaagataatgttaaagacttctatatccacagtgctggcgcactttacgatgagattaagaatactgatgaaagtaaagttttggatgagataaaggaaaaaattgaaaataacgttgagttagaaggtaaggtacacgagtatgaacaagagatcccggaacgcatggatgatcgtattgcttatctttacagccccgctaattgggtttctgatagagtgtgcctatttccactatctcaataa

SEQ ID NO: 69076 - DNA, 627 bp, Acinetobacter baumannii
atgcttaaatctcaagatattcttgttctagtgaagttactttctattcaaaatgaattacgtacttcttctaatttcagtagtgtgtacagtaatgattactctgacttttatttaaaaaggtctcttaaacatcttttgtcagttagaggtctagctgaatctattgttataggaaaaagtgaagtatcggaatgcattaaaagattagtaaaagttgggttgctagttatacatgatcaaaagttttctcagaggttagatctagcaaattttgactgggatattaacaaaagagccttttttcagttagttattcatagttttcaatacttttttcctgctgaaataaaatctatggattttggaatccctacagcattttctaaggatggtcttaattctttcttatcatacagttcacctataccttatatttggccaatacaaacctataaatccatttccgggctagcaattgaacctatgcataaatcaataccatatgcagcaattgaagataattatctctatgaagtttttgccataattgatatttttagaattggttctcctagagaaaaacacattgcagaaaaacttttatcagaaattttaggcgtataa

SEQ ID NO: 69077 - DNA, 699 bp, Acinetobacter baumannii
atgaattcaccattgattaaaatgctagagaaagttgctgatgcactaactcaagaccttagagaagaaatggtctttattggtggatgtactactagcttacttttagatccagaaaactattcattagcaacaagatacacatacgatgtggatctaatcgtagacataactactcatgcagaatggtactcattagaagaaaaaattcgaaaacttggtttcgtaaatgaccaagaagataatatcttatgtcgttataaattgggcgacgacctaattgttgatttcatgcctacagattcaaatattttagggtttagtaactattggtatgaacaagctattgctcataaagttacctattcccttccaaacgaacttaaaataaatattcttgaatcaccttactttttagctactaaattcgaagcttataaggggagaggaaataatgatccactaatgagtaaggatatagaagatatcttaactgtatgtatgggtagaagtactttagttgaagaaatatattctagccctcaagagctaaaagactatttgtctgatgtgctagcagaactacaaaatcactctgaatttgaaattgttttagatgatcaatgtagatatggctcaaaagagcgagttaagcaagtaatcaatgcaataataaaacaatggaataaagccttttaa

SEQ ID NO: 69078 - DNA, 675 bp, Acinetobacter baumannii
atgaacttatttcattttactcacaatcaaaatcttcctaataaacatggaatagatggtactggtgaactaaaatcgaatcctgtcttggaactttgttacgtagtcgatgggcatagtaagcaccctaacagtgacattcttgtttctaattttcatttatttattttagaaaaaaaagaagcttttaaatatctaataaatgacgatcatgaaattagcaagtttcttcaaaatctaattaaagaatttcatacttcccaatatagaaaactcattccagcagctatgagtgtctgcttattaatttttaatcaagaaaaggtctatagcgttcatcttggagattgccgtttaggcttaattcttgaggaagaactaacttggttaacttatcctcatagtttaacgatgtgtcatattgaagatagaaatgctaaggatttagaactaactttgagatcttcaccagataaccatatcttaacgaattcgttaaatactaagtgtattaaaaagatcgaaataaatatctttaatagagaagacggaacttatcttttagcaacagatggtttatggaagttagacacagatagagttttattaactgtaaaaaataaagaaaactataatgaaattgatgacttagcttttattatagctacctcctga

SEQ ID NO: 69079 - DNA, 288 bp, Acinetobacter baumannii
atggctggtttaacaggattaaagaaaaaacttgaatctacagaagaagaaaaaaagctagatgaatttatatctggtgctgaaaagagagtaaaggctttagaatcaagtaataaaagatatgtccgatgcaatttttctttaaatgaggatataattaagttaattgatgaactaattgttaaaggacaaaatgcaagagttaaccgttcaagcatagtccgagcagctatagaaaatttatcaaaatacagtgcagaagaattaaaagaaatattaagtaaataa

SEQ ID NO: 69080 - DNA, 939 bp, Acinetobacter baumannii
atgagtaacttagtatataaagataataatttagttgaagcatcttattcactaaatctatctgagcaaagactaatattaattgcgatcatagctgctcgagaaattgagaaagagcttacttcggatacaatacttacgattcacgcttcagaatacatgaaacagtttaatttaggacgtcaagcatcctatgaagctttgcaatcagcatgcgataatctttttgaaagacatttgaactataaggcaatagatcctgtaactggaaaaataggagtatacaaaagtagatgggtttcaaaagttggctatgttaaggaagaaggctgtgtacaactgatttttgctccagatattatccctctctttgttaaacttgaagagaagttcacaagatacgaacttaaacaaatatcatcacttacgagcgtttatgcgattcgcttatatgaattactcatacgttggagatcaactggtaagttatatatttctatagatgaacttagatccaaattaggattgttggaagaagaatacaaaaagatgggggattttaagaaaagggttctcacagttgctataaatcaaattaataaatttacggatattacagtttcgtatacacaaataaaggaaggaagaaacatttcagaattgcattttacgtttgaaggaaaagaccaggctaaagagattagtagtacttcttcagagccaagctataaactgaccgccaaacaatgtttattttttgctaagcaattatgtgatatcactaataatgcaaaatttggtaatgagtttgcatatattggagagactcaagaagactttcaggaaaggatatcaaaagaacttcttgatagcgaaaatgttaaaaaatacttttcttatttattagatgttgggtatgttcctaaatataaaaaatga

SEQ ID NO: 69081 - DNA, 591 bp, Acinetobacter baumannii
gtgtgctgtaccagcatcttatctgaacctgtcagttttcagaccaagttgggtgtaaccgccggagataatttccgtagagatagtctggcttatcaagttggaaagaccgcctcttttgcccatgacaaagtagatggttttctaggcgtagactataccagccgtggttcacagtttgatggtcgaggagatcgtatttcattaagcccgtggcagggcagcacgatggataccgataccattgatgtaaatggacgactgaattttaatttgactgatagccaaagtttaagttttggtgcgcaatattataaagatgaacaagataccgaatatggggtagattacgataccacttcagaattctatacaccaaaaaaaggattacagttacaaaatcaaccatttactaagcgttatgctataaatactcaatatcaaaatacagatatgttaggtcaaatattaaatattgaagcctattatcgtaatgagaaatctcgttttcatccagcacgtcgggcagcttcaactgttttctcccagtctcagtcaataacactaaatcaaaaaaaattggaagaataa

SEQ ID NO: 69082 - DNA, 549 bp, Acinetobacter baumannii; identical to SEQ ID NO: 58086

SEQ ID NO: 69083 - DNA, 225 bp, Acinetobacter baumannii
atgccatcaaatatacatcaagatattgaaatatatcgattaccaaaagtcaccgaatttacaggcgtaagtcgttcagtcatatatgaaaagataaacgaaaaatcgaaaagttacgatccgtactttcccaaacccatcaaactcagttccaatgcagtaggttggtttaagcatgaattagttgattggcttgagtttaaagctaagcaacgtacctgctaa

SEQ ID NO: 69084 - DNA, 1104 bp, Acinetobacter baumannii
atgaacacagacctaaacccatatctcataactcaaaatgaaaaaaaagtaacgatggatgttgaaccaattacggatcatgctgaacctaaagaatttaatgaggaagaggcttacaagcaaattgagttcatttgtctcgtacaccacgtaaagaagagtggtaataatcctgtctatcgtattcatttaaaaagacaagatacatttgttattgtacttaaaaacattcatgattcacttaaccgtattgatcctttctatatggaagatgacacatgtacaagtcccgaagcggacttatgtcgaaaaatattcagagctgttctaccacaacatatccttgctgatcgtcaaactgacttttggcataaaagtcaaagtgatctagtcgctattgcacctcaacaatttgtatttaaagctgaattgatcaatgtactgtgccatcaactgagctatgccatagcgaatgatgaagactacaaaaaagcgcagcaattacgccatgcgaaaagcttaaaccaaagactgaaagccaaacagcttattcgaaaattgattcataagttcagtaaattattggtaatcagaattgattttgcaatttatcgagaatttaaaatcacacttgagcttctaaaaaattacctgagaatgttcattaaacaactccataccccaaataatgcagttcccccaattgtcggttttatttggaaattagaatatgggattcaaaagggctatcactatcattttatcttttttatggatggcaatatctataagcaagatacctactttgcggatctacttggcaaattatggaaaaatattacccagaacaaagggtcttaccatagctgcaatcacgataaggctttttatcaaaaacttgcaattgggacacttgtgcataatgatcaggaaaaaattgacgcactagaccagttagttgtcaactacctcactaaaaccagtcaattcatcatcgaaaagagtcaagtcaaacaacggacttttggctatagcactcgcaaccttgaaagaagcaatgttggaagaccccgtaagcttctcctagagaccatagtaacttaa

SEQ ID NO: 69085 - DNA, 684 bp, Acinetobacter baumannii
atgagtaaatttgaaaagtttgatgtaaagaacggtaacaatcagtttggagataataatactcaaaataatataaccaacaatacagtaaacaataaagtgagtaaggatacggattcctcaggcgtaattattggagccattacaggtatggctggactaacttggtttttttttagccacatcaatcaaatttatcattatttaaatatagttattctctcttcattcttattttcaataggtgcttttttcattctagtcttaacaacaagtgtaacaagaactgacatttttagagtgtttgctagcacattcctagcaataagtctttacggtttagctctcctagcaagaaatcatgctcccaatgaaattattcaatttgcacatcaagctccttcatttatggatttttggaagaaacttacagatataggcagaaaggttgttgtggaaaactttatatcagccctatttatttgtatttccacttttctagcactgttaggatcatttagacaatttgcatattcagtcgcaaattcgaatagaacaggttggtggtataatatttacgagtccatgtcgtacttcaatatgcgttccactgttatcataatcatgactttgagtggagctgtatgggcattgctgaatgataaaattcctttcttttcttaa

SEQ ID NO: 69086 - DNA, 1227 bp, Acinetobacter baumannii
atgacagaggagctgcctgacagtgcaatatcatcttggggaggcttcgtctatcaaggaaagatagcactttttcattcgattaagcttctattggatgaaagcttcgaggggaaagaagttaagaaatttgctttacagctggatagtactgatgactttgccatttattcggatggcattgcaatatcggttcatcaagttaaggctaaggcatcaccttatagatctgcatttgaaaaagcattaaataagtcatcaaaaatatgtatagattgttgtcctaatacaaaaagatacttccatatcgctaatgaaattgatgattctagtgattatgaaaatgagaaaaaagcaatagttgaattttataaatatgatgaagattcttattgtaaattagatcgaattgagagagtaattaaagaaaaaatagaagaatatttgaataagaattctttggaaaactctttgctacttgtagagcagaaatatcattatttatcagaaatgatcacttcaaaagttattgaaattcattccttaattcatcagggaacaagtcagaatagagcggcttatgaaaatacaattgaaagtgatttaattttagaaattttaattacagactttaatttagtacaggatcttccatatgagatgagaaggttgcgaaatctttttgctgatactttggaaaattatgtatgtgagagtaatgaatattttacaatacaacaaataggcttatttaatgaggtttttaagcatatttataaaatggatgatgctgagttagaatatataaaacaatctatccgcttatcatcttctgatcaaataaggaatgatgatgtaagtacttatgctgaaatcattaccgatatctcagctagtattgtattggttgaccttcctcattattctaaagagttaaaaaaatacttacctacagccttgaaattgcaagatagacgtgctgaatcatttaaaactaaattgatagaacaacttcgtagtaataatttattagtaaaaattttatatgagtacaatattttaatatcaggtagtgaagttcacaaaaatattgaaattaatgcttataatgacagtgtaacacgaatcactatcgatgatattgaggctgaaaatcatatattaaaagagcttccagtaaaagtaatttgtaccaatgcagcgcaaagcgagttaaataatgcttaa

SEQ ID NO: 69087 - DNA, 228 bp, Acinetobacter baumannii
atgtatttatcggataatcagatgtttcacatgaaccaaattattaggattaaagaagttattgcagttacgggcgtaagccgttcagttatatatgaaaaacttaaccctcaatctaagtgctacgatgcaacatttcctaagccaattaagttgagtgtgagttgtgttggttggtcggcacttgaggtgaatcaatggattgagcgaaggttagcaagtcgatag

SEQ ID NO: 69088 - DNA, 288 bp, Acinetobacter baumannii
atgagcttgagctgtccattttgccattcaccgaatgtgatgttggttgaagcaagtacacaacaatccaatacagccttatctagtcttgggacaccagccacattagctgcattgggagctacggtagcaaagtcttttaatctaccgccgcttgttggtggaatcgcaggaacagtattgggaagtgtgttgaattcattcactgaaccaagcgcaccaacacagcagaatttgtgcttttgccacaactgctaccaaaagtttccaagccatctgttgcagtaa

SEQ ID NO: 69089 - DNA, 687 bp, Acinetobacter baumannii; identical to SEQ ID NO: 48635

SEQ ID NO: 69090 - DNA, 708 bp, Acinetobacter baumannii
atgaaaaaggtcttacatctacttgttcaaatttctttatgtgtacctacttttgttgatgctgcgtctattcgtttatctccgattagtctagaaatggtagataatcaaactgcttctagcttaagtatttataatcaatcgagcgaaagtagtaattttcagacacgtgtttttgaatggttacaagtagatgggaaagaccaacttattccaacagatgatgtggttattagtcctcctgtgtttaaattgccttccgatggttcgtttaatttgcgtgtggtaagagtgaatgctacgcctgttacagatgaaaaagcttatcgtattattttagatgaattacctcaacctgtagatagccgtaaagttagtcaaggcgtgacggttttattgcgatcgtctttgccactattcgtggtaaataaaaatgcatttgctcaaattaactggaaaattgaaaacagtcaaaatcaaccatttttggtattaaataatactggaacacgacatgctttattaagttatttatcgattattgataaaacgacaaataactcttatccaattcctgtaaatacagtaaatggttatattctgaaaaagaaaatgaaaagctatgcaattggtaataattttaaatttcagaataatcatcaatataatattgaagtcacaataaacggtaaaaaaacaatattataa

SEQ ID NO: 69091 - DNA, 522 bp, Acinetobacter baumannii
atgaaaaaagctgctttctatatcacgacaataggcctaggattattatgtattcaaactgcaaatgctgctacagctacaggaactttaacagttaaagcaacagtaacaacaagttgtgctgtgaatacatctgcaacaggtgtggtatcgaacgcagttcttgattttggaactgtaagttcttttacatcaaatgtagattctgacacgactgccacaagtgggacagcaattaaagtgctctgtaataatggtacaacttatagtttagcatttgatggcggtaaaaacgtttcaagttcacaacgtcgtatgacgggtggttcaacagagtatattccatataatttatattcagattcaacacgcgcgactgcaattgcagttaacggtacaattgctggtacaggtacaggtgcagcacaaacgattaatgtctatggtcgtattccagcaggaataacattaccaagcgcaagtagttatgtagatacagtaacattgactgtcacttattaa

SEQ ID NO: 69092 - DNA, 255 bp, Acinetobacter baumannii
gtggttattcaatttgcaataatttgggaagcacactgcactccaaataaattatctttaaaagagcgcaatgagtgtgtaaaggatgcatataatcagtctcttataatggatgcaaggcttaaaggggtttccaaggaaagcttaagaaatgaaatactaacagacaaaaatgcatcaaaagcagaaattcaagaaggcttaagagatattgatcgtgcgtataacagtaatttcaaagataagggcctatag

SEQ ID NO: 69093 - DNA, 225 bp, Acinetobacter baumannii
atgaaaaagattatttttttaagcttagttcttggtttggtagggattaatggttgctcaaaggtggaaaaagagtcaaaagaagctatcttaagcaccttaaaagatcctgattcagcccaattccaaaatataaaaggatattgcggagaggtaaattctaagaatagctacggtggttattcaatttgcaataatttgggaagcacactgcactccaaataa

SEQ ID NO: 69094 - DNA, 660 bp, Acinetobacter baumannii
ttgaaatctttatttcctactattgccttgtgttgcctgttaatggcatgtagtcaaaacaatcaaccacccaaaacagatgaaacgaatacgaccaatcaagcggtgtcaaaaagtcctgatactcaatcaatctatgctccttataccgaggaagccgttaaagccaaactcaatgaaatgcagatgattattgacaatggtcatgtctatttgcctgctgaggtcaaggaagctgagtcttatattaatggatggaataagtatcctgatgtgcttaaagccatgatggaaactgaccttgatccaaacaacactcaagaagttgccgacattccgcttgaggatgaatctgcactcgttagcgatctaaatgttaaggctcgcattagtgctagagaatctcaatctgcttttaatgtacaaggggcaattgaatatattatagaaattcaatcgaccagcgatcagccttttgttctacaaggtatgaaaattaatcgtggtcgttgtggttattacactgctgactttcatagcaagatgcctgtacaaatgagctatagctctactgtatcgtacttgttgaaatgccgtggtgatcaggtacttgaagcggaattaatcactgatcaaggcaatgtgagtttgacattttaa

SEQ ID NO: 69095 - DNA, 1233 bp, Acinetobacter baumannii
gtgggaccacctctgagtgctattgatgaaaaaatagtacctgtccttaaagattttttgctttctagattaaaaatattgatcttaaatgaatttgaaaaaaatcatcttgaagacaatgccttatacggctacaaagattttgtgaagataaatcaggaaattagtgttttaatttcatcaacgctttcattcgctcaaatttttgaaagatatgttgaagattctgaaactcaccattcaatttttttgaataggcatccttatgatgcaatgatttatgagttattgtgctatgggtggtggaaaatacagtgttctgatgattataaatatcgaccaagcgttaaatatttcagaacagatgaaagcgtggaaaaggctttctatttaaaattctataatcatttgtcaagaaaaggagagatgtacaaaattgaagaactggtgaggaaatataatttaagtgcgctaatttctctttattctgtggaagattattttgttgatttgtatattttgacttcactagttgtgaacagtaaatctttaaatatgaattttttaattgagcaactaaaaaatatcatgcatttattgccttttaatcgccttactaaatttcctcctaattatcaaattttgaataaaaaaaacatagtaatgggggacatagaagctgttttgagtattgatgttccaatcaacaaaaatagtgatattgtggatttgtttaatcagctttctgtgcaattatctattaattttataaatttagtaattgaaaataaagataatttattgaaaaatgatagtcataccttatcagatttatctacattaatgcaccaaattaaacaaactgtaagtgtttcaaaatcactttcagcactacagaaagaagtagattcaccttatttattggcacaaaatttatctttaccaacagcattgtttttattgctttatcgattttatatcaaaaaaaatcctgattacagtgtagacagctttatgaaatatgttagtgatttatttagaaaaagaggctatgaaaatgaaattataaagacaggaaaaactgatcaacattcggttatcgtgagtgttaaaaatgtaaataatgagaaagatactaaaattaaaattacttatggaagtattcgttctaagaaaaatgattatcaaagtgactttattaaagccaataagctaaataaagatgtgatctag

SEQ ID NO: 69096 - DNA, 504 bp, Acinetobacter baumannii
atgtcttatcaagatacaggtaagacaatagatggtactgttaatgcatgtcttttagtatgcttgcctctaggatttaactcatctgattataatttacaattacaacagactactgcgcttatagtaatcaatggacaagtcatatctggttcaagaatgaataatgtcatgctcaatggtattgcaaatattgatcaacttaacttttctggagatttgaaagcatcgatcaatgcggcattagggctactaaatttacaaaaaaatgtaacgggtagtattacagggttaagagcagctcttacggttgatcaaaatttaggatttattcataaaattgagttaaataatccattctctctttctttacaagcacaaaaaatattctggccaggtgcagatgctgcagctgagaggggaggtggatggcttttgatgatgaaattgatattggaaacgttacgccaagtaaacaaattgaaattaccaatgatgttttaa

SEQ ID NO: 69097 - DNA, 267 bp, Acinetobacter baumannii
  misc_feature (252)..(261): n is a, c, g, or t
gtgaacacagcaataattaaacaatggtttaatgactatattgaatttggtgatggaaaggggtggcgtaaagattatgaaaataccttcaataaggtacaggaaataaaacaaaagctgaataatggttataagttaagtgcccaaaatgattttgattttttaagtgaacttttgaaaaatgatgcaaatggggttgcatctaaaggacaatcaaatctcgcaaacgaagtatttgataagatcattcannnnnnnnnnttgtag

SEQ ID NO: 69098 - DNA, 309 bp, Acinetobacter baumannii
atgtttagatctggaaaaactgacttggaaaagttaattttattagttaatctcgggattttacattctttaaaaaataattatatagatataaatgaagctgagtattttttgtatacaccatatatgcttaaacttttgaaagaaaatagctactctattgacttaattaatataattcatagagggactgagctagaagatttagataggtttaaggaatgtgaggatatgattaagaatttacctgaaaccagttttgaatctgaaaaatggtatgatcaaaatctatttgataagtatgattga

SEQ ID NO: 69099 - DNA, 195 bp, Acinetobacter baumannii
atgagccttaaaaatctagatattaatgccaaattagttagagaaattacgattattctaataattaaagtcgtgcttctcttaacaatcaaacatatttggtttgacgctcccactatccccaaaaatttcgacaatcaagtcgctgagcatattgcaggcgataacacttcccacattaaggagacacgttga

SEQ ID NO: 69100 - DNA, 765 bp, Acinetobacter baumannii
ttgttagataagggagtgtttcaattccctaaaaataccgatgtactcgcgaaattaatagatttagtcactaaagaaaatgatattgttttggatttttttgcgggatcaggatcaacagctcatgcttgtcttaatctaaatttacaagataacaaagcccgtagatttattatggtgcagttaccagagctattgtcagaagatgtaaaggagcaaaaggcagcttataaatattgcctaaagaatggattagctccaaatattgctgaaatcagtaaagctcggattaaacaagtcattggaagtattaagtctgaagtaagtttagataaaggattgaaggtttttaaattagcttcttcaaatttaaaagcttggaatccaaatgttctagatttagaagattctttggatttaaacgaaaatcatcttatcgaaggtcgtactgagttagatgtgctttatgaattactacttaagcgtggtattgatttaacaacgccaattgaaaatcgtgaagttaatgcaaaaacactgtatagcattggccatggtgcagtctttgcatgtttagatgattctattttagcttctgatttggatgttatttcatctgcaattattgaatggcataaagaattagccccttcaaatgaaacacatatcttctttaaagacagcgcattccaagatgatgttgtaaaaaccaatcttgccgctattctagagcaaaatggcttaaaacatgtacgtagtctataa

SEQ ID NO: 69101 - DNA, 1686 bp, Acinetobacter baumannii
atgagtaaaaaaatcagtggtgcagagtacccgctagccaaaatctttagttcggattttcagtacgttatcccatcgtaccaacgtccttatacttgggaagagcaacatgcttcagtacttttcgatgatctctataacttcttccaaactgaaaaagaagatgagtattttttgggtagtatcgttttaataaagcaagaaggtaaaccttttgctgaagtgattgatggtcagcaacgattaacaacactcacaatactatttgctgtgtttgcagctttagatcaaggtgggatcaacggtccactgtataagtacatttttgaacctggtaatgagtttgaaggtattagtccacaaccccgtttaaccttacgtgaacgggataaagagtactttaaacagtatgttcaagagctaaattttgaagtacttttcaaactagataatgaacaattagaaaatgaagccaagttgcatattaagcaaaatagtaaagtgctgtatgacaaagtaaaaacgacttttaatcatgatgggcaaagcttaaaagagtttattaagtttctagttcagagatgttttattgttgctgtgacaaccccaagccaaaatacagctttccgggtcttctcagtgatgaatagccgaggcttagacttgcagccaacggatattattaaagctgatgttattggtgcattgaacacagaagttgatagagaagcttatagtaaaaaatgggaagactttgaagaaagtattgggcgagaggattttaataatctatttagccatatacgtatgattttttctaaagaaaaagcaaagcgtaatcttttagaagaatttaaagggtatgttttatctattattacagatccaaaaattttcgtagatcaaatattggagccttatgtcgatgcttatgacattgtgaaaacaagttcatatactgcaacagccaatgctgaaaaggtcaataactatttgaagtggttgaaccgtattgataattcagattgggtgccagccgcaattcagtttgtgattcagcataaaagtgattcaaaatatatgctgtggttcttcgaaaagttagagcgacttgctgcgtatatgcatatctgtggtctgaatattaatgagcgaattgaacgctataaattagttctacttgcattagaacaagagcattctttagcgttgcctgtaattacaattgaattgagcaatgatgaaaagattcaaatgttgaatgtacttcagagtgatatttataacctaacggctcgccgtcgtaatcacattcttttgagattagattctttcttatcagatggcgcagcaagctatgattcatcaatcttaacgattgagcatgttcttcctcaaacggtacatgagggaagtgaatggtcaaacttatggccagatgaagatgtgagaaaagcatggacgcataagcttgctaatttggtgccgctgaataagcgtcgtaattcgaaagctcaaaattatgattttgacaagaaaaagacagcttattttgcaggtactaaggcagtatcatcttatgtcttaaccactcaggtactcaatgagccccaatggacgccagacgtcattctaaaaagacaagatgctctacttaacgtatttaaagaaaattgggggctataa

SEQ ID NO: 69102 - DNA, 3042 bp, Acinetobacter baumannii
atggcgacaatgaaattacagtttgaagacaatctagattatcaatgtacagcaattgatgcggtagtgaacttatttaagggacaggaaatcacacgtagtgaattctctgtgacttaccggaataatgatgatgttaacttagccttatttgaagatacccagctcggtattgggaatagaaaagttttactagatgaagagattgaagagaatcttaaaagcattcaacttaaaaatgggcttaaacccgttgaaagtctagcgagtaacgattttaccgtagagatggaaacgggcacagggaagacatacgtttatttgcgtactatatttgagctaaacaaagagtatggttttactaaatttattattgtagtgccttcgattgcgatcaaagagggtgtctataaaaccttacaaatcactcaagaacattttgaaggtttatatcctaaagctaaaggttatgaatacttcctgtatgattcaaacaaaccaggtcaagtaagaaactttgccacgagttctaatattcaaatcatggtcaccacagttggtgcaatcaataaaaaagacattaacaacttatataagccaagcgaagattttaacgatgaaaagccaattgattttattcaggcaactcatccaatcattattgttgatgaaccacaaagtgtagatggcggattaaacggcgctggtaaaaaagcgttggatgcaatgaatccgctatgtactttacgttattcagcgacacatgttgataaatttaatatggtatatcgtctggatgctgtagatgcttatgaaaaaggcttggttaagcaaattgaagttgcttctttagaaattgatagtggacataacagaccatatattaaactagagtcaactcaaaactccagaggttctattactgccaaagttgagcttgatgttcaacgtggcaaaaatataagacgtgaagtattaacggttgaagacggtgatgatttagagcaaatcacgaatcgagcaatctatgcaaatatacagattggcactattacgtgtggtaagcatgaatcgatagaggttaaaggggcaggctatgaccgtgttttgactcctggtgaaaacattggtggtttagatcctgatgatcagaagcgattaatgattcgtcgtaccatccaagagcattttgaaaaagaattgcgctttgctgcgaatggtcaaaagatcaaagtattaagcttattctttattgatagtgttgagcattatcgtcaatacgatgagagtgggaatattgtcaaaggtaaatatgccttgatgtttgaggaggaatatcaaaagctcgcaaagtcacctaaatttagtagtttgtttaacgaaattgatatcagtacagatgccacggaagtacatgagggttatttctcaattgatagaaaaggaagatcagttaatactgctgaaaataatcaagctggtagagaagattcggaacgtgcatataatttaatcatgagaaaaaaagaggaattactaagctttgagacaaagctaaaatttattttttctcactcagcgttgaaagaagggtgggataatccgaatgtattccaaatttgtaccttacgagatatgggaacggaacgtgagcgtagacaaacgattggtcggggtctaaggctttgtgtcgatcagagcggtactcggattagaggtcgtgattatggcatcaatacgctgacagtaatcgcaacggaaagttatgagcaatttgctgaaaatctacagcgtgaaattgaggcagatacaggtatacgctttggaattgtggaaacacatcaatttgctacgattcaaacagttaatgccgcgggtgaagttatattgctaggagtcaaagattcagaaactatttgggatttcttgaagagttctgagtttattgacagtaaaggaaagatccaagattcattaagaaagcatttaaaagaggatacttttaaattaagtgatgaaattcttgaaagttttaaaacaacttatggtgatctacaatccaaagagattggtgcaggtattacgaagttacttaaaaaacttgctggtcgtttagatgttaaaaatgcagatgaacgtatacctatagccactagaaaggcaattttagattcagaagaatttaaagagctttgggatcgtatcaaattcaaaacaacttatagagttgattttgataatgagaaattaatcaaagactgcgcagagtctatatttgcttgtccacctatcactaagacaagggctcaatttagaaaagcagagttggaaattagcaaaggtggagtgttggctaatgagtcatcaaaatcgggtttcatgacagtgaatgaaacaaatattgagttgcccgatattttgactgacttgcaggataggacgcagctcactcgtaaaagtattgtacgtatcttgaaagatagcaaacgtttagaagactttaagcgaaatccacagcagtttatggattattgtgctgaagcaattattagaaccaaaagactggctttagtagatggtattaaatatacgaaagtgggcaaggagcactattacgcgcaagaattgtttgagcagactgagctaagcggatatctaaaagatatgattgaagcacagaaatctgtttatacccatgttatatatgactctgtaggagttgaacaaaattttgcacttgatttagagaaaaatgaaaagatcaaaatttacgcaaaactaccttcttggttcaaggtgccaaccccgttaggcacatataatcctgattgggcaattgtggttgatgatgaaggagaggaaaaactctttttcgttgtagaaacaaaatctagcacatggtgggatgatttacgtcatcaggaaggggctaagatcaaatgtggcgaacagcattttgctgcattagccgtagatatagagaaacctgctgagtatataaaagcaaaagatgtagataattttttggcatatatagtttaa

SEQ ID NO: 69103 - DNA, 309 bp, Acinetobacter baumannii
atgcgtgatgatcaaatagaaaaaatcaaaaaaatgtcagaagacattgcagacgatatgctcgaaacagcttatgttgccttgggtacgccacttgatagcaaacagaatcgtggtgataagggcttcatgtacaagatcgttaaagatcaagcgggagtcatcgcaacaattcagcgaattctagatattaaatcaggaaaaataccacctattagtgcaacaaaagccacgcaagaaaagtatgaacagtcattaatagaaaaagcagaaagagaagctgagaaacttagacaacgggtgagctga

SEQ ID NO: 69104 - DNA, 186 bp, Acinetobacter baumannii
atgtgtggagtactttcagcttcaagagaagcatttgagatgagcgagctttcatctcgtaaacgaccagttcagaagcccaaagaaaagcctaaaaaagatcaatttaaatcaactaaatatgatgctgtcgatgaacatctaaaaaatgttcaggacattatcaaatgtacaactttgttctaa

SEQ ID NO: 69105 - DNA, 399 bp, Acinetobacter baumannii
atgccaaatgaaaatgaaattgagcaagagattcaaaataaaggtttgaatgcaccacgtctaacgccacaggacattgatagtgcaatcttaagtgagcactacttcacagcagagcaaggtgtacgtcagtcatatcatgataacgacgatgtgcatgttggtagtacaatcaatgctaaagctgcagcaacacttccatgcttaacattctgcgtccttgtgcttaataatggattcagtgttactggtgagtcggcatgtattagccctgaaaacttcaatgcagaaatcggacgaaaagttgctaaggaaaacgcacttaataaagtctggcagcttgaaggttatttattgaaggataaacttcaccaagctgagttagataagcagttctaa

SEQ ID NO: 69106 - DNA, 342 bp, Acinetobacter baumannii
atggctgcgaataaacgagaaattaaaacaccgggtgtgactgctgaacctattcaagaagaacaaaaggttgtagcacctgaaccagagcaagatacatcaaccaaagatcaggctgacgctgctttagaacatatcactggtgatgatcaaaacacaggtgaaactggtccatctcaagaagaactattgcgccaagagttagcgcagatgcgcgctcaacttgctgagctaaagaagtctacgcaaccagaagcgccaagtgccgctggtgcagtacagcctaaaaaacgcatttctgttttgactgaaaagggctggtcaactaaggaggcggactaa

SEQ ID NO: 69107 - DNA, 240 bp, Acinetobacter baumannii
atgtatagagtttggattgaagaagaaaaagcgcctgatggagttgttgagattgaatatgaaactttagatgaggctaaagctgcattaaaagtacttgaaatcctagcttgtaatagaaacccttggtttaaagaaaactttcctactgcttgtccacatgaaattgcaaaagaatacgtattatgtggaattcttgagaaagttgatgaaaagtgggtggactataaagcgatttaa

SEQ ID NO: 69108 - DNA, 390 bp, Acinetobacter baumannii
atggataaaccaatgacatttaacgaatggttaggcacacaaggcaatatggttctccttcatgccaattgttgccgtattgcctttgaaggtggtcagcagtcaatgcaagcgaaagtggaggagcttaaagcatctcatcacggtgaagtgattggtcatgaagttcactttaaaaagatcaagcaagagcgtgacgagctgcaaaccttatacatccaacaaggcataaacatgctgaagctgcaaaagcgggtggataaagctgaaagcaagcttaagttactccaaaaaagcatagatgagaactcatacaccaaatggcctagtgatgttcgtttgattcaggtgtcagatttagagcaagccctcaagggtggtgaggcatga

SEQ ID NO: 69109 - DNA, 255 bp, Acinetobacter baumannii
atgagcagattacaggtaggcggtttggctttgattttgaatagcattgagccacatatgactggagagactgtaaagcttgaagagcatgtaggacttagacaaagcagtaaaactggctggattggagatacatggatcgtatcgcttggcgaagcacttttctacattcgctctgattggcttatgcccctaggtgatgacaagggtattgaactttacaacctaaaagaagaacaaaaggaggctgtatga

SEQ ID NO: 69110 - DNA, 429 bp, Acinetobacter baumannii
atgttggttgataatagcgtttttctcgaatctcctcgcgcgcgcgcgcgttttcaaaaccttgaaacgaaaaagaaagtaaaacagtttcgtgttgcgatgcgtggttacaaacgacctgacttcaaccgcatgattctagacctacttaatcttggatggacgcatgaaaagattgcgtttgttctgccagttgcaggggcttctacagtgtcagagtgggcacgtggtggcgttccaaattttgaaaacggtgatgcatttatcttgctttggcagacagagacaggattgcaacgttttccacgtgagggtgagtggttgacatacaaatacacagttggtcagcaggatttgctaggcgttttagatgattttgctgcgcagttagataacgaattggacaaacgtgacggggtgaagggatga

SEQ ID NO: 69111 - DNA, 477 bp, Acinetobacter baumannii
atggaatacatcatttatgtgctggcagtacttggtgtaatttttctgtttatattcatttggatatttaaaataataattcaaacgaaacgaaacattaaaattaaaccaagatcatttacaaatgcagaagatttaatcaacttcattagggccgtttttgaatgcaagttgaaacataaatccattttgttcggttttgtagagtcaacttatagaaataatggttttacaggtctttcagacccacatttagaggtagatgtgtctattgttattgacaatggttataaaaaaatagaagcgacttgcccagttgtgaatgcgaatctagcacaaggtgattttgtggctatcatgcctatttataatcagagacatgacatatggagttatgtagttacagctaaactaaaagctatttaccttggggataaagggtttcaagtagtagaccgatttgtggaattagaataa

SEQ ID NO: 69112 - DNA, 249 bp, Acinetobacter baumannii
atggcatctatgacagatatgaattgcaaatggtgcgagtctccattccaagctcgtacagcagatattaaacgcggttggggtaaattctgctccaagtcatgtaaagcaagtgagcaagagaaacgcacaggtcaaaacatggctttccaactttctcgaattaattctgaactttgtcatgactcgatgcatgaacgtgcactagaaggctctgaactaggctgggatgcgcacaaggattattga

SEQ ID NO: 69113 - DNA, 315 bp, Acinetobacter baumannii
atggagactaaatacgattggtcgttagcacctactgatgcttctttaatagcaacccaaagagacaaaactgtgattgtattcaaagggaatattaccaattcagatgtttgtgcttatgacgggttcttggaagggtactggggtgggaaggatgaattctgcagaaatagtaaaaattggtctgtagaagtcgcttgggctgattcgtttttgcttatgaacggtcaatttttaggtaatccatatggaatcaccccttatgaaggcgattggaaagactccctcgaacaacgcccagtagaaaagaattag

SEQ ID NO: 69114 - DNA, 591 bp, Acinetobacter baumannii
atgattaatcaaattgaattactagaaaagctaggaattgctgcatttggtaatgcatggaaagcatctttggccgatgcattgccagtcgctcgcccaacgataactgactggatgactggaaagaaacctataccagtgggagtatggggagatattcaaaagatcattgaatcacgtttgatgggcttacaaggtgccttagttgaaattaaagaacaacgacacttgattattgttcaagaaatgaaacgtaaaggtaaggcttatattcaagatgaattttctgattatctttatgctatgtcagatgaagaaatcatgacattgctcaaagcgtataaaaaagaatatgcacgattatattcagaatatccaaatgatgcctttgccgatctacttgtaattaaagatgctatagacttcaatatttgcatacgcgatatgaatggaaatcttgatcttggtttagcggaagactgtgcattgtcttattttaaaaataagaagttagctaaagagtttgatctggatgagctatttatggtggaaagagtaaaagaaattgaaaataattttgctcaaaattaa

SEQ ID NO: 69115 - DNA, 960 bp, Acinetobacter baumannii
ttgtttcatggtattccacatgtagatattaaccctaattttaaggaacagcatttatctgatgaagtttattctagtgtagaggcggctattttaactggaaattctattttagctggtattgctcttaaaatagctttaggaattgttggttcagataaattcagtaggatggttgagaaattaattaaattaggtaaaggtagtgatctttattactcatcttatttgggacaatatatacaaaaagaagatttccagaggattattttagaaaaattaacaagttctaaactaagtaaaggttgttattatttatatccacatctagaccaaaactttgataaaaaaatgtttttacaggctatttataatggtctgacagataataatccgcttatagccaaagcggcagccgaagcaattaaagagcttgactgtaatgatgagattttagaaaaattgaagcaatattatcaagaatggaaattgaaagaagagccatatcctaaagaattcggaactgtacctgatacacctagagttaaattagcagaaatccttatcaaatttgatccaaataatgtaggtttgctacaagaaatggtaattgatgatagatctgatataagaaaattggttattaagccattagttaatttggcaaaagagagtctttcgcttagaaaatggatagttgaggaggtatctgaaaatagaattgatctacagtttattgagcaagcagtagccgcaaagatatatgagggtaattatgatgattttataatactcttcgatcatcaagattctaagattcgttatgctgcaatgagtattctagaaaaaaatcaattgcctaatgaaattgttttagaaaaagctacaaggcttttatctgatactgtacttgagattagggaaaaagctaataatattttacgtaatcttaatctgtaa

SEQ ID NO: 69116 - DNA, 1020 bp, Acinetobacter baumannii
atgattgattattccccacatactaaatataccgctcaaaaaattcaggataaagtcgctcgtggagcatattactattcaatgtttactattgaagcgaaagactctaatcacattcctcgattgatcaaaaaactagatcaacgttatgagcttaaattaacgagccgacaacgtagctaccgcatgagtcaaagtaccccgatcgccgatctcataattcaaaaaagtttaaatcaggatagttggttatttgttctattgatcacaactccatatagtcacgatcatgcaaaaaatgcccatgatcgagttaaggaaattagtaggcaacagctcgtgaaggacaaaattaatgagctggaaaatacaacatggaacaaagaccaagaacatcaagatttattttttctcaaaaagtacttcgatgatgcagagaatttccggtgtgtactgaataagccatatctggatttaacttttggcaaaggtcaggcggagctagtgcgtttaacccataaaaagtatgcgtctcaacaagataaattttatcgccaaccgactaaaagcttttcttggacttggcggttcacacaggtatgtattgaacagaaacgcaaggaattaacccagattatcagtcgtatgatttcgcagccgaatagcagtgctccacatgatttaaagctatggcagcattatatgaatgtttatgcagtgtttcgcggtacacgccaacaagctggacgtttatatactttcggaaagaagttttattttagtcgggcaaagaaaacttgggatagtgctcaactaccgaaactcgatcttaagattattctgagataccagacctatgcagaaagctttgaagagtatgatttaaggcgctatgtttattcgatgtgtggagaggagttaccacgtgaaatttcaaaaacacttgatgaagaggaagcaggaagctttatcgaaaaatttatatataacaatgagatcaaagttgatgaaatttcttaa

SEQ ID NO: 69117 - DNA, 216 bp, Acinetobacter baumannii
atgaatgatttacctagtcgaattggacttttaattaggaaatctagaatagaaaagaagattacacaggagaaattagctttactttgtaatattgacagaagttacttaggtcgtatagagcgtggggaagttaacataacagtggtaaaattgtatgaaattgctgctgtgttgaaggttcaaccaagagaacttttaccagatatatggtga

SEQ ID NO: 69118 - DNA, 348 bp, Acinetobacter baumannii
atgttaagaaaaataatgtctatattgatatgttgtgcaagtacttcaatttttgctgaaaattggttaggtagtgataattctaaagttgatgttgatacattagagcattttaaagcgacaaatagttttgcacttacaattcatacgtcagttggggacaacctgtatatgaaagctaagctatatatttactgtaattctaatgaatatcaattcaagtcaataaaagcctataaaaatggtcaattggcgagagttgaaaatgaatggggtaaaaaacatatttcggaagcatcgaaaggttcaacaatctatagcgtctatgaagctgtatgtaagaaatga

SEQ ID NO: 69119 - DNA, 399 bp, Acinetobacter baumannii
atgaataataagtttttaattcactgcagtgtcttattcgctctattggtatcgctttcacatggagcaaactggacagctgtttctattaaagatgatcattcactttattatgatgaagaatcaatcaaaattgttaatggtgatacaaatttaaagcaagtatggcaaaaagtaatctttcgcatagatactgaaaatacgcgtaaaaatgactatatgctttctttagaatactttaattgtgaggatggaaaaagagcattaaaaaaactctatatttataatgctaatagaacccttaagtataattttacccatgaaaaattgaagtttgaagatattgttccagagtcattcagcgaaattgtttttaaatcagtttgtttaaaagcttag

SEQ ID NO: 69120 - DNA, 249 bp, Acinetobacter baumannii
atgtcaaaaaactctaagcaaacttcgaaatctgttggatcattggcctctaaagttctaaaagattcatcttcttcttcaattcaaaaagaacttgcaggctctgctctatctcaatcccattcatcaaaacaaaccagtagtgagatggaaacaaaagcctctcaagtactgcaaagtaataaatataatgacaccactaaaactttagcagcatctgtgctctctcaatcaaataaggagagataa

SEQ ID NO: 69121 - DNA, 189 bp, Acinetobacter baumannii
atgacttgttcatgcggaagcaataagttcaatgcaccagctaagctgagagctacagatcttattacatgtgcaaaatgtggtaagcaacaaagatttggaagaattcaaaaggacgttgtaacgaaagtaaagaagcaatttgaaaaggatttacaaaagatgtttaaaaaggcgggttttaaatag

SEQ ID NO: 69122 - DNA, 1575 bp, Acinetobacter baumannii
atgaatgatttttctttatctcaaatctatcaagacgtcataagttcaattaattggagagaaccgcagaatttcggtactgaacttttgcctgttcaaaaaatagaaaggaagatgctacctgaagaattagcagaatatgttttcggggaagcaagaagagcagacaatatgcctccagacttgatagctatctgtttaattacagccctaggatctttaatagggtcccgagttggtattaaaccgaaaaaattagatgactggagtgttgtaccaaatctgtggggtgcaattgtagctcctccaagcagtaaaaaatctcccgctatgaatgctggtactcgtcctttagatatgttaattgacaaggcaaaagctatttatgcacaaaagagtaaagagtttgaagtaactaatatagtgtatcaatctcaagagaaaaaattaaaggaaatgttaagaaaggctgaaactgcagaagagctcggaaaaattgcatgcaatttaatggaattacaaaatgaaagttttacgcctccaacattaaaaaggtatatgactaacgactcaacacctgaagctttagctgaaatccaaaaagacaaccctgcaggtattttgaacaaacgggatgaattaattggtctactctcctcacttgatcaaaatgatactgatacgggcagatcatattatcttgagggttggaatggaacaggttcttatacttttgatagagttatgcgggggaatgggtatataaaaaatcattgtttatcaattcttggcggcatccaacctgacaagctgattacctacttagaaaagtcaattactgggcttggcaatgatggacttttacaaagatttcaattgttagtctaccctgatattaatgattggaaatatatagatgaaaagccaaataaagaaatgcgccaaattgtttataatcttttcgaaaaaatagatactttagaattccagaattttatcgaaatgggagcacattctacagataaaaacgaatttagaccttattttaacttttgtgaagatgcacaagaactttttattcaatggacaactaacttacatactaaaaaaattccttctgaggaatatccagttattcaagaatatttatcgaaatatagcaagttaatgccaagcttggctcttattttccatattgtcgactgcattctgcatggctacagtgggagtgtaagtaaagctgcaacagaattggccatcctgtggtgtaattatcttgaagcacatgcaaaacgtgtctatggattagttactcattcatcaatacttcgagcaaatatacttctacagaaaattaaaaaatttccactaaatcataactggtatttagaaggattcactgcaaggttagttgcacaaaaaaagtggaagaatttaacaacagttgaatttgtaaatgatgctcttgaagtattagtcgaaaatcattggttagaatttaaagaatcggaaccatcagatcaaggtggacgtccatcgaaacgtttttttattaaccctaagattcggaaataa

SEQ ID NO: 69123 - DNA, 282 bp, Acinetobacter baumannii
atgttaaatcaagaatcagacttatctaaatacattcgaataagtgaattggcgagtacagcagaacgtaaggctagaatatatatagataaaacaggaaagacgagaaaaataaaagggcgaccacagaaaaaaggaatactcccaatgggagaatctactatttggaataaagtgcgctcaggtgactttcctcaaccaattcgtttatctacaaggctgactgtatggcgaatagaagacattgaggaatggattaaatcaaaagaacttggggtttaa

SEQ ID NO: 69124 - DNA, 708 bp, Acinetobacter baumannii
ttgatatctattacagaaattataagtaaggacagcaattatgtatccgtcaaacaagcatttgatataattaaaaaaataacaaatgaaaatagtgacgctctcattgctgaacttttaattatcaaagacgttaattatcattgccttagttttgatagatttacttatttcaatgaaaaaccagtcaggcttcatcgagaatacggtcaacactcttcattagataagctactatttaaaattgcagaatctacgataaacactaactcggatataccagaactaaataattatgcttgggataaagcagagtttatgttcttcttagacgatatttttgatcacatggatactactacagatttaataggtaatagagatatgcagaataatgaacttctagcagaaatagagaatttaaaaaaaataattaaaaagaaagacaaagaaattttagccttaaaaaaacaattgtctttagatccagaagctgaatcaatcgatatattgcatactcgaacaactaatgctgtagctaaactaattttagttttaactcatatggcaaaaattgacatatctaaaccatattctccttatgaagcactaaaaatacattcagagcagttagatatagataactttccatcaaaagatacagttggtccatggctggaaaaagcttctaatttttccaaattataa

SEQ ID NO: 69125 - DNA, 1296 bp, Acinetobacter baumannii
atgtatctatgtggattattaaaatttgtaccgacagatatggcaaaacaatctaataagttaacagctaaaaccgttaaaaatctaaaatatgactctaatccacaaggtaaaaataagcattctgatggtggaggattatatttattaacgcacaagaatggttcaaaatattggcgtctagactatcgtcgtcctattagtaggaaaccaaatacttttgcaattggggtatacccagaaatttcacttgagcaagcaagacttaaacgagatgaaattaaaaaacttctttcgaatggagttgatcctgctcaagaaagaaataatcaacgtaacgaactaaaagccaatttagaaaatacatttaaaaaatattcagaagaatggctgaagatcagagaactagagggtaaagtcgatagtgaaactattcgaaaattaaacaaagatatattgccctttattggtgatatgcctgttaccagttttacagtagaacagttagaaaaagatgtaacagaacaaattgtcaaacggggtgcccttgagtcagcaagaagagttaaatcaatcataggaatgattctaaaacttgcactcaagaagcgtatcatttcttataaccctgcgtatgatattaccctcccgaagcctattaaaggcaatcacaatgccattgttagtgaaagggagctaaaagaattacttatcaaaatctggcaatatagagctgaaaaccctcgagcacgaaaaaggactgaacttgcactcaaactatcagcttacatttatcaacgaccaaatgaagtacgaggtttattgtgggaatcagtagattttgaaaatcattgtttgagttttaaggctagtaaaacatatcaagatcatattgttcccctatcacgtcaatcatttgacattctaaaagaactagaacaattaaaaacaacttccaaatttgttttccctagtacgaaaacaaatttggaatgcatgagtgaagataccattcgccaagccttaattcgtttaggatataaaggaaaacacacagctcatggctttcgtgctactgcaagaaccttattaggtgaagaaatagaatatcgaatagatattattgaacatcaactcgcccataccgtaaaagatccaaatgggacagcatataatcgtactaaatttctacgacgtagaaagcaacttatgcaactatggtctgattatttagatactttacgtcaaggaggagatgtttcaatttttaaacccaatggaagtgaattaaactaa

SEQ ID NO: 69126 - DNA, 1008 bp, Acinetobacter baumannii
atgtcaggattacgttcagaacatatcagtaatcgactgtttttcttcatgttggtcattattttgtccttactgtttatggcggttccgcttattgtcagcagttatcaagagtacttaaaaactaaacaggctttggttgaaattaaaagcttaagatcaattgctgaagtcgcaaataaagtatctaaagaacgtgcgcccgcaaataaattaatgtcgagtaacgctgccgactttttaaaaaatcaaaaaaacttaaaagaatatcgcctctctgttgatcgccaacttaatgaaactattcatattttaaaagaagaaggttataccgatttagcaaatactttagatactaaatttagagatgatttaaaacaggctcgtgctgtagttgactattatgttgcaactcctgaacaagcgagaagctctatacaattcgataatgcaattttggctatgtttggagcttgggatagctgccgagaagttttacaaaatttgatgctacagttaaaaagtaaagatagccaaattaacaattactttactttgattgtggtgttgaccgatatgcgggatcaagctggtcgtaccgcatctaatgttattgcgcctgtgacctttaaagaaaccatacctaatgataatcgggcgcggtctttgcagactcagcagcaagcacgctacttatgggcacttgtagacacactacagtcagagcaagctaaaactccggaatatcatcgcctttactcaagggttaaaactgaatttttagataaaggcgtacctattgtgggtcagcttttagatgaaagccaaaagcaccaagcctatcatttaaacggaacagaactgacagaccaaatcgttgataaatttaccacggttattgatttgcaaaagtttttacttaataaaagcgtcttgattgcatctcaagaaaactatttggcaaaaagaagtttttccttactttgctcatttcaagcatatccttag

SEQ ID NO: 69127 - DNA, 462 bp, Acinetobacter baumannii
atgcaaatttacttggcacgtaataatcaacaagctgggccttataccttagaacaactaaatcaaatgttggcaagtcaacaagttttgcttactgatttagcttggcatgaaggcatgacagaatggaaagctttaggagaattaacccaaggtaaacttgtatatcaacctactggttattctgctttttcagcaaatacaaatacgccttataatgagaccattcagcacattcgtgtagaaactaaaacacacgagcttgcttcaatttcgtctcgtgctcttgcaaaaattattgacttattactttggctacctattgcagctattccgtctttttctttaatgaagctcaatataaacaactttttgagttacaaaaacagatgcaatctgcagaagttgcatcaactaaagcagctgaacttcaacagcagctttttacccttattcctatag

SEQ ID NO: 69128 - DNA, 300 bp, Acinetobacter baumannii
atgaacagctttacacagcaaatcaaagattctcgtcagcaaagtgaaatccaatctttttacgagcctgcattgcgagtgcttgggcacctatttgaggtgaaaaagcaaaatttacgtaacaaaggttatgacgaaaataatgcggcggtaaccaaagttgaattttcagaggctatggcacagcgttttcgcactaatcagtggttagcagggcagatcgttaatagtttggctaatgctgacttggttcaaaaatttggtgggtatgtaaagcctaaggtcggtgtacatgagtaa

SEQ ID NO: 69129 - DNA, 168 bp, Acinetobacter baumannii
atgagccctctttgtgagggctcatttctttcattaggtgcaggagaacaatatgaaaatcatattgattttggtggtattgctgagtctggcactagtaatatttttggcttttcaaagctacaaaatgctaagacaggttcaaaaacaagcaaaagaagagcgtaa

SEQ ID NO: 69130 - DNA, 777 bp, Acinetobacter baumannii
atggaactacaaacccttcccggactgtttatttcacatggttcacccatgcttgcacttgatccagaacaagtgggtcctgccttacatcgtcttagtgtaaatctgcctactccaaaggcaatcatagtgatgtctgctcactgggaaagtaaagcactcgaagtaagtagttcgactcgtccggaaacttggcatgacttccgtggtttcccgccagagttgtatgaaattcgctatagtgcccccggtcaacccgaacttgcagaagaaattttgaagttgttagcagatgctcattttgtcgcacatgccaatagcactcgccctcgtgaccacggcgtatggatgcctcttttacatatgtatctagaagcagacattcctgtcgttgaaatttctttacctatgggcttaactgcacaggaaatttatcggattggccaaacgcttgcgcctttacgtgaaaaacaaattttactgatcggttctggaagtattacccataatcttgctgaactgtcttggcaaggtgacaattcgaaagtacctgaatgggcttcaacttttagaaatacagtggtcagtaggttgagtcatcaagactatgatggtgtactggagtggcaaaccctgccgtttgtgaaacgcaaccaccctacgcttgaacattttgcacctttgttttttgctatgggtacaggcaatcgctttacgattgttcatagtagcttcacaatgggctcattaggaatggacatctatcgttttgattaa

SEQ ID NO: 69131 - DNA, 525 bp, Acinetobacter baumannii
atgggttcaatgaacgctattcctcaaactttcgagttttggcaagatcggcgaatgccttatgtggaaacccgaaggtcttgttttggcagaacatgttataagtctcatagccatccaacattttcaattggtgctatagatgaggggaatagtgtttttcaaagttcttttggcactgcacaaaagatcacggcgggtacattagttattgtgcccgcacatgttgagcattcatgtaatcctatgccaaatcaggcatggagttaccagatgcttcatttagatctagcatggttaaatcaactgtattcagaatttcaagagcaaggtcttgatttacatatacctcagcataagcctctcattataaaagacgaatctttatatgaagcttttactgaaatgaatgagacattatttgatgcgcaaaaattaatttttgaaaaagagcaggctcttctccattgcctgattcatttgttattacctcattttattttagaagaaatacaaaagccttaa

SEQ ID NO: 69132 - DNA, 219 bp, Acinetobacter baumannii
atgaatactatcaaaatctctaaaccattcgctaaatctttcaatactcttttaagtggtgaagttgtttcatactctcctcgttcgctaaaagttgcaattggtcgtgatgcagtaatcgtatcaaaagaaacaatggatgaaattgttaatacatcagatgcttatggagataaatttactcttgttgtttcagcatggcgcgcagttgagaaataa

SEQ ID NO: 69133 - DNA, 579 bp, Acinetobacter baumannii
atgattaatcaaattgaattgcttgaaaagcttggaattgctgcattcggtaatgcatggaaagcatctttggcagatgccctgccagttgctcgatcaacaataactgactggatgactggaaagaaacctattccagttggcatttggggcaatattcaaaagattattgaatcacgcttgatgggcttacaaggtgccttagttgaaattaaagaacaacgtcatttgattattgttgaagaaatgaaacgtaaaggtaaagcatatattcaagatgaattttctgaatatttatatgctatgtcagatgaagaaatcatgacattgctaaaagcgtataaaaaagaatatgtacgattgagttcagaatatccaaacgatacctttgctgatctgctagtaattaaagatgctatagactttaatatttgcattcggaatataaacggaaatcttgatcttagtgtagctgaagactgtgctttgtcttattttaagaataagaagttagctaaagagtttgatctggatgagctatttatggtggaaagggtgaaagaaataataaataactaa

SEQ ID NO: 69134 - DNA, 1461 bp, Acinetobacter baumannii
atgcaggcggtagtttaccatagccaagatatccaggcatgggagcaacgttggtttgctgcgcaaaactcatcattaggtttaatgcaacaagcagcttggtcaatcactcaacaactcattgtactttttcaaaaacaaaattttaagaatattgctgtttggtgcggacagggcaataatgctggtgatggctattttatagcaagctatctcaaacaagctgggttttatgttgaaatatttgcggctgacttgggcgagtcagccgatttacaccatgctgtccattttgctaaagcaaatcatgttcaaatacaccaaggttttgaggtcaacagaacatttgattgtcatattgatgcgttgtttgggattggtttaaaccgtgaattaaacggttattggcaacacgctattcaacaatttaatgggcaagcagggctaaaaatttcgattgatataccaagtggtttaaaagcaaatactggctctaccttaccttgtgcaatacgggctgatcatacatttactgttttagggcttaaagcaggactgtttaccggccaaggcaaagaatatgcaggacaaattcatttaattaatttaataccaatagaccaagagctgaaacctcttgcttacttgacgccaacacatatcaaacttcctaaacgtttggcttttggacataaaggaagttatgggcatgttttggtgataggtggacatgagcaaatgggtggggctgttattatggctgctgaagctgcttttcatgcgggtgcaggcaaagtgacagtggtttgtcatagcaaccaccatcaggctattttgtcgcgagctcctaatattatgcttcgtgatattaatgatttcgatgaaaacggtattaaagaaattttatctcaggttgatgcagtatgtttcggaatgggattaggccgtgatgagtgggcacaccaaatctatcaacagtggtttaattatttaaatcagacttcacatttagaagttatattagatgcagatgccctatggtttctcgcaaagcagcctgaaaaattgagtttacatatttatgcaacacctcatccgggggaggccgctacactacttggttgttctacttggcaaattgaaaatgacagaattgctgcgatttatgcgttgcagcaaaaatatgcaggccagtgggtgcttaaaggagcaggcagcttaattttagaagataacttgtatatttgtacgcaaggtaatgcaggtatgggaactggtggaatgggagatgtgttggcgggcatgattgcaagcttaaaagcccaattccacaaagcagttaccctacatgagatcgtaactctccatgctcaggcaggtgaccaacttgccaaacaaggcatgcgcggtttacaagcttatgagatgaatcaagcaattactcaagtagtaaatcaataa

SEQ ID NO: 69135 - DNA, 123 bp, Acinetobacter baumannii
atgagcgaagcagatataaataaaaatttagctagtttagcgcaaggttattggcagattaattggtctgatgttgatcttcttaattctttagaaaagaaagagttgaagcgagcatattag

SEQ ID NO: 69136 - DNA, 1866 bp, Acinetobacter baumannii
atgcagaaaataagtcttgaagaaaatcaaagagaaaatttggttcatcaaaatattgaacatctaaagcagatttttccagatgttttttctgaaggtaaagtgaatttcgagaccttacgtcagttattaggggataaagatgttttggaagaaggtgaagaaaagtatggtttgaattggcatggaaagaagaaagcccgtcaagctgcattgactccctcacttggaaccttgttgccatatcctgaagaaagtgttgattgggagaatactcaaaatctattgattgagggtgataacttagaggtcttaaagcttctgcaaaagagttatgccaataaagtaaaaatgatttatatagatcctccttataattctggaggtgaatttatttatcctgataactttaaagaaaatttagatacatatttagaatacactggacaaatagactcagaaggtaacagtcaatttagtagtttagaaagacaaggtagacgtcatacagcatggctaaatatgctctatcctagactaaaactagctagaaattttttaagatcagatggtgtaatttttatttctattgatgacaatgaaatttcgaatttgaaatgtctttgtgatgaaatatttggtagagaaaattatcttggtacaattgtttggaaaaagaaaacaaatggtaataatgttgggcatattccgcctgtacatgactatatacttgcttatgggaaattagcacaagaagattcgttatacggttttcctattacagaagagtttattaaaaaaacttatagtaatccagataatgatccaagaggcccttggaccacatcagatttatcagctaaccatgttgggccgtatttcccaataacaaatcctaatactggtgatgtttattatccacctaagggtagatattgggttttcaatgaaaaggatgtattaaaaaagattgatgaaggacgaattatatttggtaggtctggaaaaacctcaccagttcaaaagaaatatttaaatgagagaacaacattaagatttaaggctgaatcatggtgggataatcatgggatgaactcagatggaacagcagaaatcgcagagttattgttacctaaggtttttgagcatccgaagcctacagttttgttacaacatttggtaaatattgctactaaagatgatgatttaatcctggacttctttgcaggctctggttctctcgggcatgctgtttttaaacagaacatcattgatactacaaatagacggtttttacttgttcagttacctgaaattgtccctataacatctttagcgtctaagaatggctttaaaacaataagccaactagctataactcggttgaaaagtgccataaaaagcttgggattagataataacaatgaatttgacctaggtttcaaggtatttaagcttgcccaatccaatatccaaccatggaatccagattctactgatttagaaactacgcttttagaaagtgaaaatcatttaatagtaggacgcacagagcaggacatcctgtacgaactcttgctaaagcgtggtattgatctcgcagcaccaattgaagaacgtaaagtcggtgaaaaaagcatttatagcattggctatggggcgacatttgcgtgtttagatcaaaatattcaagctggtgacatagagtctattgctcaacttattattgattggtatcaagagttggctccagaaaataaaccacatattttcttccgagacagtgcttttgaaaatgatgtagtgaaaactaatatcgctgctattcttcaacaaaatggcctagaccacgtacgtagtttataa

SEQ ID NO: 69137 - DNA, 1227 bp, Acinetobacter baumannii
gtgaaagttacattgcaagacggtcagtctttagatattcaaaaagaaaatattgaagcattgcaacaattatttcctgaacttgtacgagaaggaaaagttaattttgatgtgtttcgccaaatttttggggatttagatgtcctagaagagggagaggaaaagtttggactgaattggcatggtaagaaaaaagcaagacagaatgcttttacaccttcgctaggtacacttttgccttgtcccgaagaaagtgtggattgggatactactcaaaatctatttattgaaggtgataacttagaagtcttaaagcttctgcaaaagagttatgccaacagaataaagatgatttatatcgaccctccttataacaaagaaaaagattttatttatccagatcgctttcaagataatttagatacgtatttaaaatatacagggcaacttgatgaggatggggctgcaaactcgagtgaaaaagagactatagggagaaagcataccgcttggctgaatatgatgtatccaaggattcaacttgctaagcaacttcttactcaagatggtgctatttttatttccattgatgatagtgaggtcgtgagtttaagagaaatatgtaatgaaatttttggtgaagaaaatttcgttgcacaaattgtttggcagaagtcaaaaaagggagattcaaagttagtagcaattatgcacgaatatattctctgctatacaaaaaataaaaatgcagcaattgaaagtggcatatggcgcacgaaaaaagaaggtgtggatgaagttttagacttttatcaggacttgataaataaacatgatggtaaccatgatcagattcgagaagagatgatgaaatggtataagggattaaaagcatctgatcctagaagagctcataaacattataattggtcagatgatagaggactttattttgcggccgattttgcaggacccgatgatgggcgtgaaagtagaccacgtcacgaaatctatcatccaatctcaggtctaccttgtaaaaaaccttcaacagggtggcgttgggatgaagaaaaaacagaatgggctttgaaacagaatcctcctagaattcactttggtgtagatgaaactacaatcccgaatagaaaaagctatttacatgaaacagcttatgagccatttgcatctaatttttatggcactgttgcaaatagtcggtggtga

SEQ ID NO: 69138 - DNA, 195 bp, Acinetobacter baumannii
atgctgctggaaaaaattttacaatcacaagggtttggttcacgtaaatattgtcagcagttaataaaaaatggttcagtaattattgatggggaggttgtgagtgatctcaaaaagcagttctccccagaaaattttgagttttccgtttttggtcaaaattatcaatatagagaaaaatttatattgctctaa

SEQ ID NO: 69139 - DNA, 537 bp, Acinetobacter baumannii
atgacctttgatcaaacagtagagctttatgcttcagtacttcgccaattactgccagctggcggttatgacacctcacctaaaggcgttatcgcaaaagatatatacgctcatgcaaaagtacttgcacaagctgatgttgacgcaaaacgtattttgactgctttggaaggtattcctgaagaattgctaaacgaatatgaagcagctctaggactcccgctgaaatgttcggtcaatgccactaaaacaattgaagagcgtcttcagatcatcaagtgggttcaagagacaaagaatgttttaaaccgtacctatctggagcaggttttagcgatgtttggtgttgagttaattgatcttgtgagatttacgccaatgcaatgtacagctccgtgtacttcgccagtcaacacagaaaatctacggtttaaagtcaaactcattttaaaagcaccaataaaagcagatatggtctgcattattgaaaactatctaccagcctatgtgcgatatgacattgaggaacaagtatga

SEQ ID NO: 69140 - DNA, 609 bp, Acinetobacter baumannii
gtgactaatttaagtgttgttgaacaagcctttaaagatgtcatgtctaagcagattactgacaaaaaatggccttgggtgcgtgaaatcaagacttatgcgggtgagtttgatgacggtataaccgctattatcaaagcgcttcctgctgtttgggtggtttttgagggttcgggaacaccaaaaaagattagttttaacaagactcaataccctgtgaaatttgttgtgcttgtcggtgcacgctctgtccgtaatgaggaagctcgccgccaaggtgctgggcgtgatatcgggacatacgaaatgttagaccgtgttcagaaactactgattggcaacaacctgtcttccgttggtgtaactggactggaacctcttgaacttggtcgtaccaaaacaatctttaacaccaaaacacgtgaacaatcaattagcgtgctttctcaagaatttacaacgcaatacacaattactgcttctgatcgtgaccgtgaagaagaagaaactatcggtgaaatccatcgaatcaatgtcgattatttctttgagccgggtgatgacgttaaagacgcttctgatctggttgaactgaaggaaaataaataa

SEQ ID NO: 69141 - DNA, 429 bp, Acinetobacter baumannii
atgtatgcaacggcagaagcgatgatcaaaaagtttggtgagcatgagttaattcaactcactgataatgttcagccttatcaagatgtcattaattacgacaagctcaatgcagcattgcaggaagccaactctgaaattgatggttacctgatgagtcgctataagctgccgttgcaaactgtccctccatttctcgaaagtctggcttgccatatggcgcgttaccatgcatgcacaggcgcaatgactgatgatgatccgatccgcacccgttatgaagatgctgtcaataaactgaaagatatttcaaaaggtattgttggtgtgggtggtacgccagctggtcaatctgaaccagtaaagacctcatcgaataatgtgatgttccaagttggacgtcatgactttgggggtaaaggctggtga

SEQ ID NO: 69142 - DNA, 282 bp, Acinetobacter baumannii
atggctttaactaacgaagaaatcttaaatgcagttgctgaaaaaactgttcttgaacttgttgaattaatttctgctttcgaagagaaattcaatgtatctgcagctgctgtagctgttgctgctccagctggtggcgctgctgctgctcttggtcttaaagaagctaaagacttagttgaaggcgctcctcaagttcttaaagaaggcgtttctaaagaagaaggcgaagaacttaagaagaaacttgaagaagctggtgctacagttacacttaagtaa

SEQ ID NO: 69143 - DNA, 723 bp, Acinetobacter baumannii
atgaattttattatcgaatatttaaaaagagcctcttttattgagatactaacaatattgttttttttaagtgttggtgtctctttaacttttaaaattgggttttataatgctttgggggttggctggtatatacaaaatttaacgcctcaaattctttttatctcatcttttaaagttattttaatttttttaggtgggatctttgtcggatgcatctttggattaaaattttctgaaagatctgtatctgttatttttttatgctttatagctttgtatacaagctttaatggatttattcagaacttattaagtattaacttagagatctctaattattttgatgtggttttgtttatattttattttttaacatccatgtttttagtttcgttaggttataaaaaaagaaaatatactgaccctttgttcgttggtccattaattagaatcaaacgagaagaagtaatatttgataatgtatttaaaattgtaattatcttattaatattttgtttgccgtatgttagtgggtatgatgctggaaaattagtcaaaaataacaaaggaaatagtgtggtagtcataaagaatgactcaagaaaatggcatttaattgatatgagtggagataaggtattgctgaaagagattaatcctaaagaagatgtttttaaagttctggaatataaagatatagacaccataacaacaagataa

SEQ ID NO: 69144 - DNA, 357 bp, Acinetobacter baumannii
atggctggtaatcgacaaattaaaacacctggtgcagcaccagagccaacaacagttgatgaaactaaagcaactgaacagcaagcggatgctacacaaccagacgctaatcaatcgacagaagatcaggcacagactggtgatgctgggtctgagacagaatcaacggttgatcaaacggcactggttgaacaattacgtcagcagttagcagcagccgaagcaaacaatcaagcgctgaaaggccaattgcgccgtgaaggggctaaaacacctgacgcagctaatgtgccaacagaaacggtacaagctggcacaccttacttaagccctaaaggctggacacggaagaaataa

SEQ ID NO: 69145 - DNA, 219 bp, Acinetobacter baumannii
atgtgcggtagcaaacccgttcgacaagatccagaagcagatgcggcagcagcagctcaaaacgctgttactgaaaccaatgctaaaaaagcacagcgtcgcactctaaaccagaccagcgcgttaggttcagcacttgcccctgataccgctgcaactaaaacaaagttaggcggtggcaaatggataaaggcgctcaaaagttttgtcgtcgcttag

SEQ ID NO: 69146 - DNA, 177 bp, Acinetobacter baumannii
atggataaaggcgctcaaaagttttgtcgtcgcttaggtcaattacgacttgagcgctctattcatgaatcacattggtctgattgctacaagtttggcgcgcctgaacgtcagcaaaaccttagttctacaacagataacaaaggacagcgtgagaatgagcgcgcagacatttag

SEQ ID NO: 69147 - DNA, 222 bp, Acinetobacter baumannii
atgttaaaaacagaaaaagggcgacaattagttaagcacattcctaaaaatatgatactaactgaaactgatggaccgtttattgtgaaatctggtactcctttattaccaggtcaggttcaagcagttattaatgaacttgcagatatatggggcgtcaatccaaatgaagctaccgctcagatttacgaaaattttaagtatcttctaacgaataaataa

SEQ ID NO: 69148 - DNA, 156 bp, Acinetobacter baumannii
atgaacgccataacccatttcgattttaaatccagatctgttcgtattgtcctagatgataatcaagaaccgtggttttgtttaaccgatgtatgtaaggctttagacatttcaagatcatctgatttattacagattcaaagggggggacgttaa

SEQ ID NO: 69149 - DNA, 234 bp, Acinetobacter baumannii
atgatgtctagaacttttattaaaagattcgcaagtactcaaccgaaattcttagctgaaagtatttcaaaattccagcggcaagagtctgtagagattcaaagtctttcaacatttattgttgagggggacacgtggccgtatcaagctttggtggtttttgaacgtcctattcagatcaaaataagcgatgaaccacccgaatatgtaagaccactaataaattgccgttga

SEQ ID NO: 69150 - DNA, 207 bp, Acinetobacter baumannii
atggggaataactacccacgtaccactgctatttcatttaccgcggcaggtaataactttgagttggctttagctgtagctattgcaacttttggtttagcatcacctgtagcatttaccacagtgattggaccattggttgaagtacccgttttaatttcactcgtcaccgtttcgctttggttaaagaaaaagtattactcttaa

SEQ ID NO: 69151 - DNA, 222 bp, Acinetobacter baumannii
atgagtaaaaaagcatttaaagatttaaaaattcgattccatatggcaattggtattgcaaatgccactcaggaagatttctaccctcttagtgaattcattggtgaagatgactggaatgcaatggatgaactgcaaaaggaaacatttatttctgattgcgctaatgattggagtcaaaactatttagatttgggaggctgggtggaatgggacaagtag

SEQ ID NO: 69152 - DNA, 270 bp, Acinetobacter baumannii
atgggacaagtagtcaaaatagaggcgagtattctagaaaagattgttgcagtagctgaacgcattgctcagtcaaaagaagaacgtcgagtcggtcgtgctgaatttgcccacatgcttaacattgagcctgaaaccttggattcacgaattagagaaggcagataccaaaaaccttttaaggatggaaggaaaagttactggatgctttcttacgtgcaatcagtcgttacagacataaaagaatctgataaagtagccacctattga

SEQ ID NO: 69153 - DNA, 780 bp, Acinetobacter baumannii
atgaagaaggaaaagttaaagagcaataaagtttgggaaaatccaattaatcgtgatttagagattgatatagaaattaaacgaatttttaagcgtgaaaaaatagacatcaagattattaaacgtgaaagtgataatgatacaaaattcgagctttttcaaaggctaaatactggtggttcaaaactatctgatcaagaagttcgaaactgcatgttattaatgcacaataaaaatgcttatttctggttaaaagatctagcaaaaaattctgacttcctgaatacattacctatttctgagaagcaaactgaagaatgctatgatcaagaattagcttttcgtttttttgttcaaagacatagtgatggcacaactcgtaaagaacattcggatgtaggtccatacctcaatgctgagttaaccagactttttgatgaaaaaagtggctttaactatgatgaagaacaaggaattttcatcaaaacttttaaaatagctaatcaggctctaggtgaggatgcttttaaaaaatttaatcattcaaaaggaaaatatgaaggagcaatttcattaccagtttatgaagccatgtctgttgctttatccaacctcattaaatctagtaaatatgacgatgagcaattgatagatttgtataaagataaaagtaaagagttaactgctcacgaagattttaaaatctctcaagaaagaagagttcgacctctagacagaatggtattaatgtcaactatagggcaggaaattctaaaatga

SEQ ID NO: 69154 - DNA, 243 bp, Acinetobacter baumannii
atgccgttgacagttgccctgattgatgacaatgcctcgaccattaagcggctgatgatcaccaataagatgtccaagtctgaaatcaaagaaatatttggagatgaagattatccgcttccagaactttggttgaaggctgaaaattcgaattacaatcacatcattcctgatgatagtcagaccatatcaatctggggtgtggtgacttttaatttaaagcgtatttatcaccgctcataa

SEQ ID NO: 69155 - DNA, 684 bp, Acinetobacter baumannii
atggaaaaaagtctaaatttagcaaattcaattttcgcaggctttaatgataaaaacggattaatgatttgtggttatgaatggggtgaagaatcacaaagtaaggggcaagaagttataatagatacgactaaagaatgtacattttctaataaatcattgcgatatggtgatgttgctaagacatggattaaatacgataaaagaattagaacttggttttctatgtgggggcatcctctaaatgaggaaggcctaggcgatgctttcgacaaaatgattgtacaaactaattgggctgtagagtcaaaaaaatctcgttctgcaattcctttctacaaacaagatgaaaatgttgataattttatagcacatatagaagaacttagacctaaagtaattctgtttatgggaagtgagcttttaactaaggtactaaaattttataaagtaagggataaattcactccaattatgggcaatgaaattgaaaaattgcaaacattaagaatgcctgattatcatggctcattggcttatatcaataaatttgaaaactgcactgtagttgggttgccacatccttctagtggtcgtggaattacaaatgagtatattgaattctgtggatctgaattaaatcctattatttctcaatttaaaaaagatcacggtattgcataa

SEQ ID NO: 69156 - DNA, 456 bp, Acinetobacter baumannii
atgacaaatcatatccagattatagatggatcatctttcaaatcgatcttcgtagtaggcgacttgcatggttcttatcacttgctgatgagccatctcaacgctatcgattttgactttgataaagatttgttgatatgcacgggtgacctggttgataaaggcaaagaaaatttagaatgtttttcattgattaaaaaaccatggtttcgaaccgttcgtggcaatcacgaagaaatgtgcattaaaagtctatttgattcaaagcttagacatttacatgaaagaaatggtggtgagtggctctatcagttgtcatcacatcagcagcataaaattatcaaaagctttgaagatttaccaatcgttatcgagcttgaacttctagataaacgaataggagtggttcatgcacctagagcctcgttaaaaccgttgatacaattacatcactaa

SEQ ID NO: 69157 - DNA, 345 bp, Acinetobacter baumannii
atgatgtattctgaaaatgacagtccagtatatattgcatcagtgttgggagagcgcttaaaacgcattcgattaaatcgagatatgacacaagctgaagttgcgagtaaagcatggatcagtcgaagaacggtgttaaatgctgagaaaggtaatgtgaaactctcggatttaattgcaattctagctgcattaaacatgattaataatttcaatgttttaatacctgaagagtcattttcacctatacagttgcttaaactaaaaggcaaagttcgcaaaagagcatcaggtaataacaagccacctgtactgcaactggcaaaaccaaagtcagattggtga

SEQ ID NO: 69158 - DNA, 351 bp, Acinetobacter baumannii
atgcatactaaattcaatgatgcaaacccatgcatgccaaaaaacctcgctaaacagctgattatcgaaggtgctaaagttctgaaccatcaacagcgccaagccttgctcgatattttcatggctttagatcaggcggaaaaaacagctgaaaagatacttcagcaacatgctgtagctcaacagagcacctacaacttttctcaagttcacgaatgccaagatgaagacaatcaggaatattggtcaggtcattactatgattcttacagtcaagaatatccagaagattgggtaaaacggactcagtccaccccacgtcgtcataagttccctaagactgtttactga

SEQ ID NO: 69159 - DNA, 618 bp, Acinetobacter baumannii
atgaaaaggaccaaacgtgaaatcacgaagcgacttcgttttaatgctgaacagggggcgcagttagatagttttcttcaggaacatggaattggatttaccaagctgattcatatccttattcagcgcgagttatgtcgatgttggccacttgttcaccagaccagtgaagaacaagcccttagtgaaccttctaagctgtggcagtccgtaccactcaaaaaaagatccttaaaaaatacagtgggtcgcccgatacccagtgccgaccctcaactcttactggaacttggccgaatcggaaacaatatcaaccagattgcacgttcactgaacttcttatgtcttcaacaaactgaagacattcagaagttttcctttgtcgattgcgtagatgttctggtcacgattcagtctgatttacatctatatcttcctgtgctcccaaaatattttgtttctgatcagcttgcgaaaaacagaaaagcagaagcaattcaacgggtaaccgagctatccgaagattcacatctagatcatcaaaatgatgcagtactttcacaaagagaatccgagccaactcggtcgagtagctcggattatgatgcctacttttaa

SEQ ID NO: 69160 - DNA, 126 bp, Acinetobacter baumannii
atgaaaacatctaaatttattgacagtcaaatcatgtccattttgaaacaggcggaatctggtacacctgccgctactctttgccgtgaacatggcatgagcaatgctacatggtacaagccctaa

SEQ ID NO: 69161 - DNA, 402 bp, Acinetobacter baumannii
atgaaattctcgccagatgatttggaaaaacacctaacagaaaattacggtttcaccttggtattaaagccattacgtcaaccaccgaataaaaaagtacatagactggctcatgataatttagagcattttcttcacatacagcttgatggttttacccaagcaaatttggctatgccatacattcatgaatatgttgataaaattagtgactgcttaacaattgatggaatcgttgaagccagagaatcgaacagatcatgtttttcgggctacccagataaagatccaaagcatccaaccaaacaaaagcaggctctatgttttaccatcgaacaccaagatgctgtagaaccattcatagagttaatgtttggtttatacgttagcagcagaaagtaa

SEQ ID NO: 69162 - DNA, 534 bp, Acinetobacter baumannii
atgggtgttcctctcttccagattaaggacatcgtcgaacagcatcaggtacaggtgctatcgagcaactatgcactgtatgcagagatgtctcgcagattcatgaaaatcctagccgattttgtatcgccaaaagagcaagagatttactctattgatgagagctttctggatctgacagctcatgcagggaattacgacttgactgaatatgctcatcagattcgtcagcgtttgttttcttggcttggtttacctgtatgtattggcatagctgagtctcgtgatgttaataacggtgatctgttcacgattgatggactatctgacaagcagttgtggcgtatcagtcggcataaagagtttataagtacatatagcggtcttgctaaaggcgacgctggtaagaactggacagcgtatagtgattttataattggtgagatcaaaaaagatccctccaaattcagcaagaaacgccctatacgcgaatatttagatggaaatgaagcagactatgacttctcaagatag

SEQ ID NO: 69163 - DNA, 972 bp, Acinetobacter baumannii
atgtggttagcaatgctagcagtagtagtaggtctagcaatcttggtttggagtgctgatgtttttattgatggtgccgtcgctttagctaataagctgaatgtacccagctttttgattggtgtcatcattctaggtttaggcacttcagcaccagagatgatagtgtccatgttagctgctttagaaggtagccctgggctggcattgggtaatgcttatggttctaacattgttaatatcgccttagtattaggcgcaacggtattaataagtccaattattatccgaaaaagtattatcaatcgtgatatgcctttactactgttggtgacggcagtagctgcttggcaattaagcgatggtgtcttaggtaataccgacggtatagtattgatagtgcttctagtcgttgtcttaggcatacaaatcatcttgagcctgcgtgaaggcaaccacgaacatgaagacgatactgtagaagaaactgcaaaggctgaacacagtatggcacaaggtttaggtaggttatttcttggtttgttcgtattaatactaagctcgcgcgctatcgtttggggcgctactgaacttgctactttatggggcttgagtgagcttatcattggtctcactatcgtcgctatcggtacgtcactgcctgaattagttgcgagcttgtcggccgcacgtaaaggtgagcatgatatggctttgggtaatattataggctctaacgtttttaatactttaggagtcgtaggtatagcagcactcattgcgcctattactccgagtagcattattctgtcgcgtgatatattagcgatgagtctcttaaccttactactgtttgtgatgtgtctatttgcatttaaaaccaagcgtgtattcggtcgtacttctggcactactttagtactatttttcgtcggctatactgtctggttaattcagacggtcagtctgtag

SEQ ID NO: 69164 - DNA, 711 bp, Acinetobacter baumannii; identical to SEQ ID NO: 49722

SEQ ID NO: 69165 - DNA, 135 bp, Acinetobacter baumannii
atgaatatttttatatctggcgttttggatggacaaattttacctatagaggaaggctttgttgcacaaagatttcataactatatgattttaaaagttttgattatttttcgatccaaaattaaatttatttaa

SEQ ID NO: 69166 - DNA, 507 bp, Acinetobacter baumannii
atgacgccgccttgcaacggctgtgcttcgtgcgggcggccttcgaggcgggcatcggcctcgacgcgctggcgcggctgtgccgggcgctggatgcggcggacggcgacgaagcggccgcgcagcttgccctgctgcgtcagttcgtcgagcgtcggcgcgaagcgttggccgatctggaagtgcagttggccaccctgccgaccgagccggcacagcacgcggagagtctgccatgaacaaccccgagcgcttgccgtccgagacgcacaaaccgatcaccggctacctgtggggcggactggctgtgctcacctgtccctgccatttgccgattctcgccattgtgctagccggcacgacggccggcgcgttcatcggggagcactggggtattgcagccctcacgctgaccggcttgtttgtcctgtctgtgacgcggctgctgcgggccttcaagggaagatcatgaccgcttcccagccagccgagagtgggcagctttga

SEQ ID NO: 69167 - DNA, 369 bp, Acinetobacter baumannii
atgggatggaaggggaaaaggccaactgattttagttttgatgtggctaaaatggcagaggaaaaagtaaagaaaattacaatggatgctgttcagtctttggtcgtttcaagtcctgttgatactggcgcttatcgtgcttcgcatatcgtttcaattggatctggtgattatggtgtccgtggacctgaaacaaatgctattcaggatgcagctattcaagctgtgaagtttaagttgggcaatttagtttatatccagaacaaccagccttatgcaccccgcttagaaaatgggtggtctgatcaagcaccacaaggaatttacaacatcacctttacctttatttctcagaagtatggcggctaa

SEQ ID NO: 69168 - DNA, 303 bp, Acinetobacter baumannii
atgtctgttcaagaacgcttaaataaatctacagtccaatttcttaagattgcacatcatgttgtattcgccaggaaacgctatgaaaacggcagacaaatagtagtttccctgatttatattgcacaagatgcacaccccatagcggcaatcacaggaacagagcgattttgggattgtcacgacatcagtaaggcaacacgatcaattagacgacacaataaaaactgtctaatcctggatcgcagagacttcatttttgagaaaacggaagacctaaaaggcttcaatggcatccattga

SEQ ID NO: 69169 - DNA, 207 bp, Acinetobacter baumannii
atgcttaatgatgcactacttgctataaggaagtatcatcgcatatctcaaacagaattatctcaatctcttggtatttctaattcttacttatcagaaattgaaagtaatatggataagcatgatactttatcaggaaaatttcgttattttgctggtagtaaagtaatcaaactcatgaactggttaagtgaaaatggaaagtag

SEQ ID NO: 69170 - DNA, 243 bp, Acinetobacter baumannii; identical to SEQ ID NO: 50814

SEQ ID NO: 69171 - DNA, 276 bp, Acinetobacter baumannii
atgactagaaaacgtattgctttaagtgttcctcccgatatggaagaacttttagataaaatttcagaactaacaggacagccaaagacaaaaatcattttagagatgttagaacaatatgttccaatacttgaacagatgttaaaggcattggaacaaattagagataacaaagaagatgctttaaatattgcaaaacagtttgctagtgagatgctgctagatggtaaccaaaagctagggcaaatcgctactgaggttaaaaaccttaaataa

SEQ ID NO: 69172 - DNA, 405 bp, Acinetobacter baumannii
atgaatgaatacgacgcaataaataacggcattttttttgaagataaacacagaattcaaatgaagataccgccaaacgctttttttattggcttcactttgattaatgatgaaaccaaagtttttgtaaatcggattgttctaagcaatgagggttgtacgtttatttatatgacacctaagcagatgcgaaaaacgattcataaagatttatttatctgcccgtatctccagctggtttataacttgtctttatcatccgaagaaaaaactatgcctttagctgtttatggtttggatgatggcgaatccacaaagatgctttttgcaagttttgaagatgacgacattgaacgagtttttaaaacaattccatccccatctaattcacctttttacagttaa

SEQ ID NO: 69173 - DNA, 486 bp, Acinetobacter baumannii
atgaaacacggtcttgatctgcaagatggttcttatgctgaacagtatgtttcaaagtggggtttacctgaagaaatgtctaagggtcatattaaacaagggcgaaatggtggttataccccttttgatcttttggaattatctattgaagataagccaatacacggaaaattgccgtctaagctgttccaagaatttgctattgccatgaaaggacaacgccaacttgtttggggtcgtggtctgaaaaaattattaagaattgacgaaaagacagatgaagaacatgcacaagaaacagaaaagaatgcgattgaattagtaagcgttgctaactatgcctttaatcttttaactatttaccaaaaacggcatgtttaccttgaattggtgactgctgactatgaaacaggaacaaacacggctaacgagttgttagacgctttacaccatgaacatattacgagggtagtgcagactgaataa

SEQ ID NO: 69174 - DNA, 612 bp, Acinetobacter baumannii; identical to SEQ ID NO: 58142

SEQ ID NO: 69175 - DNA, 408 bp, Acinetobacter baumannii; identical to SEQ ID NO: 58145

SEQ ID NO: 69176 - DNA, 408 bp, Acinetobacter baumannii; identical to SEQ ID NO: 58145

SEQ ID NO: 69177 - DNA, 612 bp, Acinetobacter baumannii
atgagcaaggctttagagctactggcgaatatagacaagaagtacaacaacgaattgaagaatacagaggaacaacttctgagcggtatcgaacaaacgtcacagactatcagagacagcttgaacataagagccaatatcactgcgaccgctatccaacagtcggacgagaaaatagcccagagcattcaaaccaacgcccagacggtcgagaagcagttaagcctgtatcaaaccttgctgcaatcgaaattgagccatttaacgcaattaaacgagcaaatacagagccaagaacaacaagcccagaatcaagcggtacagaaaaaacttaccactttgaatatgggactgatttcagtagcagttattttgcttatagcaattttctcgcttggtctcgtcaccaaaaacaagtacagcgagatgcagacgctaaataccgtgatcaacgagaagcaaatgagggtcgaccatttgaaccgatcgggaggcagtttgacgatcagcacatgcaagcgaccagacagcaaagcacagcgcctatgtattcagatcaacaagaacgcaggcgaatggcagaacggctacatgattccaatggggtattaa

SEQ ID NO: 69178 - DNA, 408 bp, Acinetobacter baumannii; identical to SEQ ID NO: 58145

SEQ ID NO: 69179 - DNA, 612 bp, Acinetobacter baumannii; identical to SEQ ID NO: 58142

SEQ ID NO: 69180 - DNA, 408 bp, Acinetobacter baumannii; identical to SEQ ID NO: 58145

SEQ ID NO: 69181 - DNA, 612 bp, Acinetobacter baumannii; identical to SEQ ID NO: 58142

SEQ ID NO: 69182 - DNA, 612 bp, Acinetobacter baumannii; identical to SEQ ID NO: 58142

SEQ ID NO: 69183 - DNA, 402 bp, Acinetobacter baumannii
gtggaaatagattcagtaactaaacagaaagcagttcgagaacgaacttttaaagtcagactgtcagaatcagagtatcaattgctcgatgccaataatccgtttggttctattgcaaagttgctacgtcagtccgcaatagagaaagcaacaaagattcataattccaaagcagaagatgaccaaaaaattaaagcaacaaaggttgttgaatcttcgtatagcaagacagagcgagcattaattttagagcttggtcggattggcaacaatgtgaatcagattgctaaagcagtgaataccgatattgcaggggtaggtacttttgacaaagtgaagttacttcatttgttgatttccatagatcagcagcttcgggagttacgtccagatgatcgttga

SEQ ID NO: 69184 - DNA, 747 bp, Acinetobacter baumannii
ttgggtattaccgttgataaaaacaaagttgtaacctttacagcacaaaccgaacaactggtaaatacatctattgatgctaaccctaatcaatataaactcaatgacttagtgatttacggtatttttaaacgcctatatagccgacaaggtggtgatggaaaccctttaatttatgccttaaaagggcaacgagggtactcaatatcactacaagaatgtggtaaatttaatcccaatttatctgcaattcttgatcatttattaacacaaaaaaactatgaagtaattctaaccatgccatcttctcataaagtggtagaaaggtttgctataaaaataaatagaagaatttcaaaagattgtctcttaataacagatatattcacaaagaaaactttcagtgaagtctatgaagatcttcagaatctgcctctaacgccacaatacaaaagagatattattgccctacgtcgcacaatagagagagatgcccaaagaaatcctcataaagtattttcaatgaaagaagtcgatacaaaggacagaatgttcattcgccccttaaaaataaaccctgaacggatgaaaacaatccaacaaatccaagggaaatctatactccttgttgatgatttattagcgagtggtacaacattaacaagtgcttataacttactaaaagatttggaaataagtgacgaaatagaagcaatttgtttattaggtaaactcggtaacaaataa

SEQ ID NO: 69185 - DNA, 456 bp, Acinetobacter baumannii
atgctaataggtttaattgttgctggtattgttttgtatttaatagtttcatcttatttaagaaggtcaaaagatgcagatgagaaaactttgagaccaatgtctgaatgggtaatactggcaaacagtggaactaaaggacatagggaaaaaatgtcttacagcttaattgttcaagcagccgcaattctagagagtcagaaagttttaccaaataaatcattaaggagtttaatgatttcaaaaccagagttatctaaatcaaattttgttttattaataatggaatctacggctgaactttgtccgaatgagtttgagttcttaaaaaaatcgtataaaacagaacaagctagagtacatctagcccaatgtatcggtttgattttacatcatggcggtgaatcagccttagcgcaaattgcgcttgctgcatgttctgaaccaattgattaa

SEQ ID NO: 69186 - DNA, 1353 bp, Acinetobacter baumannii
  misc_feature (1332)..(1341): n is a, c, g, or t
atgaataagaaaggtttaattcagtttaggtttgttgaattatttactggtaataatatacctaatttatatcatgttattaagaatgaaaagggcacaactattgcttctggaatgacaaatagtaatggcttaacagtaatgataagtagagatgtaggcgatactctttatgtatatttaaaaaatattataacaggtgatttgaaagaaaaagttagacacactgttatttataaaaaggagatagtaagagtaacatcatcaaaaatactattagataatattatcttagcaaaatcaacgaataaacctggtaattatagatatttaacgcataaagtaaaaaaaggagaaaacttatctttaatttctcatcgatttaattgtaaaattagtgaaattgtacatttgaataaattaaaaaatcctgatcatatagatgtcggacaaattattaaaattccatacaaaggtggatcaagtgattctaagaaaagtcctgataacaaacaatctaagcatgaaaataataaatcatcttctactcagaaagtaaattcacatgaaaataataataaaaatacttcagataaacctcaaaaaagaatagagtcaaaagatataactgatgaatatacaaaagagtcaggaaaaccaatgaaagttgctactaatgcaacttcaccatgtatttgtaaacaatataatttggcttggggatctaaagttagttgcgaatttaggaaaagagttataaaaatagcacaaaatttgtggcctaatgattcagagaatatggcaagccaattaatggctgttatgcatttagagtctgccggaacttttagtccaaaaattggaacttttatcagcaaaaaattaacagatgatgctaaaggtggttatgttggtcttatccaattcggaaaatttgcttcaattgatttaaaagttaaaagatctgatttagcgaaaatgtcagctgtacaacaattagattatgtagaaaaatactataaattaaactctgctcatacaaagattaaaaatctaactggattatatttatgggttaattatcctaaaaatgtcaaagaaaaccgattagaagatgaagatattgtatatgcggcacccaaagacgcagaagtaacttctaaaaaatttttagaaagcccatatcaccaaaatcctagttttatgaaagagaatgaggaatataaacgggatggtaaaaaagttattagacaaggatttaaaaatggttcaactaaagtttgggaggttgaacaagaaattaaaaaacatttaaccgaaggtataaaaagnnnnnnnnnnaaatcatactga

SEQ ID NO: 69187 - DNA, 345 bp, Acinetobacter baumannii; identical to SEQ ID NO: 65578

SEQ ID NO: 69188 - DNA, 402 bp, Acinetobacter baumannii
gtggaaatagattcagtaactaaacagaaagcagttcgagaacgaacttttaaagtcagactgtcagaatcagagtatcaattgctcgatgccaataatccgtttggttctattgcaaagttgctacgtcagtccgcaatagagaaagcaacaaagattcataattccaaagcagaagatgaccaaaaaattaaaccaacaaaggtgattgaatcttcgtatagcaagacagaacgagctttaattttagaacttggtcgaattggtaataacgtgaatcaaattgcgaaagcaattaatacagatattgcagggacaggaacgtttgacaaagtaaagctacttcatttgttgatttcgatagatcagcaacttagggagttacgtccagatgatcgttga

SEQ ID NO: 69189 - DNA, 402 bp, Acinetobacter baumannii; identical to SEQ ID NO: 69188

SEQ ID NO: 69190 - DNA, 402 bp, Acinetobacter baumannii; identical to SEQ ID NO: 69188

SEQ ID NO: 69191 - DNA, 402 bp, Acinetobacter baumannii; identical to SEQ ID NO: 69188

SEQ ID NO: 69192 - DNA, 402 bp, Acinetobacter baumannii; identical to SEQ ID NO: 69188

SEQ ID NO: 69193 - DNA, 402 bp, Acinetobacter baumannii; identical to SEQ ID NO: 69188

SEQ ID NO: 69194 - DNA, 408 bp, Acinetobacter baumannii; identical to SEQ ID NO: 58145

SEQ ID NO: 69195 - DNA, 408 bp, Acinetobacter baumannii; identical to SEQ ID NO: 58145

SEQ ID NO: 69196 - DNA, 408 bp, Acinetobacter baumannii
atgtcaggacaggaacaagaaaacaaacagagcaaagcagttcgagaacgaacctttaaagtcagactttcagaatcagaatatcaattgctcgattccaataatccttatggttcgattgcaaagttgcttagacaagcagcagtagagaaagcgactaaaattcataattccaaagcagaagatgaccaaaaaattaaagcaacaaaggtgattgaatcttcgtatagcaagacagaacgagctttaattttagaacttggtcgaattggtaataacgtgaatcaaattgcgaaagcaattaatacagatattgcagggacaggaacgtttgacaaagtaaagctacttcatttgttgatttcgatagatcagcaacttagggagttacgtccagatgatcgttga

SEQ ID NO: 69197 - DNA, 216 bp, Acinetobacter baumannii; identical to SEQ ID NO: 42270

SEQ ID NO: 69198 - DNA, 453 bp, Acinetobacter baumannii
gtgagcggtcttttagtttttataaccattgcttttcttactttatcaagcccaggcccaggcgttttatttacagtaacaaattcaataaattatggtgtgaggacagctttatttggtattagtggtttaattattggtatgtttattatcgccgtgatttctgcaagcggtgtcgggcttattattactagcaaccctactatcttcactgctttaaaatttattggggccttttacttaatgtacttaggttataaaaattttattaaaaaatccccaactcaagacttattagaaactgaacataatgaaaaagagataaagaaatcaaagcttttctatcaagggttgtttgcctcactacttaatccaaagacaattgtcttttttattgcccttttcccacagtttagagatggatccgtaaatttgaacaactcctataagtga

SEQ ID NO: 69199 - DNA, 402 bp, Acinetobacter baumannii; identical to SEQ ID NO: 69188

SEQ ID NO: 69200 - DNA, 402 bp, Acinetobacter baumannii; identical to SEQ ID NO: 69188

SEQ ID NO: 69201 - DNA, 408 bp, Acinetobacter baumannii; identical to SEQ ID NO: 58145

SEQ ID NO: 69202 - DNA, 402 bp, Acinetobacter baumannii; identical to SEQ ID NO: 69188

SEQ ID NO: 69203 - DNA, 408 bp, Acinetobacter baumannii; identical to SEQ ID NO: 58145

SEQ ID NO: 69204 - DNA, 705 bp, Acinetobacter baumannii; identical to SEQ ID NO: 8686

SEQ ID NO: 69205 - DNA, 402 bp, Acinetobacter baumannii; identical to SEQ ID NO: 69188

SEQ ID NO: 69206 - DNA, 402 bp, Acinetobacter baumannii
gtggaaatagattcagtaactaaacagaaagcagttcgagaacgaacttttaaagtcagactgtcagaatcagagtatcaattgctcgatgccaataatccgtttggttctattgcaaagttgctacgtcagtccgcaatagagaaagcaacaaagattcataattccaaagcagaagatgaccaaaaaattaaaccaacaaaggtgattgaatcttcgtatagcaagacagaacgagctttaattttagaacttggtcgaattggtaataacgtgaatcaaattgcgaaagcaattaatacagatattgcagggacaggaacgtttgacaaagtaaagctacttcatttgttgatttccatagatcagcagcttcgggagttacgtccagatgatcgttga

SEQ ID NO: 69207 - DNA, 402 bp, Acinetobacter baumannii; identical to SEQ ID NO: 69188

SEQ ID NO: 69208 - DNA, 363 bp, Acinetobacter baumannii
ttgttaggagttttatttttctttgttcctcgttttctatggaatgataaaccttttggaagcggttatcagttatctttagatcagggctatgcatttaataatatatctatgccatttatagcggaagggtatgttaattttggatatttaggttttataattttctctatttttttagctttctgtatgaaaaagatagattcattatatttaattaaagctaatagtattaactttaattattgtaaaggtgtttttttatgtgcagctatattttttatgctacgaggtgatttaatgtcatcattctcttttttgttagctggtattgttgcgtttaaaattgctgaaaaaatatag

SEQ ID NO: 69209 - DNA, 198 bp, Acinetobacter baumannii
gtgaatcgattagaaaagcgaatagatgattttgaggaagataacaatttttctgaaaaatactatgaagacttttctggactatatttcatgatgttgtggctcttaatgaaaaatggcgcttctaaagatgaggttagaatgatacaagctaaaggttattcatatgcagatgataactataagagggtaaagtag

SEQ ID NO: 69210 - DNA, 1425 bp, Acinetobacter baumannii
gtgcgtaacaagtggcaagctcattttaatgcgtaccggctttggaacaagcttcgcttccagcgcaaatccattacctttgatgcggcacctgagtcagaattactggttttacgtgaccggatcgctgtagctgattatcgcaatggtattcatcaaagcggtgaggtggtacagcaagaaggtttaattctcaccctaagccatgatgtcgatttcattgcaggcaagagttatgtgatttatttgcaaatgggggatggtaccgtggacctgattcccgttacgccgggttcagccaagaacaaagtagttttagggcgtttaccgaacggggccttaaagcttagtcccgatgactttgtgaatactatctacaccgtagttaatgacgataccaaaggctcactgccttatctggttgcaaaaagagaaccggctgaccagttctctaataccattactgcaattaattacgatgaacgttattacctcaatgacaaggactttattgatgtgccggttgatgattcaccgatttacattcgatatgaccagctggatattaatctggcacgtttatatcagatgcaaagaggggatttgccaacgactggagaaatcagttttgtagttgaagcaggtgcactagtttcaagttcaagttcttatcgaccggaaaccagatttgtctataaattcgactataactctagtcctgcaaaacgagagtatatcgttccagctgcatcagaattacctgctattgatactggtgagttcccacctgatctcgtggtaaatttgactattaaaggtgctgttgttggacgtggtggagatggcgggttgccacatttggcatttggtgcatggtctaccgatccggattataactttactaaaacccgccgtgacggttttcagggagcacccggtttattaaaccggcacagtaaactaaacctgattattgatggtggaactctggctcgaggcggctcaggtggtggagcaacaccaagcggtatttatacaggattatcgtatggagttcagggtattcccggtggagctggagcaccttttggtcgggttatgaccggacaacctattactaacgattcacaagactggcgttggtacttaaatggtgactttatggttgtcaaagtaaccgatgccgaagcttcggtacccggtaaaggttaccgaacccaaaatgatcgatatggatctccattgtctggtgatggtggaggttggggccagcgcggtaccaagtccaccaatgatggaacatggaactggcaataccatggcacaactgaaggccagccggggccgggtggacctgcaattgttggggtggcaccacttacaactcaattgatcaatggagggaaaattctacaaacactttaa

SEQ ID NO: 69211 - DNA, 1161 bp, Acinetobacter baumannii
atgattgttgaagaacctgttgcaggatcgttcagccattttgcgtataaatactgggggaaatttcccggatttttagctggatggaattattggatgctctatgttctggttgcgatgagtgaactcaccgcggtagccaaatatattaattactggtggcctcatattccagcatggacttctgtcttatttttctttgtcgtgattacggcaattaacctaacaaacgtcaaattttatggtgagtccgaattctggctcgctattattaaagttgctgcggttatctctatgattgtttttggcctttatttgctatttacagcagatgtaggttcaagcatttcgtttagtaacctttggtctcatggtggattttttccaaatggctttagtggcctcttctatatgttggctttcttgatgttcgcctttggtggtattgaactgattggtatggccgcggcagaagcaaaagatccgaaaaaaactattccaaaagcaattaaccaagttgttttccgtatcttgattttctatatcggttcactagcgatcttactttcattagtgccgtggaaccaattagatcttggcggtctcgacaaaagtccatttgttatgatttttagtcaaatgggtattggttgggctgcacacttactgaactttattattttaaccgccgctctctctgtttataacagtgggatgtttgcaaatagccgtatgctttacggtttagctcaacaaggcaatgcaccaaaaattttcaagaaagtaaataaacaaggtgtacctgtaccagcagttttgctatcggcattactcatttttggctgtgttcttttaaattactttgtaccagaagatgctttaagccacttaatgtacattgttgttggagcactggtattgaactgggcgatgatcagtatgactcaccttaagtttaaatcagcaatgaaaaaactcggtcaaaaaactcactttcctgcactttgggcaccgtttagtaactatttggttttaggttttattgctgtagtactctacattatgtggagtcaaggctttaaagaatcagtgatgatgattcctatttggatcgttctcatgtttattttgtttaaagtactcaatgccaaagaacagtaa

SEQ ID NO: 69212 - DNA, 276 bp, Acinetobacter baumannii
  misc_feature (260)..(269): n is a, c, g, or t
atgacaacccttgaacaatcattatctgaaatcactgcattttcgatcattcatgaacatttatttagttcagcgcaaccttctatcgaacaacttaagctcattaaagagtatggttgtagcactgttataaatttagctttatcgaattcaccagatagtattaaaaatgaagatcaggtctgtcttgaatatggtttaaattatattcatattccaattgactgggaaacaccctcttctgaccaatgcttattagnnnnnnnnnngatttga

SEQ ID NO: 69213 - DNA, 1056 bp, Acinetobacter baumannii
atgcaagttgaagctgttgatctgttctgtggtgtagggggacttaccgcaggtttattaaaatctggaattaaagttaaggctggttatgatattgagccagtttgtggttttgcctatgaatttaataataaagctacttttgtgcataaagatgtagccgaagttactggaaaagaaattcaacagtggtattcagatggtgtgattcgtctcttagctgggtgtgcaccgtgtcagcctttttcgacttataatcaaggccgtgatacaagcaatgataaaaaatggcctttactatatcattttgcacgattgatcaaagaagtattaccagagttggtaacaatggaaaatgttcctgatgttattaaacacaaagtttaccatgactttattcaagaattaattgacttaggttatacagtttcggctcaggaagtcgcctgtgtagattatggcgtaccccagacacgccgtcgtcatgttgtgctagcatctagaattggtaggattgggttaatcaaaccaactcataaagatccggttacagtgcaggatgtaataggtgatttagaaccacttgttgcaggacaaaagtctaaagtggatcctttgcatgctgcagcaaaacttagtgatttaaattttcgaagaattaaagcatcaaaacctggaggaacgtggcgtgattggcctgaagaattaagggcggattgtcacaaaaaagattcaggtcgatcttatccgtcagtatatggtcggatggaatgggataagccagcaccaacaatgactacactttgttatggttttggtaatggtagattcgggcatccagagcaagatagagcaattagtttgagagaagcggcgttatttcaaacttttccaataaattatcaatttactaaaacccctgaaaaaataaatttcaaaggggtgggtcgaatgataggaaatgcggtacctgttagattaggtgaggtagttggcaagtcttttatggattctctagatacttttgattttgtaggtagcagtcaatactactaa

SEQ ID NO: 69214 - DNA, 246 bp, Acinetobacter baumannii
atgaataggtttggttttaaagtacgccctttggagggcatgccatttaatccacaacatatactaactattaaaacaaagcgtaatgaactagcacatggggcatttacgtttaatgaagtcagtagaactctagctatcggtgaattgaaaaaacattttgattcaactattaagttattagatggagtatttagtagtattgactgctacctacaaaatcaaaagtatctagagaatccataa

SEQ ID NO: 69215 - DNA, 378 bp, Acinetobacter baumannii
  misc_feature (12)..(21): n is a, c, g, or t
gtgtacaaggcnnnnnnnnnngtacaaggcttcttggctgatttcattgagaaaattgaaccagaatttacccacagagaaaaggaactttacgatattattatgaaaacttttaaatttgttcaaaataattttgaatgtggatttaaaagaagtaaaagtgtttctaatgtttctagggttcgatttgaggcaatttctgttggaattgcgctagcaattcaagaaaatcctactatcgcaataatgaataatattaatattaattgggcatttgaggaggaatttttaacaatgatccgttctgatgctagtaactcaaaaccaaaagttatcacccgaattgagtatgtgaagaataaaatattgggtgtttaa

SEQ ID NO: 69216 - DNA, 756 bp, Acinetobacter baumannii
  misc_feature (727)..(736): n is a, c, g, or t
atgaatatcagcgaattaaacgaggctattgaaaaacaaattgaatctgaaaagaaagaatttgaattcgatattagagaatatcctttacaatttttacaaagccaatttaacccacctgtgggttctggtaaagaagctgacttatatattcctgattatcaacgtgaatttgtctggactgaaaagcaacaatctttatttattgaatctttactaattggcttaccagtaccttatatttttggtgctgatatatctgataatgaagatagtggggatggtcgtgtagaaattatagatggtgctcaacgaatacaaactattgatgcatttattacaaaccaattaattttaagagatatggaaaaaattccattattaaatggaaaaacatttaaagatcttactcaatcaagacaaagacgatttttaagaacaacgattcggatgattgaacttcaaaatatcaatgaagatggacgaagaatgatgttcgatcgtctaaatacaggtgggtccaaattaacagatatggaaaaacgtagaggtgttgcagactctaaatttttacaatttattgataatttagcaaaagaaccactcattattgagttaacgcctttagcgcaaacaaaattaagtcgacgtgaacgtgaagaatatgtactacgtttcttcgcctacttattcaattatcaaaatttcaataaaagtgtacaaggcnnnnnnnnnngtacaaggcttcttggctga

SEQ ID NO: 69217 - DNA, 702 bp, Acinetobacter baumannii
  misc_feature (621)..(630): n is a, c, g, or t
atgaaggactttctcaccaagaaaatgtacgcaactagagctttattttttgctgtaggtgttatggctttgaatgtttcccctattgctatttctactactcatgcagcgacagaacaaaaaatggatatatcgactacactttcattaatttttgcagataaacccatagaagcttctttatttagccctcaatttttagaacaagttcccatcacacaaattcaaaaaatcgttgatgatttaaaagtctctttaggtgctcttaaaaatcttaatgtttcaaatggctctgggactattgatttcgaaaagggagaattacccgtttcaattagcttaaatgagcaaggacaaattagtactctttggtttagcgcgcctcattttaagacaataagcctagacgaaatggttaaaggtctacatgaaaatgcaatcggtaaaacatctcttttagttattgtagataacaagcctgtggttgtagaaaacgataaaacccctatggctgtcggttcgacttttaagttactggttttaaaagcttatgaagatgcgataaaaaaaggcgaattaaaaagagaaactattgtttctttaaaagaaaagaatagctcnnnnnnnnnnagttttacaaaacttgcctgctggtacgcctgtaaatctcgaacttcttgcgcagttaatgatacaaattag

SEQ ID NO: 69218 - DNA, 555 bp, Acinetobacter baumannii
atgatacaaattagcgataatacagcgaccgatagcttgatagaggtattaaagaaacctcgtatagaaacgttgtcacctagaaattctcctctgctgacgacacgagagctatttcaactgattgacccaagtaatgaaaagctcagaaataagtttaaaacaggaacaaagtcggctcgtctagaagcactcgctgaactagacaaactgccgctaccaagtgtgagtagcattggaaaattggctacttggcaagatgctgaatggtatatgtcagcccatgagatttgtcctcttcttgaaagtgttcaagatgctccggctctgaacagttctttaaatccactttttaaaaatttaaattggcaaaagatcggtttcaaaggaggttctgaatacggcgtgattaacttttccgtgattggaaaaactcaaaaaggccataaagtttgtgctgtatttaccgcaaatggaaatgagccacagcctgagtcaaaactagccatattatttacaggcatacttcaagctgttgattttatgaatcattaa

SEQ ID NO: 69219 - DNA, 195 bp, Acinetobacter baumannii
atgttagagagagacggttttatcgaacgaaaaattcaggatacttcccctattcgtgtcgattattccctcacgccacttgggcaaaatgtagctgctatggcatatcagttaaaagaatgggctgaaactaatattgagcaagttttagcagcccaaatcatgtatgacgaaaaaatactagaacaagcttaa

SEQ ID NO: 69220 - DNA, 150 bp, Acinetobacter baumannii
atgggtgggttattgttaagtgggggttgtaaactagaaataggatcaccaataaatattgatgggaagtcatgcctaaataaaatacagcaatatttagctaccccccctctttcaaatgatcagcattatatctctcaaattaaatag

SEQ ID NO: 69221 - DNA, 897 bp, Acinetobacter baumannii
  misc_feature (855)..(864): n is a, c, g, or t
atgacttcaaatataactcaattgaaaaaaataaaagttaatcattttcgtggattaaagaatattgagataaatcttggcgatagattaacagttatttgtggaaaaaatggtacttcaaaatcaacaattttaggaatgattgcgcaaatttttaattttgataaaaatcattttgatggtagtgatattaattttaagacattggctggtaagaattttaaatcgagttttagagaacattttagattttcaaaaacttatgacttacctggtactatggatgtagagtttgaaatctttgatgcatattttaaaaaaataattccagatttaaaattacgtctttatggttctgaagataggcctcaatcaagaccagttgtaagagataatttaaaagttgatgctgaggacaactcgagcagaaacgttactcatcctcttatttatctaagtttaaaaagattaatgccaattgcggagagaagtaaatatagtcttaattcagaagaggtagaatattttacaagaatttctagagagttcactatcactaataatcgcttgttagggaaaattagtggaactactgtatcaaaaacgactggtacaatcgaatctgctgtagttcatggaaataattatgatcatgagtctgtttcggttggagaggataatactggtcaaatcttaatggctcttttttcatttcaaaaattaaaagaagaatatgttgattatcatggtggaattctcctgattgatgaaattgatgcaggcttatttccagctgcacaagtagaattaataaaaattctagaaagttttgctaagagattgaatttacagatnnnnnnnnnntcattctccgatagtaattcaaaatatttttga

SEQ ID NO: 69222 - DNA, 180 bp, Acinetobacter baumannii; identical to SEQ ID NO: 51115

SEQ ID NO: 69223 - DNA, 279 bp, Acinetobacter baumannii
atgcgtatcagcatcaaaaaaccactttctgaaaatgcagtaaagctaatccttaaaaaacttatctcgtttggccctttggctaaccaatcactggaaaactcaattatcggaaattatcagggtgtatttgagcctcgccaaaatcaaattcaggaaaacccacaatctcataacgttcctgaagaaccgggttatttcactcaaatgtacgctgagagcaaccgttcaaacgtgattgacgttacgccagtgtcacaagattttggaggctattaa

SEQ ID NO: 69224 - DNA, 336 bp, Acinetobacter baumannii
atgcttcctccagttcctaaaactaagtcatcagaagtaaccgatattattaactctgctgttcttactggatcgataagtgaatttcagtattttagatgcaaacggttgcttaatgatattaaagaaactgagccactagattggtttttattaagcaacagtattattgaaatgtattttgataatcctattcttgcgcatcaatacgctcgagaagtactgaaaattagcaatagtgtatcaattttatcgaatctttattttgtttttcttagctcagtagattctgtctcttatacacatctgacgctgccgacgatatgcagtgtgtag

SEQ ID NO: 69225 - DNA, 687 bp, Acinetobacter baumannii
atgacagccattacgttggcaacagctttggcacaaaaaggatataaagtagcattggcagattctgacaaccagaaatcttccttacaatggttaaaacaacgtccagataatgtagctgtaattcaaagcctcgactggcgtcaagaaaaatcaattggtgatgcacctaaaaatttagactatttaattattgatgcaccgggtgccctttcaggtgatcatgctgaacaattagtcagcgaagcccatgcgattattactccacttcagccttcatttttcgatatcgacagtacacgacgttttctcaagcatttgcaggatattaagcgtattcgtaaaggtaaagtacaaattttactacttgcaaaccgagttaaaccgaacagcgccagttcaaaagatattcagcaattttttgaaaaaatcgaacatgaacctattgcatggattgccgagcgtagtgcttatggcagtttagcaatgcaaggtttaagtgtatttgataaaccacaaaagaactttattgcaattcaaagccagtggcagcctcttttaaataaactgattgaagataaatctgagtggtttaggtgggcaagatgcagaaatgagcacgcctgcctaaaatttgtctcaggtcatttttcagttaatatgaccttattctattttaaaaattag

SEQ ID NO: 69226 - DNA, 270 bp, Acinetobacter baumannii; identical to SEQ ID NO: 48686

SEQ ID NO: 69227 - DNA, 1827 bp, Acinetobacter baumannii
atggccgttgataatgatccaagcttttcaatgggtaatgtactaaaagcaggcttagcagttttagccgctgaaggtttatatctttgggcatttgataaagatgacaaagatgattcacccagtactcccgatttaatagcacctgctgctcctacagctacgcttgctgatgatactgtgacagtgactggcaaaactgaagcaaatgcaaaaatctacattaaagatgcagcaggtaatacagtggcctcaggtgttgctgatgcgagcggaaattacacgattaaattagataagccgttagtgaatggggataaattaaatgttattgcccaagatgcggctggaaataattctaaagttactgtggtaacaggaacaaaagatacaattgccccagatgttccacaagctcaattgagtgatgatggttccttagtgacaggtaaagcagaagcaaatgcaaaaatcactgtttatgatgccactggcaaagtattaggaactgtttttgcgaataaagatggtatttattctttaaaacttactccaccattaaccagtgaagcgggcggtaaagtggttgccgaagatgctgcgggtaacaaatctgaggaagttaaaattattgcgggtaaagataccataccaccagcatctccttttgttgaagtaaataaagaaggatcggtaatacatggtaaaactgaagcaaatgcaaaagttcaaataaaagatgccgatggtaaagtgattggaagtgggaccgccgatgctcaaggtgaatttcaaattacactttcacctgctttaaaagaggcgcaaaagggcacagtggttgtggaagatgctgctggtaatgtatctaaaccagttgaaattacgccaggctttgactcgattgcaccagataaaccgactgttcaaattaatacagatggtacttctgtaaccggtacggctgaggcaaatgccaaaattgaaattaaagatacaacaggtaaggtaattggtagtggaacagcggatgcgaatggaaaatttacaatttctatttcaccagccttaacggataataaacatgcttcggtatcagctatagataatgctggaaataagtctgaagttgttgatattgtaggtacaaaagatacaacaccaccatcaaaacctatattaaatagcgtagatgatgatgtaggcgctgttaaaggagctataacggctggttctgaaactgacgatgctagaccaaaacttacaggctcaggtgaagcaaatgcaactcttacgatttatgataatggtgttgcaattggagttgtgacggtaacaagtggtagatcttggtcatttacatttgataaagacttagctcttggtaagcatactattactttgactcaaactgatgcggcgggccttaccagtgaggcaagttctccttttaccttttatgtagttgcaccgaaagctgcgagcctgtctgaagcttcagtagatactttaagtacagaagggccatctttggcagatagtgttggattgcatactttaaaggcagcgcaaagtacatcaactgagacgaataacccgcagaaatcggttcctttagatgatttattaaaaagttctacggctagtgaatcagacccaatcgcaaaacttctctcatcaacagcgttaaaaacgactcaggcatctgagccaatcgaagtaaatgcatcagttggtcagacaacatcaaatcctgatcatcctttacctgatacaacttcttcggttttacaaaaccttttagatcaaacttatccagttgtttag

SEQ ID NO: 69228 - DNA, 1185 bp, Acinetobacter baumannii
  misc_feature (40)..(49): n is a, c, g, or t
atgcacgtcgtaccgaatttgttgaatctcgtattgattnnnnnnnnnnctcgtgttgatttctgccgtgaagatttaattccagaagaacaagtggtattaacggtttcgcaaacgggctatgcaaaaactcaaccactttcagactatcaggcacagcgccgtggtggacgtggtaagtctgcaacctctatgaaagatgatgactttattcaacatctgattgtggcatcgaaccacgcgaccgtactttgctttaccaacgtgggtaaagtgtaccgtttgaaagtatttgaggttcctcaagcatcacgtggggcaaaaggccgtccaatcgtgaacttgttacctctagatgcaacagaaaccgtaactgcaatcttgccattaaccgagttcccggaaaaccactatgtgtttatggcgacagcttctggtacggttaagcgtgttgagttagaacaatttgcaaacattcgttcaaatggtctacgtgctattgaacttaatgaagaagataccttaattggtgttgcgattactgatggtaatcagcaaatcatgttgttctctaacgaaggtaaagcaattcgttttgctgaaactgacgtacgtgcaatgggtcgtacagcgaaaggtgtacgtggtatgcgtgtaagctttgcaagcagcaccttaagtgaagaagatgcagatgtagaaaatgatgattcagatgataatgatgattcagcagattcaagtctagtaagtcgcatcgtatcgcttgttgttgtgcctgagacaggtgaagtactgtgtgcgagtgccaacggctatggtaaacgtactccagtaaatgacttcccgaccaagaaacgtggtggtaagggtgttattgcgatcaagacaagtgaacgtaacggtgagctagttggtgcagtttctattgatgaaaccaaagagttattattaatttctgatggtggtacgcttgttcgtacgcgtgctgcagaagttgcaatgacaggccgtaatgctcaaggtgttcgtctgatccgtttaagcgaagaagaaacgcttgttggcgtagtttcaattgaagctgtagaagacgaagaagaacttcttgaaggtgaagtagatacgactgaaactgatagcgaagaagctgtatctaataatgaagatacttctgaagagtaa

SEQ ID NO: 69229 - DNA, 243 bp, Acinetobacter baumannii
atgcttaaaagaaaagatttaaaattaataaaggttggaactggtgaggaagcggttctaaagcagtgcacagttcaacctaatttaatccacagtaaagatataaaaacacctgttgagaaaggggatattttagagcatccacttccaagtggtttgcttgaaaagtatcttgtgaaacgcgttgatgcattcactaacatgcttcctcattatgaacttcaggtagaaagaatagattaa

SEQ ID NO: 69230 - DNA, 522 bp, Acinetobacter baumannii
atgagctatatatttttatgggctatgaaaactgaaaaatactatggaagagctagcagatacatcacatcagaattaaataaaatcaatgatttaaaattatattacaatgaaactcataaagttcatgatatagattttcatgagcgcaaccttaaatactacttggataagctggaaagcaggtctgactggattagagggatattaatattcatctcacttattacattgatgcaatttatagttgttatttacgcagcatttgatcagaagtatcttagttcaagccaagcaaatctacttgtaacctcttttataatatttatatctagttcattttacctattatgggaatacaaaaatttccaaaaaaataaatacgaagccctaaaattattcctaatggtaagacaacacaattttaaaaaaatacgtgatgaacacgaggctaaattgaatccaaaacaaaaatatgaaaaaggaagccctatggactacctatttggcgatgatgactaa

SEQ ID NO: 69231 - DNA, 501 bp, Acinetobacter baumannii
atgagtacgcttatttacccaagtttaaacttaaaagattctcactttaaagcatttaaaatatcagatgattttattccacaaatgcaaattcatacgttcaaatcagagctttttttgaaagaagttgatgaatatttaagtttatatcctcacactcagcacattgatatttgtctacatgacttaaacgggcatattcgtggcaaacgaattgacgttaagagcctcaaaaatctatctaatggatgttattttcctctttctgtttatgccatgagccttgatggaaaagtgattgaagaaacaggactgggaaaatatattggtgaaccagatagactttgcctgcccattttaggcagcttgcaacccaatgccttatccccagaattaaatgctcagctttacctatccatgcaagaagaagatggttcagactgtcgctatgaaccacgcaatatattaaaaaaattatttttcaagctaatttataagtaa

SEQ ID NO: 69232 - DNA, 339 bp, Acinetobacter baumannii
atggtatataaaattttaataaattatggttttactcctaatatacaaaaaacaaaaataatctctcctaaagctaaaaaaatagttttaggtttaaatgttgatagagaaaaagtaaagttagataaaaaatttaaaaacaaaattaatcaaaacatttatttttgtttacatcctgatattggtccggtacgacaagctaaatataaaaaattctcttctgttcttggttttaaaaatcatttgcatggattaataatatatgctctatcgatagataaagagtttggcgaaaaagctttaaataattataataaaatcgtatggccaatacattaa

SEQ ID NO: 69233 - DNA, 357 bp, Acinetobacter baumannii
atggatatacaaattaaaagaatttatgacgatgtaagcggtgatgacggtaagcgaattttagttgatcgactatggagtcgagggattagcaaagaaaatgctcatttagatgtatggttaaaagaaatagctccttcaactgaacttcgtaagtggtttcatgcagagtctgcagaacattgggatgagttcaaacaacgttatttaaaagaactagaaaccaaccctgcagttaaagagttattagaaatcgtttcacatcataaagtcacacttttatattcggctaaagatgtggaacataaccatgcgattattttaaaagaatacttattagaaaagagcaaaagttaa

SEQ ID NO: 69234 - DNA, 288 bp, Acinetobacter baumannii
  misc_feature (265)..(274): n is a, c, g, or t
atgtctgaaaaaatcgaaatcgaaaaatttttaggtttagctaaacctgtaattccacttgagcgtggtcagcttgtagcgttgcatcatgactatagtgttatagctgctgaaaaatttatggatgctcgcttccgtcctcatggtgaatttactacaccaacatttaacgactttaaagattttgtagttgcagaaggcggtaaaaatacaccaatttttgttaatcaaaatgacatgaaagctattgcagttcttaacttcnnnnnnnnnnaacttccatggtga

SEQ ID NO: 69235 - DNA, 477 bp, Acinetobacter baumannii
atgcagcttgcttacgagcaagctgaattagcagccgagcagggggaaatccctgtaggagctgtaatcgtgagccaaaataagttaattggagctggttttaatgctccaattggtttatctgatcctacagctcatgcagaaattcaagctattcgtgcggcttgtgagtcattgaaaaattatcgtttacctgaagatgcgactttgtacgttacgcttgagccgtgcacaatgtgtgtgggagcattagtacatgcaagaattaaacatgtcgtatttggaacaacagaacctaaagctggctcactcgtgagtgcacgtcaattattagaaaatggttattacaaccataaatttacttttgagcatggatgtttacatgaaaaatgtgctcaacagttaagtcttttttttaagcaaagacgtgaacaaaagaaacaagagaaacaacaaaaaacgtccttaaatgattaa

SEQ ID NO: 69236 - DNA, 282 bp, Acinetobacter baumannii
  misc_feature (180)..(189): n is a, c, g, or t
atggcttttccacatcatacagagcatcatgccattcagcgctcaggttggctaagagcctcagtattaggcgctaatgatggcattatttcagtgactagcttaattatggggatggctgcaagtggggcaagctcacatactctatttatcacttgtgttgctggactcatttcaggnnnnnnnnnngtgttgctggactcaattcaggcgcaacctcaatggctgccggagaatatatttcggttaaatctcaagaagatattgaaaaatcagatttag

SEQ ID NO: 69237 - DNA, 147 bp, Acinetobacter baumannii
atggctccaattgatatcctgtttttatttggctttttaggtatttggattccacaagcattttgggcatggttaagctatcaagcgtggaagtattccaataccagaaagatggccagtcttaagtgttttgatccctgcttataa

SEQ ID NO: 69238 - DNA, 558 bp, Acinetobacter baumannii
  misc_feature (542)..(551): n is a, c, g, or t
atgtctcatcaatcagacttaatcagccaagacattctggcgtatttaaaacaacatgaacaaaaagaccttttgcgctttttgacttgcggtaacgtagatgatggtaaaagtaccttaattggtcgtttactttacgattcaaaattgatttatgaagatcaattgcaagctgtaacacgtgacagtaagaaagtgggcacaacaggtgatgcaccggacttggcattacttgtagatggtttgcaggctgagcgtgagcagggtattaccattgatgttgcttatcgctatttttcgactgaaaaacgtaagtttattattgctgatacaccgggccatgaacaatacactcgtaacatggcaacaggtgcatcgactgctgatcttgcaatcatcctaatcgatgcgcgctatggtgtacaaactcaaactcgtcgtcatacgtttattgcgagtttgcttggaattaaaaatattgttgttgccattaataaaatggacttggttgaatattcatctgaacgttttaatgaaattcnnnnnnnnnnaggttga

SEQ ID NO: 69239 - DNA, 345 bp, Acinetobacter baumannii
atgatcaacgatgatcaaaacaaaacgacttctcttagtttagaacaaattcgcgaagatattgatagcgtagatcaacagattcaagagttattaaatcgccgcgcaagccttgctgaagatgttgcgaaagctaaatttgcttctgaagagaatcctttgttttatcgtcctgaacgtgaagcacaagttttacgtaaagttatggagcgcaatcaagggcctttatctgacgtaactatggcccgtttgttccgtgaaattatgtctgcttgccttgctttagaagctccgcaaagtatgttcgtccgctaccaactattgatgaagtattccgtgaagtag

SEQ ID NO: 69240 - DNA, 597 bp, Acinetobacter baumannii
gtgattggtgaagttgaattgcgtattcatcatcaattccttgtttctgaaaatacacgtaaagatagtattaagcagatttatgcgcatcagcaaactttggctcaatgtcgtcagtggttagacgcacattatccgggtgttgagcgtgttgccttaaactcaaatgcagaagctgcacgccgtattcgcaacgaatggcactcagcagcgattgcgtctgatattgcagcaggcatgtataaccttgaaatcttgcatagcaatattgaagataatccggaaaatactactcgtttcttagtgattggccgtgaaaaaattccacaaagtggcaatgacaaaacatcgttattaatttcagcgcatgaccgtgcaggtgctttattagaaattttagcgccgtttgcaaaacataatatcagcttaacgagcattgaaactcgcccagcactacctgaaaaatgggcatatgtattctttattgacttagaaggtcatatcgatcaggaaaatgtggctgcggcaatcaatgagattcgtccaatggtaaaagaacttcgtattttaggttcttatcctgctgccgttctttaa

SEQ ID NO: 69241 - DNA, 2271 bp, Acinetobacter baumannii
ttgagcaaaagcaaagttgaagttatgtcacaacccctatttaaaaaagttgcatttattggtttaggactcattgggtcgagtttggcacgggttattgttgccgaaaagttggcgacaactatagtggcatctacacgctcacagaaaactttagaagatgcaaaatcacttggcttaatacaagaagggttttccgatcctgttgaagccgtgaaaggggcagatttagttgttttagccttgccagtgcgtgccactcaaaaagtgcttgagcaaattaaaccttatttgtcagaaaccacaattgtaactgatgtgggaagtacaaaaggtaatgtcgtagatgcagcaaaagctgtatttggtgaagatttaccagcagggtttgttcccgggcatcctattgcgggaagtgaacacacgggtgttcacgcaggtaaggtcgatctctttgcaaatcacaaagtgattttgacgccattaccaacaagtgcagaatgggcagttgagaaattgattcaactttggtcagctgctaaagctgaagtgatatgtatggatgtcgccaaacatgatgaggttttggcgcataccagtcatttaccgcacttaatggcatttaatctggtcgagcaacttgcaaaccgtgaagataaccttgatattttccgttatgcagctggtggtttccgtgacttttcacgaattgctgccagtgatcctcaaatgtggcatgacattttctttgccaataaaacagctatattaaatgctgtagatggcttcgagaaacaacttaccgtacttagaaaattgattgaaaacgaagattctcatgcattaatgggtttactcggccatgctcaggcagcacgtcagcatttcaatcatatgttagccaaaaaacctttaatggagaaaaataaggtgacacagcaattcagtatcttaccgggaaataaggcttttaaaggtaaatttaccgtaccgggtgacaaatctgtgtcacatcgctccattatgtttggtgctattgccgaaggcacgactcatgtaactggcttccttgaaggtgaagatgctttagcaactttacaagctttccgtgatatgggtgtaagcattgaaggccctaaaaatggtgaagtgaccattcatggcgtgggtatgtatggcttaaaagcaccagcaagtgccttatatatgggtaactctggaacaagcatgcgtttgctttcaggtatgctttctgcacaaaagtttgattctgttatgacaggtgatgcttcgctctctaaacgtccaatggagcgtattgctaaaccattacgtttaatgggtgcgcaaatccaaacgacaggtgagaaaggtacaccacctgtaagcattactggtggtcagcaattaaaaggtattcaatatgatttacctatggcatctgctcaagtgaaatctggtattttactagctggtttatgggctgaaggtgaaacttcggtaactgagccggaaccaacacgtgatcatacagagcgtatgcttcgtgcatttggctatgatgttaaaactgaaggcaataaaatttcccttgtcggcggcggtaagttagtgggtactaatattcaagtaccatctgatatttcatctgctgctttcttcatggtgggcgctgcaattactgaaggtgcagacgttgtacttgaagctgtaggtattaatccaacacgtactggcgtaattgaaattttaaaacagatgggtgctgacctgactgttgaaaatgagcggatcgctggtggagagcctattgctgatattcatattaaaggttcacgtacccttaaaggtattcatatgcctgaagaccaagtacctttagcaattgatgaattcccagccttatttattgcagcggcttgtgccgaaggccaaacagtattaacaggtgcagcagagcttcgcgtgaaagaatctgaccgtattcaagttatggcagatggtttaaaaatcatgggcattgattgcacacctactgaagatggcatcattatcgaaggtaaaggcaaatctggtgattggtcaccaatctttgctggtggtgaaattgaatcacaccatgaccaccgtattgcgatgagttttagtatggcaggtcttcgtacttctggtccgattacaattcacggtactgagactgttgctacaagtttcccaacttttactgagttggcgaatcgtgcaggcttaacgatagaagttagccaataa

SEQ ID NO: 69242 - DNA, 384 bp, Acinetobacter baumannii
atgaaaaaattacaatttattgccagttgcccacaacatggggtgcttgatcatccaccaaatgaatgccatatcactcaagaatatgtagcggctttactgtttaaacaattggggaattatggttttgatgcacagcatattgtgcatgaacatgaaaaggtggaagtaagtattgataatcaccttttaccattgtctattacttgccagcaaacagaccatgatgggcatttaatgtgtgaaatctctgccaatcctgatgaagaacaagactggtttgagaaaatcgaaacacaaagtattattcgtcagcttgcacaggctgttgaaaatagcttgaaagccgatcatagcttttcagcatttgagtggaaaagctaa

SEQ ID NO: 69243 - DNA, 1461 bp, Acinetobacter baumannii
atgacacaagttgatattgcagcattatctcctcaagtcgtttggcagcattttcaaacactttgtactattcctcgtccgtcaaagcatgaacagcagcttcgtgagtttttagaaaactgggccgaaagtcggaatttagaaacttatgtagatgaagtaggaaacttgattatccgtaaaaatgcgactctgggtaaagaacatgtgcctggagttattcttcagggccatttagatatggttacacaagccaatactggtacggtacatgacttctttaaagacccgattcgtccagttcttgaggatggctggttaattgccaaagacactactttaggtgctgataatggtattggggtggctttggcattagctgttttagattcaaatgatattgctcatggcccaatagaagttctcttaacagtcgatgaagaagcagggatgagtggtgcgcggctattacaggcgggtgtactaaaaggaaaatggctatttaatattgatacggaagagtggggtgagttgtatttagggtgtgctggtagtattgatgttgaggtagagcagccgcttaattatgagccaatccctgaaaatttgaatattgtgaatattcaggtgactggtcttaaaggtggtcactctggcgtagatattcatttaggacgtggcaatgccaacgttattttggctcgctttttaaatcaacatttagcctcactgggtgggcatcttgttgagtttacaggtggtacggcccgtaatgctttaccgcgagaagcagtggcaactattgcaatttcgcctaatcagttatcaagtctagaaaagttacttgctgaatatcaagcggcatggaaagaacagctaaagggtattgatgacaacttgcaattaagtattcaatccactggtgctaaagtgaccgaagtgattaatcaacaacagcaaaatgaatggttgcaagctttagcaacaagtccttatggcgttgcaagtatgagtcaggttctatcagatgtagttgaaacctcaaataacattggggtggtgagactaaatcgagaaggtggaaaagctgtcttaatggttcgttcaatggtgaaccaagaagctcaagattttgccgaaaaaattcaggcccattttagccaatttaatatcggctctacacttacgccgttagtgtcgggttggacaccaaatccagattcggctgctctaaagtgcttacaacaagcttatcaaaatgcatttaatattgagccaaatctaaaagtaattcatgcaggcttagaatgtgggattattgctgaacattacccacatttacagatggtttcgtttggaccggatattcagggggcacatgcaccgggtgaacgagtcaaagttgatactgtagagaaatgctggaagctactgataaccgctttggcatctgtagagtaa

SEQ ID NO: 69244 - DNA, 957 bp, Acinetobacter baumannii
atgcttcattttacctttttaggcacatcatcaggtgtacccacgctttcacgcaatgtttcaggattagctgttcgtaacagtaaaaataaggactggattttagttgatactggtgaaggtacacagcatcgtattcagcaagctagactctcactacaaaacttaattgccatttgtattacacacgttcacggcgatcattgttatggcctagttggtttactggcaagtgcaggcatgaatgctcgtaacaaacccctaatcgtgattgcgcccaaagaaattcaacaatggtttgaaatcactgctcaacttacagacttacatttgccttattcaataaaatttattgatgttaatgaagcaactcggccacagcagctcaccgatgaactctttattcaagcacatccactaagtcatcgtgttccgagttttgcatttagtatttatataaaatccacccagaagaagatagatattcaagctttaactcagcttggcatacctaaaggcgatatttgggggcatttaaaacgaggctacgatgtagagtttgaagggcaaattttaaaatctcaagactttatcaaaattcaaaatcagcagattcatgcaattataggtggtgataatgatcggccagaattattagccgatgcttgtaaggatgctcaattacttattcatgaagcaacttatttgcaaacagtcttagataaagtaggtaaaggaccaatgcacagctcagcaaaaatggtggctgaatttgctgagcagcaatctctagacaatttaattctgacacactttagccctagacatcaggataaaactgggcagcaagctattaccgaagaagttcgccagttttataaaggtcatttttatttagcgaatgattttgatgaatttactttaaatgaaacaggacaacttttaaaaatcgagtaa

SEQ ID NO: 69245 - DNA, 633 bp, Acinetobacter baumannii
atgtctgagcaaattttcatccagggtccagtaggtaaaattgaactttttgttgaccgccctgaaggtgaaatcaaaggctttgcagttgtttgtcaccctcacccattacaaggtggaactcctcaacataaagtccctgctcttttaacccaaatctttaatgaatatggctgtattgtttaccgtcctagtttccgtggtttaggcggcagtgaaggtgttcatgatgaaggtcatggagaaactgaagatattttagctgtgattgagcatgttcgtaagcttcatgcaggtttgccattttatgcaggtggctttagttttggctcacatgttttagcaaaatgtcatgcgcagcttagccctgaattacagccagtacagttaattttatgtggtttaccaacagctactgttgtgggcttacgtcactataaaactcctgaaattcaaggcgacattctactcattcatggtgagcaagatgatatcaccttactttcagatgcaattgagtgggcaaaaccacaaaagcatccaatcacgattttaccgggcgctaaccacttctttacaggttatttaaaacagcttcgccaaatcattacacgttttattattatgaaataa

SEQ ID NO: 69246 - DNA, 774 bp, Acinetobacter baumannii
atgcttgctttaatttctcctgcaaaaactttagattatgaaacagcgttacctacagatgagtttactcagccgcgcttgttagaaaactcagcacaattaattgatgtttgtcgcaaactttctgcttcggaaattgcgagtctaatgagtgtcagtgaaaaaattgccacacttaatgctgatcgttttagagactggaagccagaatttgatttttcaaatgcccgtcaggcaatttatgcatttaaaggagatgtttatactggtttagatgcttatcacttaaaagataaagatattgattttgctcagcagcatttgcgtatgctctctggtttatatggtttattgcgtcctttagatttaatgatgccttatcgtttagagatgggtactaaattaaaaaatacgcgcggtcacaatttgtatgaattttgggatgatattatcaccaatcagattaatgaagacttggcagcaattaaatctgaattgctggtaaatctggcttcagatgaatattacaaatctgtcaatgaaaagaaaattaaggctgaaattgtgaagcctgttttccttgaccagaaaaatggcaaatataaagtcattagtttctatgcgaaaaaagcacgtggtttaatggctcgttttattattgaaaaccaattaaataaagctgaggatcttaaagcttttaatactgaaggttactactttgatgctgataactcatcggcaaaagagttggtgtttaaacgtgatgagcaataa

SEQ ID NO: 69247 - DNA, 624 bp, Acinetobacter baumannii
atgctgatgcagctttacttattaaaactggaacttttttggtttgaactgcatcagcattatcatttttctgaaccgcagaaaattttaaatgaacttattgctgcttatagtgaaaagcagcgagcctaccacaccgtacaacatttatatgaatgtttgagtttaattgagacgattcagtccgaattaaatgatccatatgctgttgcattggctctctggttccatgatgtagtctacgaacctcaagcgctagataatgaacttaaaagtgccgagttatttgagcaattaatggctcaagatttacagctcgatacaatgcagaaaataaagcgttggattcttgcgactcaaaagcatgcaccaaccggtgaaacagatttgcaatttttgttagatatcgatttagctattttggcagcaacacctgaacgttttatccagtatgaacagcaaattcagcaggagtattcttgggttgattcagaagtatattcaattaagcgaaaagaagttttaatgaatttttatcagtctgagccgctttatcaaactgcatatttccaaaagaattttgagttaaacgccaagcaaaatttaaagaaaatattgcaatag

SEQ ID NO: 69248 - DNA, 474 bp, Acinetobacter baumannii
gtgttgggtgatgaaaaaaccttatatccaaatgtaaccgagactttaaaagccgctcgcactttgattgatgatggttttgagattatggtctatacctctgacgacccaatcattgctcaagaacttgaaagtatgggctgtgttgcaattatgcctttaggtagtttgattggttcaggcctaggtattttaaacccgcataccatttcaattattaaagaaaatgccaaagtaccggttttagtagatgcaggtgttggtacagcaagtgacgctgctattgcgatggaacttggttgtgatggcgtattgatgaacacagcgattgcagcggctcaaaatcctattttgatggcttctgcaatgaagaaagctgttgaagcaggacgtgaagcatttttagctgggcgtatgccacgcaaacgcatggcaaatgcaagttcaccagaaacaggttatttctttaaataa

SEQ ID NO: 69249 - DNA, 198 bp, Acinetobacter baumannii
atgatgaataaaatgatgggcggcatgggtggtgcaggtgctggtcaaaacccatttgcagatttaatgcgtcaaatgcaggatatgcagaatcaacaaggtggtggtagccaatatcatgattctagtattattgatggcgaagcgagagaagttactccagaccacaagaaaattgagcataaaaataaagattaa

SEQ ID NO: 69250 - DNA, 228 bp, Acinetobacter baumannii
gtggctgcaaatatctataaagccattgagcggcaagcgattcctcatgcagcttctttagtgtcgaagtatgtcactatcagtttagggtttaccgtatatacgggtgggctaaagatgggacaagataggcttattcatgcggcagatcaggctttatatcgggcaaaacagcttggtcgtaatcaaatttattatcagccattacaggtcgccgaaattgcctaa

SEQ ID NO: 69251 - DNA, 273 bp, Acinetobacter baumannii
atgacggtacgtccaattttatttaattcagaaatggttagggccattttaaatggatctaagacgcaaacacgccgaattattaagagtaaagttcaaaaaaaaattgatatagctgaacatcttggagagttctttggtttagaagattctaaatcacaaatatcttcttattttcagaaaatttgtccttttggagcaattggcgaccagctttttgtaagccatcttctcgtatgcctcgtaaagcatcacgtgttttgcttgaaatag

SEQ ID NO: 69252 - DNA, 324 bp, Acinetobacter baumannii
  misc_feature (310)..(319): n is a, c, g, or t
atgagccagattgtatatagagaagacaatttcattggggaacttttaatggaaaagttcgtcttcaaaaaaaaaggtgaatataagtcagactgggctttagcttatgttgatccaaataatttatatagtgctggcggtggacgtctaacagtcgttttaagtagttttaccggttccgctttcttttctcatgttggtcaaccaacttttaaagagttcattgcccaatgccatgctccttatttacttaataaactttttcctaaaattgaaaagtgggtagatgttgaggatggtaatgaagtannnnnnnnnnattga

SEQ ID NO: 69253 - DNA, 228 bp, Acinetobacter baumannii
gtgactttccgtgtaatggggaaaaattacgatgcggcagtattggcagcaggtcactgtggtttcggtatgggggctacaccaaccgccgttgcaaatatgcaggcgattaccaatatgtatggtccatcgcataaagcattcttaattgttccgctttgtggtgcattctttgttgacttgattaatgcaactgtcattcagctcatgctgaaatttattgcttaa

SEQ ID NO: 69254 - DNA, 315 bp, Acinetobacter baumannii
atggctcgcaagattaaatactcggaagaaatttggaaccggctaaaagaagtctatgaatcttcacctaagattacatggcaagctttagttgatcaggttggcgaagaactcggttgtgagatgccttcgccatctgttgtgcgccgtaaagcacttgcagagaaatggaaaaagaaagctaaatctctagtcaaaaagacagcccaagagctcaataaagagattaaaaaattgaccaaaaaaaacaatggtactctaaaaataatggtcataacaacggcgggcgttctacagtcaatgagaactatctaa

SEQ ID NO: 69255 - DNA, 240 bp, Acinetobacter baumannii
  misc_feature (204)..(213): n is a, c, g, or t
atgacacgtcctcaattgaacctcaaaaagaaaataggcttagttttattaagatttgtagccttgcattggatttcgtttcctattcttccttttctagatattccttataaagcagccgtgatcacaggactgatggtactaggagattttctatttttaattgcaattgctctattaagtaaggaatattgggctaagatnnnnnnnnnnagaaaagtaaaacccgaagaaaattaa

SEQ ID NO: 69256 - DNA, 267 bp, Acinetobacter baumannii
  misc_feature (200)..(209): n is a, c, g, or t
atgacaacaacagcttatgatactcatttcatggcttccgacatagcctttacagtaaatcgtacagaagttactctaaatattccttttaggaaagtgaaacgtttgggcgatattgtatttggtatggctggatgtttattttgtatgagagattttagcgaggcccttattgattttatcttacaaaataaaacacnnnnnnnnnncaatttgagcttccgagatctatacttgaaaaaacaaatagtgattttattgcactaa

SEQ ID NO: 69257 - DNA, 273 bp, Acinetobacter baumannii
atggtgttcggcttttggaaaaataaagacctcaaagttagcatgtggagccgcttaattgctccaactatttcaagcataggaatggcttttattctttatcttgtgattaagaatttagatatcatgagtggtagtaatagtccgactatttatattatgcctatagttttatttataagtattattgctgggttagtgactggtgctttcctaaagaaaaaacatattgatctttataataatatttatagtttagttaaaagagtttaa

SEQ ID NO: 69258 - DNA, 375 bp, Acinetobacter baumannii
atgaataatggaaataatctgaaaaaaggcagtctaggactatggacggtcgtattttttgttgttgcagctgcatctccattgactggagtcgtgggtgcaatgcctttaaattttatgttaggaaatggagcaggcgtacccggctctttcattgtagctgctttactactgattattttcagttttggttttatagctatgagtaaatatgtcgtcaatgctggggctttttatacgtacattgtacaaggtttaggtgttggaccaggcatttcgggtttaagttttggcatatacggcaattcaactatcagtgacagccatgtttggcttctttactcaacacttggtcgtttctcacttgggaattga

SEQ ID NO: 69259 - DNA, 1674 bp, Acinetobacter baumannii
atggcgagtccggcacaaatcattcgacataaatttctcaatacattcttttcacgccactctatttggttcttgtgtatttttactgcactcacaatcacgtggtttagaaccgtatatacacctcatagtatttattattttatttcggatactttactcaacggtttatgggtcgtcagtggcgcattaagcttattaggtctatatgatgtcttacaaaatagacattcaatcttaagaaattacccgattatgggccatttccgttttttatttgaagatatacgccctgaaattcgccaatactttattgaagcggatcaagatgcccttcctttctcacgtatgcaaagaagtttggtttatcaacgtgctaaaaatgagaatgcagataaaccttttggatcaattattgatgtctaccaagaagattatcgctttattgttcattccatcagtccatgtccaccagcggatcctaagagtttccgtatccaaattggtaatgcccaatgccttcaaccttatagtgcatccattatgaatatctctgccatgagctttggtagtttaagtgcgaatgcaatacgtgcattaaacaaaggagcacaattaggcggtttttatcacgataccggtgaaggtagtctcagcccttatcatttagaaaatggtggtgatattgtttggcaaattgccagtggatattttggctgccgaactttagatggaaaatttgatgaacagaagtttgctaagcagtctcaattgccacaaatcaaaatgattgagcttaagctttcgcaaggggctaaaccgggccatggcggtattttacctaaacataagattactgctgaaattgccgagatccgtggtgtttcccgtgaccatgattgtatctctcctgcgaagcattcaagcttttcgacaccaattgaaatgatgcatttcttacagaagttacgaactttatctggtggtaaaccggtaggtttcaaactgtgtattggtcaaccttggcagtttatgagtattgtaaaagcaatgcttgaaacaaaaattgtgcctgattttattgtagttgatggttctgaaggtggcactggcgcagcccctattgagtttagtgactatatcggaacaccattacgtgaaggcctacgttttgttcataacacacttgtaggtgctggcctaagagatcaagttaaaattggtgcaagcggtaaaattattagtgcatttgatattgccagcacatttgcactcggtgcagattgggtgaactcagcacgtggctttatgtttgcagttggatgtattcaagcgcaaagttgccatacaaaccaatgtcctgtaggcattgcaacccaagataaagatcgccagaaagcactccatgtaccgaccaaagcagaacgtgtatttaatttccacaaaaatacattacatgcattatcagaaatgattgctgcggcaggtttacgtcatccatcggatattaaagctcatcatttagctcaacggattaatgaccgtgaaattaaaaactatgctcaattacacttcttcttaaaagaaggtgagcttttacaatctgaactgaaaaatgatgatgataatttctattatcgtatgtggaatatggctgacgccaatcatttttaa

SEQ ID NO: 69260 - DNA, 498 bp, Acinetobacter baumannii
atggctgcgcttgttgctgtcatgattatggtatcaataagtacttttgagtggcgttcacttacccaatttaaaactaatcctaaaagtagcaataccgttatgattgcaacggttgttgtagttgtagctactcacaatctagcattaggcgtattgacaggtgtactactctccgcgcttttcttagccaataaacttgaaaatgatatacaggtaataagttcattagaaggcaacgctcgtttatatgatttaagaggacaaatcttttttagttcttcagataaattcatgcacggctttaactttaaagaagaagtaaaagaagtcattattgatctgactcattcacatatttgggatgtcacttcggttgcaatgcttgattcagcagtagaaaagttccaaaagaatggcatacaagttactgtacgtggtttaaatgaagccagttcaatcatgattgacaagtatggtacacatgcaaaaatttaa

SEQ ID NO: 69261 - DNA, 162 bp, Acinetobacter baumannii
atggcaaccccgcatgttgctggtgtagttgctgaaatgcttcaaagtacacctacggcttcacctcaaacgatctctaccaatcttttaaatcaagcgagcagtaacgtagtaaaaaacccttcaggtagcccaaaccgtttgttatataaatctccttaa

SEQ ID NO: 69262 - DNA, 666 bp, Acinetobacter baumannii
atgttaaaaacaattaagttgtacggcatcttggggcaaaaattcggtcgtgaatttaagctcgatgtcgcaaatacacgtgaagccatgcgtgcattatctgttcagatcgctggctttgaacactttatgttgcatgcacatgagcagggcctacgctttgccgtatttttaaaatcaaagaactcaagtaataagcgaggcaagaaacgcccagcaatttacgatcatgaaactaagcgtctaatcactggtgacaatatcggtgaagaacagcttgatatgaatactgaagctgaggttattcatattgttccacgtgtagttggtgcaggcggtaatggaatattacagactgttttaggtgctgtgatggtcgtggtgggagtcttagtaactgtaggcacattaggcggtggagcaccactcggtgctgcattgattggttcaggtattggaatgatgcttggtggtgtggctatgatgcttatgccgaaggttgatactactcaagaccaaaaccaagatggaaacagagcgaataaaggctttggcggtgcagttaccacagttgcacaaggtaatcctgttccaattctttatggtcaacgggaaatcggcggcttcattgtgagcgcaggtcaatatcctgaagatcagatgtaa

SEQ ID NO: 69263 - DNA, 426 bp, Acinetobacter baumannii
ttggatcaatggttcgattattccgaaggaaagttaaattatcgtactttaaaatttgaaaaaaattattcggagggtgattatcaaggaaatgctgtcatcaattatggtgatgaacatgtaccttatactagaatttctgaacataaacattttgctccttgggaaacacatgagcaaactatttatttcaaagaatatagtgcagattgtaccgatgatgatatcccttactatcctgtacgattagctgatgataaaacagttttagataaatatttggccttggcaaaggtagaaaagaaagtaacatttgctggtcgcttaggaacttatagttatatggatatggatgtgactatcagacaggctttagatatatcaaaagagcttattaataaagctcattcttttgatcattcctaa

SEQ ID NO: 69264 - DNA, 513 bp, Acinetobacter baumannii
  misc_feature (471)..(480): n is a, c, g, or t
atggccttattggtaggctgtaatgataacgatgacaatgattcaagcacaccagcaccgcgaagtaaccaaactgtaaatattttagctttcaatgactttcatggaaatttagaaccacctaaacgttacgttgaagcagcgaatccaaatgatgcaactcaaactgtacgtattcctgtcggtggtgtgagttactttgcagatgcaattaagaaacttaaagctcaaaatcccaataatgctgttgtgtcagcaggtgacttaattagtgcttccccgctcacttcttcgttatttctagatgagcctactattgaagtcatgaatgatattcaaattgactttaatgcggttggaaatcatgagtttgaccgtggtacagatgaattgcgtcgtttacaaaatggcggttgtcaacaatataccagcactgccccatgccaaattaataaaaactttagcggcgcnnnnnnnnnnaattcaatttccttgcagctaacgtggcaatga

SEQ ID NO: 69265 - DNA, 306 bp, Acinetobacter baumannii
  misc_feature (278)..(287): n is a, c, g, or t
atgaaaaaaatcgtaatcactaacgaaaagggtgggattggcaaaacctctgttgctgttcatttggcacattactgttatgagcgcggtatgcgtgttctatttgtagacatggataaacaaggtaatagtggtttctcacttagtaaagttgcggttgagattaaagatacccatagtctatttgcggatatccaaaactttgaaactttagataaatattttgttctttttaaaggtaataagagtttaaaatcactttttgatcctacagaacnnnnnnnnnnctacagaacaagagtttaa

SEQ ID NO: 69266 - DNA, 345 bp, Acinetobacter baumannii; identical to SEQ ID NO: 51456

SEQ ID NO: 69267 - DNA, 666 bp, Acinetobacter baumannii; identical to SEQ ID NO: 69262

SEQ ID NO: 69268 - DNA, 654 bp, Acinetobacter baumannii
atgttaaaaacaattaagttgtacggcatcttggggcaaaaattcggtcgtgaatttaagctcgatgttgccaatacgcgcgaagctatgcgggctttatcagttcagattgtaggttttgagcaatatatgttgaccgctcataagcaaggcttggcatttgcaatctttctgcgaagtaaaaatgcaagtaaaaagcgcggtaagaagcgcccagctgtttatgaccatgaaacaaaacggttaatcactggtgacaatattggtgagcagcaactagacatgcatactgaagcagacactattcatatcgtcccgcgtgtaatgggggctggtggcaataatgggattttgcaacttgtacttggtgcgattctgatagctgcttcatttataccaggtattggtcaggctgctcaggttgcattgataggtgcaggtgctggcatggctatgggaggggttgcatcaatgctcatgccaaaaattgataatactcaagaccaaaaccaagacggcaaccgtgccaacaaaggctttggcggtgcagttaccacagttgcacaaggtaatcctgttccaattctttatggtcaacgggaaatcggcggcttcattgtgagcgcaggtcaatatcctgaagatcagatgtaa

SEQ ID NO: 69269 - DNA, 420 bp, Acinetobacter baumannii
gtggggcgtaattattttcatggctggcaagattgctatgcacttatacgtgatttttatagccgtgagttaggtgtggagctgttggattttcagagaaaagatgcttggtgggaggataaatcccatccatcactttatcttgaaaactatgaaaaagcaggcttctatgaagtagatacaccacaatatggcgatatgcttgtttgtcgtgttggtcgcactgaacatccaaatcatgcggttgtttggctgggtaataatggtcagcttaaatctgaacaaagtgaaaactgcattggttcagcgttaattcttcatcatccatataaccgcaaatctgttcgggaaatttatggtcaacagtggcgtgaacgtactgtaaaaatcttgaggcatagagatgttaaaaacaattaa

SEQ ID NO: 69270 - DNA, 654 bp, Acinetobacter baumannii
atgttaaaaacaattaagttgtacggcatcttggggcaaaagttcggtcgtgaatttaagctcgatgttgccaatacgcgcgaagctatgcgggctttatcagttcagattgtaggttttgagcaatatatgttgaccgctcataagcaaggcttggcatttgcaatctttctgcgaagtaaaaatgcaagtaaaaagcgcggtaagaagcgcccagctgtttatgaccatgaaacaaaacggttaatcactggtgacaatattggtgagcagcaactagacatgcatactgaagcagacactattcatatcgtcccgcgtgtaatgggggctggtggcaataatgggattttgcaacttgtacttggtgcgattctgatagctgcttcatttataccaggtattggtcaggctgctcaggttgcattgataggtgcaggtgctggcatggctatgggaggggttgcatcaatgctcatgccaaaaattgataatactcaagaccaaaaccaagacggcaaccgtgccaacaaaggctttggcggtgcagttgccacagttgcacaaggtaatcctgttccaattctttatggtcaacgggaaatcggcggcttcattgtgagcgcaggtcaatatcctgaagatcagatgtaa

SEQ ID NO: 69271 - DNA, 1569 bp, Acinetobacter baumannii
  misc_feature (1251)..(1260): n is a, c, g, or t
atggctgtaataccaaataacaatgatacggtactaacaaactttatttggaaaaatgctgacgatctacgtggtgacttcccacatacacagttcggtagaatcattttgcctttcacaattcttagacgtttggaatgtgtactagaagaaaataagccgaatgttcttgcaacttatgaacaattcaaagatcaagaccttgctcttgatgtgattctaaagaatgcaagccaacgtcctttttataacatctccaattatgacttagcttcattaggtggtaataaaaccaaagccaaccttgaagactatatttcaaaattctcagaaaacgtccgtaaaatttttgaaggttttaagtttgctcaaattattgctgatctagatgctgcaaaccttttacttctaatctcaaaaaactttgctgacatcgacctacatcccaatgtagtacctgaccgcactatgagtaatgtgtatgaacatctcattgccaagtttggtgctgaggtgggtacagggtcggaagacttcatgacaccacatgatgttgtgcatttggcgacaaccttattactacaccctgataatgaattatttgaacaaaatcttggacttgtcagaactttatatgatatgacctgcggtactggtggcttcctaagtgacatgatgaatcatgttgaaacctataaggacaaatataaagttgctcctgtattagtgccacatggtcaagaattacagcctgaaactcatgctgttgctttaggtaatatgctgttaaagcgtttggaaacagacccaagccgtgatctatcagcaaatatcaaacttggtagcaccttaagtaatgaccagtatgaaggtaaacgcttccattaccaatgcgctaacccgccttacggcatgaaatgggataaagactctgctgccgttaaagcagaacaaaaattaggttttgcagggcgttttggtgcaggtgttccaaagagtagtgatggttcaatgctattcttacaaaatttggttgcgaagcttgaaacccctgagaatggtggtgggcgtggtgcaattgtgctttcaggttcgcctttgtttaatggtaaggcaaactcaggtgaatctaatatcagacgttggatgcttgagaatgatttgattgaagctattgttgctttacctacagaaattttcttccgtactggcatcacgacttatatttggttgatttcaaaccgtaaaccnnnnnnnnnnccgctcaccgtcaaggtaaagttcagcttattgatgcatcaggtttgggttcatcaatgcgtaaaaatgaaggtaacaaacgtacttaccttgatgaaaactctattgcagaaatcacccgtatttatgctgactttgaagaaagtgaaatcagtaaaatcttcgattacactgaatttgggtatcgccaagttcaggtacaacgccctctacgcatggatttccatttcactgaggacaagcaacgcttgcttcaagatactaaggaatttaataagcttagtgctgttgaacaaagcgaagtgttga

SEQ ID NO: 69272 - DNA, 666 bp, Acinetobacter baumannii; identical to SEQ ID NO: 69262

SEQ ID NO: 69273 - DNA, 654 bp, Acinetobacter baumannii; identical to SEQ ID NO: 69268

SEQ ID NO: 69274 - DNA, 285 bp, Acinetobacter baumannii
atgcttggtgctgtgcctgtaccatccggtgtgaacactgctgtccaggtgatgttgtcagttgtagtcaatgcacctaatgtaccacctacaactgcgatgtcgcttacatcaaagcctgtaactgcttcactgaatgtgaaggtaatgttggctgattcacctgctgcaagagccagatcatcagttgtaattgcaagtgttggtggaacaatgtctacaacaaaaccatcagttccatcaagtacatcacctgtacccaagttacctgcaaggtctgtgtaa

SEQ ID NO: 69275 - DNA, 948 bp, Acinetobacter baumannii; identical to SEQ ID NO: 48681

SEQ ID NO: 69276 - DNA, 555 bp, Acinetobacter baumannii
atgacaactaaaccattctttgatgctgctcgtgtgattgcaggtggcaagcttacacaagcacaagtagatgatctaaataaggtggtcgataaacttgcgccttctggcatgactacaagtgatgttggtgtaaatctaatttcaggatttgaagacacacgattcaaagcttatgacgatggtgtaggagtctggactattggcactggcacaacagtttatccaaatggcgtgaaggttaagcaaggtgatacttgcacacctgagcaagctaagacttactttaagcatgacttagccaaatttgaaaagactgtaaatgaatcggtaactgtacctttaactcaaaatcagtttgatgcattagtatcgctgacttacaacattggctctggtgcttttaataattcaaccttattaaagaaactcaataaacgtgactatcaaggtgctgctgatcaattcctagtttggaacaaagcaggtggcaaggttatgaagggcctagttcgtcgccgagaagcagaacgagcactctttttaaagaagtaa

SEQ ID NO: 69277 - DNA, 402 bp, Acinetobacter baumannii
atggcatccttaattcataatactttatcaagtaattacacattagttattgggcgaatagttttatcttcattctttttaatcgctggtatttttggtgtgtttaactttgatactgttgttaatgaaatgattggagcaattttaccacttcctgaattatttgcttttgcaactatagccattcaacttataggatcaattctacttatttcaaattttgcagggcttacatggttgggtgcaggaatactagccattttcactttactttgtattcctattggacatcctttttggaaattagctgaaccacaaagaactcaggatttccaaattgtattagaacatattgctttaagtggagggcttctattagcagcaatagccaccaagaaataa

SEQ ID NO: 69278 - DNA, 285 bp, Acinetobacter baumannii
atgccaagtctaattgaatcattgagctcatctcatattgaagcaatgttttggggaattccacagattacctccaatcttgcatatgctaaagatttatgtaaagaggctgcttattatgtggttgatcatgagtcaccacaagcatggaaagatgcaataattaccttatacaataatccgagtttatatgagcagttgatccagcaaggatatcgagaggctaaaatgttgcctcagagttggaatgatgcagcaaatagtttaaagataaagttttattaa

SEQ ID NO: 69279 - DNA, 147 bp, Acinetobacter baumannii
atgggcggagcaaaagctcattacgatggaattgttgctttctctcaaacagattttactgaagacctcaaaaagattgaaattcctgttcttatcttgcatggtgaagatgatcaggtcgtattaaatctaccgactaaactttaa

SEQ ID NO: 69280 - DNA, 210 bp, Acinetobacter baumannii
atgcaaatattacggttatctgattaccctcaatacaaagaaatggctgcacagtggttttctgaaaaatggcaaatccctgtggaagcctatcttgagagtattcagatttccattgatcaaaagcatgctattccacagtggtacattgttttaaaggcactgttgcaaatagtcggtggtgataaacttatcatccccttttgctga

SEQ ID NO: 69281 - DNA, 705 bp, Acinetobacter baumannii
gtgaatgagctctattcaagtaatgttcactattctgttatggcacaagaagaaggcgaccagaatctcaaaccagaaaaatctaaaagtttagagttaggtatgtttttgaattggaataattgggtcatgcaacttgttgggtatcaaatggattttgaaaattatatgtatttatctcattcaggtgttgctgtgcaaaatcgattacctttaaaatactggaaacagacagacactgacgtcaaagggtttgaaattgatttaatttatgattttaatctagctcatattgggaatattaaactaggtggtttagctgattttgttaaaaataaggctgttaatcctacagatataaggttagctaatgatggagtttacctaccaaatatgcctactaatcgttatggcatgtttcttgagtggagaaatgattcttggaaaggtaaaatttcaagtatttactacgatgagccaagatatctaggtaagaatgtaatacaggaagttcctttatctggttacaacttacttgaatttaagatagataaaaaattaaagattaaaaatgcttcatttgatatatttttaaatggtacaaatctgctgaacgaagaggctagaccacaaaactctcctctaaaatatattgcccctctaccagggcgagcatttcaactggggataactatgcatatttag

SEQ ID NO: 69282 - DNA, 822 bp, Acinetobacter baumannii; identical to SEQ ID NO: 59049

SEQ ID NO: 69283 - DNA, 279 bp, Acinetobacter baumannii; identical to SEQ ID NO: 51060

SEQ ID NO: 69284 - DNA, 666 bp, Acinetobacter baumannii; identical to SEQ ID NO: 50216

SEQ ID NO: 69285 - DNA, 798 bp, Acinetobacter baumannii
atgcagcgacttcatgaagatgatttagctggatggttgctaggtgatagaaaagacggcgttcctgtagctggtggtaacggtgaagtgtgggagcatctatgtctttcagctattcaggaagacggatccgcactgtggccagcaaaacacaatatccaaaaattgaggctaatggagcaagcagcaccatatgtatttgccgggcagtaccgacaaatgccatcaccgccagcaggcggtttttttaagcccgacaatattcaaattgttgatgctttgcctgcagatgtagtgaagcaagtaagggcatgggattttggcgctacagagaatgaaggcgactttacagcaggtgtgcgagaagctcttggtgcagatggttttacttacattgtcgatgttacaagaggacagcttggccctgacaatgtaaataaacgcttaaagcaaaccactgagcttgatggaaaaaacgtaactgttcgaattcctcaggaccctggtcaagcagggaaatctcaagctctggcatttacaaaacttctcagtggctaccatgtggttgcaaaaccagtatcgggtgacaagatcactcgggcacagccttttgccgctcaagtaaatgttgggaatgttcgaatgcttaaaggtgattggaacaaagcctttattgaagaacttcggaatttccctaatggaacaaatgacgatcaggtagacggtggatctgacgcttttaatgaattacatgaaggatttgaaaccttcttcgctgatatgggatttgcacgatga

SEQ ID NO: 69286 - DNA, 225 bp, Acinetobacter baumannii; identical to SEQ ID NO: 50257

SEQ ID NO: 69287 - DNA, 591 bp, Acinetobacter baumannii
atggggcaacctcaatactatgttagcggtgtgaactggcaatggttcgatgaggcaaaagctcgaggcatttacgttggagcgaaggtacttttgcctttgcctgaaaatggcaaaatcggcattgaacaagcaaaccctaacactttgtcccgtgaagcaatgaaagataagtggaatcaaatgaaagaattaggcgcacgcttaattgaaaagggttctgctgctaaaacagccacagaagctaacaatgatgatgctgttcagcattccgttttatcgctatgtgtcgtgaacatgaatgaagccttgtctatggctttgcgatggtgtgccaaatacgtaatagctaatgttgatgctcttaataaagatgacctgatgttcgaaatcagtcaagaatttaacaaacagggttatttagctgagttagctcgacagttatttgaagcagctctacaaggccgatcttcatttaaatcatggtgggaatacaaccaaacaggtatgttccctaaacaaaaatatgaagaagaacttcagaatgttgaagcagagcaagatgggactttaaatcaaaaggtagagtga

SEQ ID NO: 69288 - DNA, 381 bp, Acinetobacter baumannii
ttgacgaatgacagcacaccagcacttactggtacagtgaacgacccgacagccactgtagttgtcaatgtggatggcgttgactatccggcagtgaacaatggtgacggcacctggacgcttgcagacaatacacttccaacactcgcagacggtccacacaccattaccgtgactgcaacagatgcagcaggtaacgtaggtaacgatactgcagtggtgaccattgatacggttgcaccaaatgcaccggtgcttgatccgatcaatgcaacagacccagtgagcggtcaggcagagcctggttcaaccgtgactgtgacttatcctgatggcaccactgcaacagtggtagcaggcacagattgcaccggtgcttga

SEQ ID NO: 69289 - DNA, 990 bp, Acinetobacter baumannii
atgaatttaagcataatgcaaattagatcaacagcttgtatcttggtattattaacccatgtaagcgcagcatttaatgttaacaattcaatcggatttcaaacatcattaattgcttttattaatcagttttcaagatttgggaccccacttttttgtgttattacaggattccttttcgcaaaatatttttacagtagtattaatataaaatatttttatcaatctaggataagcaaaattttaataccctaccttgtatggagcttaatttatagtattattatctttttcttctcaaagaagctattttctactttcattcaagaaccgataataagcttactatctggtaaagctttttatcacttgtatttcatgtctaccattttacaattctgtttaatcttccctctacttcgactacttcgtaatgtaaacgtctttacactaacagtatccgcacttattattaatattttatctattgtttttttatacaaatcagacatatactttatttctgatcgggcttttgtcggcaactggcttttctattttgtatttgggatagttttctttagatataaaaatttcaaatttaaccttaaagttaatttaataattattgcaacaataactttttttatattatttgaagtactaataaataaaaaactttttgagtctacaagattagaaaatttaatttatataccaatactttttgcaactctttacagtgtatttaataaaaaaatatcaaataatcttataaaaattgggtattactcaatgggtatttatctaattcaccctatactgatacttgtgttaaaaaaaataataccaaatattttttttcaacaatacccaacatcattatttattttaattcttttgataacaatatctttttgtatggcattttgttcgctcatttcaagattcaacttttctaagttgctaataaccttaccgaaaaaataa

SEQ ID NO: 69290 - DNA, 165 bp, Acinetobacter baumannii
atggcacagcctgccattccgcctaagaagcctgaagcgacattggcaacaccttgccctttacattctcggtttttatcactggtggtatctgttaaatcgtcgacaattgttgcggtcatcatagattcaagcaaaccgacggctgctaatcccagtgaataa

SEQ ID NO: 69291 - DNA, 894 bp, Acinetobacter baumannii; identical to SEQ ID NO: 51422

SEQ ID NO: 69292 - DNA, 240 bp, Acinetobacter baumannii; identical to SEQ ID NO: 51423

SEQ ID NO: 69293 - DNA, 1818 bp, Acinetobacter baumannii; identical to SEQ ID NO: 51424

SEQ ID NO: 69294 - DNA, 564 bp, Acinetobacter baumannii
gtgttatatgaagcctattacccaagtgagggtagcgacaatcatccaataaaaatcttttatggcttcgtgcaagaggggtttgaaaagggacatcaattaactttggtggttttttatcctgaattaacaggtacatctttgtttaatttgatggatgagacgaaggctggtctagcaaattttttactacagaaacatgtttatggtgttggagcttcacacattaaagtggcttttgtatgtgagcatgtcaataaaagagacttctatactgaaatctggggcgtagacgtttttgaaaactacgctttagagcaactcgaacaacaacctaaaagtttactcagcggcattttgggaaataactctaaggaagtcagtattcattcaagttatttgaacatcggattaactgattcaatcaaattgattgatgaagggcatttagatacggagcaaacggcttatcttttaaataaactgaaagaaaaaactgattacggaaattttctctgtacacgacaaatttcacagaaccctgataggataagggttctgtga

SEQ ID NO: 69295 - DNA, 2412 bp, Acinetobacter baumannii; identical to SEQ ID NO: 46704

SEQ ID NO: 69296 - DNA, 315 bp, Acinetobacter baumannii; identical to SEQ ID NO: 46705

SEQ ID NO: 69297 - DNA, 288 bp, Acinetobacter baumannii; identical to SEQ ID NO: 46706

SEQ ID NO: 69298 - DNA, 165 bp, Acinetobacter baumannii; identical to SEQ ID NO: 56033

SEQ ID NO: 69299 - DNA, 162 bp, Acinetobacter baumannii; identical to SEQ ID NO: 56469

SEQ ID NO: 69300 - DNA, 153 bp, Acinetobacter baumannii; identical to SEQ ID NO: 51143

SEQ ID NO: 69301 - DNA, 3465 bp, Acinetobacter baumannii; identical to SEQ ID NO: 64773

SEQ ID NO: 69302 - DNA, 468 bp, Acinetobacter baumannii
atgaccggtggccgaggtcgtggtcgcagccgttatgatgacgacgatgaagatgatgaccgtggccgttcaggcggtcgaggtcgtggccgcagccgtcgtgacgatgatgacgaagatgatgatcgtggtcgttcaggtggccgaggccgtggccgcagtcgttatgatgacgacgatgaagatgatgaacgtggccgttcaggtggccgaggtcgtggccgcagccgtcgtgatgatgacgatgaagatgatgatcgcggtcgttcaggtggtcgaggccgtggccgcagtcgttatgatgatgacgatgaagatgatgatcgtggtcgttcaggtggccgaggccgtggtcgcagccgtcgtgatgacgatgacgacgatgatgaccgccgtggccgttcagatggtcgtggtcagaactctcgtaatcaaaaacgcgatgcttatggacgctttacgtcttaa

SEQ ID NO: 69303 - DNA, 327 bp, Acinetobacter baumannii
atgtctaatcacaaaattaacttgaatgatttgactatccccgtccttttcattctatttgtgatttctatcatgatatggcctctgttgggcttcataattccgttgcattacccggtaatcggtttaactatactttctttgatgacgatgactcccttattttttttattaaatagtcaaattaaaaagggtcctcatccggttactagtaaattaaaacaattcataatttcaggttctctttctgcaagttttacgctgttgattgcattgatagccgttgtcagttccacaaataaatcagagtttacacaaataaactag

SEQ ID NO: 69304 - DNA, 438 bp, Acinetobacter baumannii
gtggcaagatttatacttttagacgctgctatggattattttcaaagattagaggcctattctactactgattatgctgaaagtgttggctttttttcactttcgaatataaaattttatatagaattctttttaatttttttattattgaataataggttgttattaaataaatttatagttttttttgtatttatttttacagttggtttgtcattacgcgtggctttttatgattttggtatattaagtggtagactatcaaatacatttttactaattgaagtttttctaatgcctatgttactaagtagtagattaaataaaatttatttgtatatatattttttattatactttttagtgattttttatgttacatggacattccaagcttcagagtttataaaaaataactatttcctaccattgagttaa

SEQ ID NO: 69305 - DNA, 156 bp, Acinetobacter baumannii; identical to SEQ ID NO: 63038

SEQ ID NO: 69306 - DNA, 1830 bp, Acinetobacter baumannii; identical to SEQ ID NO: 50784

SEQ ID NO: 69307 - DNA, 972 bp, Acinetobacter baumannii; identical to SEQ ID NO: 51054

SEQ ID NO: 69308 - DNA, 1122 bp, Acinetobacter baumannii; identical to SEQ ID NO: 50761

SEQ ID NO: 69309 - DNA, 972 bp, Acinetobacter baumannii; identical to SEQ ID NO: 51156

SEQ ID NO: 69310 - DNA, 837 bp, Acinetobacter baumannii
ttggaagttgttgcaagggataattgtttaggtgttattgcattgtcaaaaagcgcaaaaaaaattcaatcagatattctaaaagcttatccaaaagtaagagataagattgaaaaaaaaatgttcgttttgtaccctcctcaaaaaatatatactactcaacatgagattgaagaaaaagtcttaaaaccattaaaattaattttcgttggaaatgatttttatttaaagggtggtgcagaatgtatattagcgattaatgagttacttgaagaggggataatttctgaaaatgaaattatgttgacagttgtaggaattttaaatcggacccataattattcctttggtatttatcaagatgattctgatttttcaaaaaatattaataccataattatgaacagaaaaaatattaaaatatattctaatgtggacaataataaagtaattgaaatgattagagagcatcatataggccttttaccgacatgggcagatacatttggatattctgttttagagttccaagcttgtggttgccctgtaatttcaacggatgttagagcattgtcggaaattaataataacgatattggttggttaattaatgttgataaaaataaatatggtgagattgtagttgattcttattcaaagaaagacttatgcagaagaactattattgatcagttgaagaagcatattctcagtgcatatgaaaatcctaatgttgttattaataaaggtgttgaatcattgaatcgtattaaaaaagaacattctattgattattataatgataaaattaagagtgtttatactattggtatttaa

SEQ ID NO: 69311 - DNA, 591 bp, Acinetobacter baumannii; identical to SEQ ID NO: 69287

SEQ ID NO: 69312 - DNA, 252 bp, Acinetobacter baumannii; identical to SEQ ID NO: 48628

SEQ ID NO: 69313 - DNA, 423 bp, Acinetobacter baumannii; identical to SEQ ID NO: 51161

SEQ ID NO: 69314 - DNA, 369 bp, Acinetobacter baumannii; identical to SEQ ID NO: 61034

SEQ ID NO: 69315 - DNA, 174 bp, Acinetobacter baumannii; identical to SEQ ID NO: 49405

SEQ ID NO: 69316 - DNA, 321 bp, Acinetobacter baumannii
atgaaaattctttttttaattaattctttgaagagtaaatctggttctgaacgagttgcagttgagctggctaataaaatggcagcaataggaagctataatattactcttttgaatagggaatctataaaagaaaatgcagcttacccaattgcagataatgtagaagtaattgctttatctggcagtttatttgagttttataaaaagcttaaaaaacagatttcttctaataattatgatgttgtagttgtacataatatgggtaaattatccaaatataaagaaattagtagttttggaacatgtttcttttattag

SEQ ID NO: 69317 - DNA, 201 bp, Acinetobacter baumannii; identical to SEQ ID NO: 64360

SEQ ID NO: 69318 - DNA, 408 bp, Acinetobacter baumannii; identical to SEQ ID NO: 50231

SEQ ID NO: 69319 - DNA, 666 bp, Acinetobacter baumannii; identical to SEQ ID NO: 50216

SEQ ID NO: 69320 - DNA, 363 bp, Acinetobacter baumannii
atgaaaagtcacgatcatttgctcgataggcaatatgacgatgaacactacaattgtgttcactttgttcatgaagctgcaatggacctatatggtatagatcgggcggaagcgcttgaactctttatgcagcctaagggcaaaattacttttttatcttcacggttaaaacttttaaatccgctgcccatgcccaaggaaggctgcatagtcgccttccatcccagacaaagaaataagcccccgcatgtggggctttttcgtgggcaaaagattcttcacctcatggaaagcggagtcacttatttgcctgaagaggttgtgatgggaatggggtttaatcgggtcagttattatgattaa

SEQ ID NO: 69321 - DNA, 369 bp, Acinetobacter baumannii; identical to SEQ ID NO: 61034

SEQ ID NO: 69322 - DNA, 363 bp, Acinetobacter baumannii; identical to SEQ ID NO: 69320

SEQ ID NO: 69323 - DNA, 288 bp, Acinetobacter baumannii
gtgaacaatggtgacggcacctggacgcttgcagacaatacactgcctgcattaacagacggtccacacaccattaccgtgactgcaacagatgcagcaggtaacgtaggtaacgatactgcagtggtgaccattgatacggttgcaccaaatgcaccggtgcttgatccgatcaatgcaacagacccagtgagcggtcaggcagagcctggttcaaccgtgactgtgacttatcctgatggcaccactgcaacagtggtagcaggcacagaatgcaccggtgcttga

SEQ ID NO: 69324 - DNA, 366 bp, Acinetobacter baumannii
atgattacggccatgtttttatgtaaaaatcttttgattgattggcgcattggtgaacaatggtttatgcaacatttaattgatggtgacctcgccgcaaataatggcggttggcaatggtgtgcctcaacaggaacagatgccgtaccttattttcggattttcaacccaattgctcaatcaaagaagtttgatccggagggagaatatattcgccaatgggtgaaagaattggctcatttggacaataaaacgattcatgaaccctactcaagcaaaaccgatcttggtttaaattatccaaaacccatagtagatttaaaagaaacacgtcttaaagcaattaaaactttcaagaatatttag

SEQ ID NO: 69325 - DNA, 2397 bp, Acinetobacter baumannii; identical to SEQ ID NO: 59352

SEQ ID NO: 69326 - DNA, 846 bp, Acinetobacter baumannii
atgcaagatttaattggtctaaatgaccaacttaaacttatgatgggactccgctacgattacttcgacttttcaactactaacaaaattaagaatgaacatcgtaatgtaaaagacagtacttttagcccatatgttggcttggtatggcaaccagttcctgaacatagcttttatacgtcttactctaaaagcttcgcaccgtttggtggacaaatgggtgtcaaccaagttactggaagtaccgatgtcgcgaaaatggataaagagcctcaatataacgagcaatatgaagttggggtaaaaagtgaatggttagataatcggttaaatactcaattttctgtctttgatattcgtaaaaataatattcgctataaaccaaaccctgacagtgaaccagaggtatgggcaactgctggtcaacatcaatctcgtggtctcgaatttagttttattggccgtgtacttgataatgtctttgttcgcggtgggtatggctataccgatgcaaaagtaaaagaagacaagcaaaatcctgaacgtgaaggcaactatttagcaaacacttctaagaacacaggtaatttatttgttcgttatttaccaaccgagcagtggtataccgaagtgggcgtgacctatgtgggttcttattatccaaatattaataatcaagtaaaaatggaaggctttaaccgtatcgatgcagcaattggctacagtgccgacccttggaatgtcacacttgcggtaaataacttaaccaataaagagtactggcgttcagacagcatgccaggcacaccacgtaatgtgttattgcgtttgaattatcagttttaa

SEQ ID NO: 69327 - DNA, 489 bp, Acinetobacter baumannii
  misc_feature (467)..(476): n is a, c, g, or t
atgaaatttttaatcgtaggatgtggatttacaggtgctgttattggaagggagcttgcagagaaaggacactctattgttattattgatcaacggcaccatgtaggtggaaactgctatacggaacgtgacagtcaaacaggaatcatggaacatgtttatgggccgcatattttccatacagatgatgagcaagtgtggaaatatgtcaattcacatggaaattttaaaccctttacgaatagggttaagtcaattgtaaataatgaagtttattcacttccagttaatttacacacaattaatcaattttttaagactagattttctcctgatgaagcaaaggaatttattaaaaaacagggaaatagtagtattgttgagccagaaaattttgaagagcaagctttaaaatttattggcaaagatctatatgaagcgttttttaaaggatatacaaaaaagcnnnnnnnnnncaatggggactag

SEQ ID NO: 69328 - DNA, 576 bp, Acinetobacter baumannii
atgatttattggaatatcaatacgaaaaatgaaattagctatgactgttcactaggtattgatgataattttatagagctttatcatttatattataaagatttagataatttacatccaaaaaaaataggaaattactttttaaatcatagcaatatagtatgcgaacttgactatatgaataaatctgattatgagaaatcgactttttataatgaatttttaaagaaacaagatgcttataatattatacaattacatctaactcataaaaataaagcatttggaataattaattttttaaaaaataaaaataaaaacaatgactacctgagtttaagttttttaacaaaaattatttccaaccatgaattttataaaaataattgcaaaacaattaatcaatacgatctcacaaaaagagggtgtgaggtttttaaattattaaaagatggtttttcatataatgaaatttcatcaaaactatttattagcttgaatacaacgaaaacgcattcaaaaaatattttttcaaaacttaatattcagtcacgttatgatttaaaagacttttaa

SEQ ID NO: 69329 - DNA, 279 bp, Acinetobacter baumannii
  misc_feature (255)..(264): n is a, c, g, or t
ttgtacggcaaactaaacgtttccattaaccaagttgacaacaaaaatttcgatggtaaaagtgacgttaccgaagttaactcaaactcttctcgtattggggtaaaaggcgaagagaagttgactgataagctatctgctgtttatttagctgaatgggcaatttctactgacggttctggttcagatactgaccttagtgcccgtaaccgttttatcggtttaaaaactgaaggcgtcggtacgttaaaagtnnnnnnnnnngttaaaagtaggtaa

SEQ ID NO: 69330 - DNA, 870 bp, Acinetobacter baumannii; identical to SEQ ID NO: 49028

SEQ ID NO: 69331 - DNA, 204 bp, Acinetobacter baumannii; identical to SEQ ID NO: 49137

SEQ ID NO: 69332 - DNA, 387 bp, Acinetobacter baumannii; identical to SEQ ID NO: 49053

SEQ ID NO: 69333 - DNA, 585 bp, Acinetobacter baumannii; identical to SEQ ID NO: 49115

SEQ ID NO: 69334 - DNA, 756 bp, Acinetobacter baumannii; identical to SEQ ID NO: 49114

SEQ ID NO: 69335 - DNA, 636 bp, Acinetobacter baumannii; identical to SEQ ID NO: 49113

SEQ ID NO: 69336 - DNA, 207 bp, Acinetobacter baumannii
atgatgcttggtggtgtggctatgatgcttatgccgaaggttgataatactcaagaccaaaaccaagacggcaaccgtgccaacaaaggctttggcggtgcagttaccacagttgcacaaggtaatcctgttccaattctttatggtcaacgggaaatcggcggcttcattgtgagcgcaggtcaatatcctgaagatcagatgtaa

SEQ ID NO: 69337 - DNA, 207 bp, Acinetobacter baumannii
atgatgcttggtggtgtggctatgatgcttatgccgaaggttgatactactcaagaccaaaaccaagatggaaacagagcgaataaaggctttggcggtgcagttaccacagttgcacaaggtaatcctgttccaattctttatggtcaacgggaaatcggcggcttcattgtgagcgcaggtcaatatcctgaagatcagatgtaa

SEQ ID NO: 69338 - DNA, 624 bp, Acinetobacter baumannii
ttggggcaaaagttcggtcgtgaatttaagctcgatgttgccaatacgcgcgaagctatgcgggctttatcagttcagattgtaggttttgagcaatatatgttgaccgctcataagcaaggcttggcatttgcaatctttctgcgaagtaaaaatgcaagtaaaaagcgcggtaagaagcgcccagctgtttatgaccatgaaacaaaacggttaatcactggtgacaatattggtgagcagcaactagacatgcatactgaagcagacactattcatatcgtcccgcgtgtaatgggggctggtggcaataatgggattttgcaacttgtacttggtgcgattctgatagctgcttcatttataccaggtattggtcaggctgctcaggttgcattgattggttcaggtattggaatgatgcttggtggtgtggctatgatgcttatgccgaaggttgatactactcaagaccaaaaccaagatggaaacagagcgaataaaggctttggcggtgcagttaccacagttgcacaaggtaatcctgttccaattctttatggtcaacgggaaatcggcggcttcattgtgagcgcaggtcaatatcctgaagatcagatgtaa

SEQ ID NO: 69339 - DNA, 228 bp, Acinetobacter baumannii
ttgattgatgttgccaaaactcaagcagatttatctcaagattatcacaacggcgaacttgctcaattaactggtggtcaataccaacttgatgagttgaaaaataatattacacaccttgaggttgtcccagagacgcaagtaatcaacacaaatcatttagctccagcgaatgcggccatctctaaaacacttacggaaggttttaagaatgacggacggcgttaa

SEQ ID NO: 69340 - DNA, 207 bp, Acinetobacter baumannii; identical to SEQ ID NO: 69337

SEQ ID NO: 69341 - DNA, 297 bp, Acinetobacter baumannii; identical to SEQ ID NO: 49094

SEQ ID NO: 69342 - DNA, 198 bp, Acinetobacter baumannii
gtgacaggagttgaaaaattatcagcagctccggtcatggctacagatctgagagcttcattctctctggtactggccgcgctggcagctgaaggggagtccatcgttgaccgtatttatcatattgaccggggctatgagaatgttgaggctaaacttcagagtttaggtgcccagattaagcgagtaagtgcatga

SEQ ID NO: 69343 - DNA, 369 bp, Acinetobacter baumannii
  misc_feature (308)..(317): n is a, c, g, or t
atgaaatttttaatcgtaggatgtggatttacaggtgctgttattggaagggagcttgcagagaaaggacactctattgttattattgatcaacggcaccatgtaggtggaaactgctatacggaacgtgacagtcaaacaggaatcatggaacatgtttatgggccgcatattttccatacagatgatgagcaagtgtggaaatatgtcaattcacatggaaattttaaaccctttacgaatagggttaagtcaattgtaaataatgaagtttattcacttccagttaatttacacacaattaatcnnnnnnnnnncagggaaatagtagtattgttgagccagaaaattttgaagagcaagctttaa

SEQ ID NO: 69344 - DNA, 906 bp, Acinetobacter baumannii
atgtctaatttaacatatataccgcaagttgtgtcgtttcatggcactgaactcttcattgttgaacatgaaggacaaccctatgttccgatgcgttcagttgttcagggaatggggcttgattgggcagcacaatttaccaaattaaaacaaaggtttgcaacctgcgttgtggaaatcgcaatgcagatattgggagatgatcagtcccgtgctcatacatgtttattgttgagaaaattacctgcttggctttattcaataatgccgggtaaagtaagaccagagctccgtgatacagtaattttgtaccagcaagagtgcgacgatgtgctgtgggaatactggactaaagggcaagcaataaaccaacgcttaaccatttctccagaacaacaaaatgcactgcacgagatagttgatcgccgtgcagggagggatcgaagcttaagagcctctatgtggatacgtcataatcgccactttggaattgctaaatatagccaattgctttcaatccattttgatgatgcgaagcagtatcttgagacaataccacttcatgagctaggcccaaccgaaacagatacacttaaacgtttagaaaactttgtagataatctcgctacacggtatccagcattagaaaatccgctagcttatgaaatagcacagcatgtaggtgagaagctaaagtatcaatctcccaaaggtccgaaaaacttctggatttcgattcaggaaaacggcgctctttcagtacagcaatattctctacaccacacgcccattaatgtcgtgcaactacgcgaaaagtttaatgggctatgggagtttcttcataaggatgaagtacttgagcttggcaaagtattaaaacgctttccttttgaacctgtgaactga

SEQ ID NO: 69345 - DNA, 546 bp, Acinetobacter baumannii
  misc_feature (528)..(537): n is a, c, g, or t
atggatttcaatacccttgaccaagaaacggtacagaaaaaacaaaagtttcatcaaattttgtatgtacaggtcatctttgcaattattttgggcattttaattggtcatttttacccagaacttggcgagagcttaaaaccgcttggtgatgcattcatcaaaatcgtcaaaatgattattgctcccgtaatctttttgacagtggttaccggtattgccagcatgacgaacatgagtcgagttgggcgagtgacaggtaaggcaatgctatatttccttactttctctagtcttgcgcttgtggttggtatgattgtggctaatatcattcaacctggtaaaggcttaaatattgacccggcaaccttagtcaacgataaagtaaatagttacgttgaaaaggctcatgctacaaatatcactgactttttcatgaatattatcccgcaaacattagtgagtccgcttgctggtggtgaaattttgcaggttctatttgtagcagtcctatttggtatttctttnnnnnnnnnntttctttag

SEQ ID NO: 69346 - DNA, 666 bp, Acinetobacter baumannii
atgttaaaaacaattaagctgtacggcatcttggggcaaaagttcggtcgtgaatttaagctcgatgtcgcaaatacgcgtgaagccatgcgtgctttatcagttcaaatcgctggctttgagcattttatgttgcatgcacatgagcagggcctacgctttgccgtatttttaaaaagtaagaactcaagtaataagcgaggcaagaaacgcccagcaatttacgatcatgaaactaagcgcctaatcactggtgacaatatcggtgaagaacagcttgatatgaatactgaagctgaggttattcatattgttccacgtgtagttggtgcaggcggtaatggaatattacagactgtattgggtgctgttatggtcgtcgtaggcgttttgatgacggtaggcacattaggcggtggagcaccactcggtgctgcattgattggttcaggtattggaatgatgcttggtggtgtggctatgatgcttatgccgaaggttgatactactcaagaccaaaaccaagatggaaacagagcgaataaaggctttggcggtgcagttaccacagttgcacaaggtaatcctgttccaattctttatggtcaacgggaaatcggcggcttcattgtgagcgcaggtcaatatcctgaagatcagatgtaa

SEQ ID NO: 69347 - DNA, 420 bp, Acinetobacter baumannii
gtggggcgtaattatattcatcattatcaggactgttatgcactagtccgtgacttttatgatcgtgagctaggtattaagttgccagactttgaaagaaaagatggctggtgggaggacaaagatcatccttctctttaccttgaaaattatgaaaaagcgggcttctatgaagttgatacaccgcagtatggcgatatgttggtttgtcgggttggacgtaccgagcatcctaatcatgcggtagtctggctaggagataatggagttttaaaatctgaacaaactgaaacttgtatcggatctactctaattttacatcatccatataaccgaaagtcagtacgtgaaatttatggccaacagtggaaagatcgaacggtaaaaatcttgaggcatagagatgttaaaaacaattaa

SEQ ID NO: 69348 - DNA, 666 bp, Acinetobacter baumannii
atgttaaaaacaattaagttgtacggcatcttggggcaaaagttcggtcgtgaatttaagctcgatgtcgcaaatacgcgtgaagccatgcgtgctttatcagttcaaatcgctggctttgagcattttatgttgcatgcacatgagcagggcctacgctttgccgtatttttaaaaagtaagaactcaagtaataagcgaggcaagaaacgcccagcaatttacgatcatgaaactaagcgcctaatcactggtgacaatatcggtgaagaacagcttgatatgaatactgaagctgaggttattcatattgttccacgtgtagttggtgcaggcggtaatggaatattacagactgtattgggtgctgttatggtcgtcgtaggcgttttgatgacggtaggcacattaggcggtggagcaccactcggtgctgcattgattggttcaggtattggaatgatgcttggtggtgtggctatgatgcttatgccgaaggttgatactactcaagaccaaaaccaagatggaaacagagcgaataaaggctttggcggtgcagttaccacagttgcacaaggtaatcctgttccaattctttatggtcaacgggaaatcggcggcttcattgtgagcgcaggtcaatatcctgaagatcagatgtaa

SEQ ID NO: 69349 - DNA, 585 bp, Acinetobacter baumannii; identical to SEQ ID NO: 49105

SEQ ID NO: 69350 - DNA, 204 bp, Acinetobacter baumannii; identical to SEQ ID NO: 49137

SEQ ID NO: 69351 - DNA, 366 bp, Acinetobacter baumannii; identical to SEQ ID NO: 69324

SEQ ID NO: 69352 - DNA, 762 bp, Acinetobacter baumannii
atgtccatgtttgaaaaaaagcgaatacaaaatcaagatgaatggaaacgtacccagattcgcattccacaatatcaatatgatgcaatcgttgattatgccgaaaagaataatctttctttaaatgccgctatgcttgatctaatggaaaaaggttttatttctgaaggttatatttctgacttatccaaattatcaaatcaaaggaaaatactagaattatcattacgtagatttttaccccatacaaatacacaaaatgtggcttttcatgagcaagataactatttagccgttagaggcactcatggcaatacaactgagaactgtataaatcttatagaatatataaaaatgcctgaatgtattcaggtacttctttttgctacacataataaacctacaccaggctttagtcgtgatgatggacctgaaacaaaccttccattgatgggtgcaatagttttagtggaactagaagaatttaatgcttatgtaatttttgacggtttgtttttaacagctcaaagatacccaagatatagagaagtaaaagaagtattagatgctgctgtaacttctgataaagcttattttattaatattcctgtaccatttacttcaagttggggccctgtaggtgcagttgatcaacttatacatttacctcgtgaaaaacttacttcagaatctagaaggaattactttaatttgctatgtaaccttactgaaaaacagtacgaagatttatatcgttcttga

SEQ ID NO: 69353 - DNA, 357 bp, Acinetobacter baumannii
  misc_feature (95)..(104): n is a, c, g, or t
atggcttttataattttaattattttttcaataataatagtttggttttgttcagttactaaaacttattttggattaaaggattatgattattnnnnnnnnnntcaaaaaattgcggaccaatgccgacaaactaaaatggaattagaagcttttccaagttttgttgcaagttttactacagaggatccacaaattattgagattaggaaagagcttgcacttaaatattttggtagagagcttgataataaaacaaatgatgaaacaagtaatattctgcaagatcaaatgaaaaacacgactgaaatggttaaaacagctatggaagtacttaaaaagacggggaattcatga

SEQ ID NO: 69354 - DNA, 411 bp, Acinetobacter baumannii
  misc_feature (390)..(399): n is a, c, g, or t
atgtcagataaaaatactattaatattcatgccgccattattcatagaattttaaaagaacaagatcaaaagcgggaggatgcaaccccacctgtaattagatcaaatttacataccaacaatgaacaaacagtaaagttaattcaatttttagatcgtgagcttagtaagtatggtcttgcacattcaatttcttcaacatttgagcaaagcacaacactgagcaaaaatattaatgattatttgtttaatgagggtgacttacaggttgaagatgatgaaagtgaaacattaattgagtttgagacagaattacaaactagatatagacgattaactaataagcttacacatgctttacatgcgagaaaattaatgatccagaacctnnnnnnnnnnattaaaaactaa

SEQ ID NO: 69355 - DNA, 1845 bp, Acinetobacter baumannii; identical to SEQ ID NO: 51354

SEQ ID NO: 69356 - DNA, 684 bp, Acinetobacter baumannii; identical to SEQ ID NO: 48994

SEQ ID NO: 69357 - DNA, 870 bp, Acinetobacter baumannii; identical to SEQ ID NO: 49028

SEQ ID NO: 69358 - DNA, 135 bp, Acinetobacter baumannii
atgagctcaaccgatgtatcatcaaatcccaaacctgataacgcgaccgctgctgtcacattggcatttttagggaacttaattgccgcttcagcagcagtacccttaaaaatacaagttggttctttaatctga

SEQ ID NO: 69359 - DNA, 531 bp, Acinetobacter baumannii; identical to SEQ ID NO: 57652

SEQ ID NO: 69360 - DNA, 411 bp, Acinetobacter baumannii; identical to SEQ ID NO: 49129

SEQ ID NO: 69361 - DNA, 189 bp, Acinetobacter baumannii
atgccacaacctatcattgctgcccatcaagttacacaaactattcagattaaccaaaatcaatttacgattttaaaaaatattgatttagagatttataaaggggagcaggtagccattacgggacgttctggttcagggaaaatcgactttactgggtattttagcgactttagaccaaccctctga

SEQ ID NO: 69362 - DNA, 168 bp, Acinetobacter baumannii
atggtttcagtgtggaaccgtggtcaaaccaccttccgtttagaaccgggtgagcgtttagcacagtatgttttagttccagtagttcaggctgaatttgagcaagtagaggaatttgaagaaactttacgtggcgcaggcggttttggtcacactggtaaacaataa

SEQ ID NO: 69363 - DNA, 960 bp, Acinetobacter baumannii
atgactaacttgcagcatccggaaaagccttatatcaaactgtcgatgagtctaactaacacatcaagctcacgtgttctggcaaaacatacagtaatgaatgggccaattattacagactggttgcaacgtttaattaaacagagcaaaaccgcccaagagcttgattttgctgtattacgtgaagtgtatggtttaagcgtggattttactaaattgccaaaatcacatgctcaacaggcctatggcacaattggatgtttatggcgtgagagtgtgcatcaatatttacgtgaaggtgaagatgcaataccgttaaatggcgtgagtcatatccaaaaagatgggcaagcattaattgcaccatggttacagcaatatggtgttgaatcatggacacgtcaacttttgaaagttgtgattactcctttgattcatttactttttgcggagggaattgcaactgaatcacatggccaaaatattattcttgtacataaacaaggttggccaacgcgagttcttttaaaggacttccatgatggtgtgcgctatagtccagcacatttagcacaccctgaattggctcctgaactcgatcagttgccgcctgagcatgcaaaaaccaacagtatgtcatttattttgacagatgatttaaatggtattcgtgattttagctgtgcctgtctgttttttgtcgctttaaccgatattgcaatatttttaaatcaaaactttgatcttccagaaaaaaatttctggcaatgggctgcggaagtcatccaaaattaccagcagcaacatccagagcatgcttcacgttaccaattatttgatgtttttgccgaaaaattgcgcattgagtcattaactaaacggcgtttatttggcgatcgtagcatacaaattaaatttgtcgataacccgttagctccttttaaattgcaggtgaagtga

SEQ ID NO: 69364 - DNA, 153 bp, Acinetobacter baumannii; identical to SEQ ID NO: 61079

SEQ ID NO: 69365 - DNA, 780 bp, Acinetobacter baumannii; identical to SEQ ID NO: 15299

SEQ ID NO: 69366 - DNA, 786 bp, Acinetobacter baumannii; identical to SEQ ID NO: 16905

SEQ ID NO: 69367 - DNA, 534 bp, Acinetobacter baumannii
atggcatcacgtggttcagtcattcctttattcgttgatcaaattcgtcagggtaaacctcttacgattacagatccgaacatgactcgtttcatgatgactttagaagatgcggtagatttagttctatatgcttttgaacatggtgaaaatggggatatctttgtacaaaaagctcctgcagctacaattgcggtattggctgaagcattgaaacaattactaaatgttgaagatcatcctatttctattatgggtacccgtcatggtgaaaaagctttcgaagctttattaagccgtgaagaaatggtacatgcttttgaccaaggtgattatttccgcgtaccagcagatcagcgtgacttgaactatgaaaagtacgtagaagatggtgacttaaaaattactgagttcgaagattacaattcgcataatactactcgtttagatgtagagggtatgaaacaattattgcttaaacttgattttgttcgcgcattaacaagaggcgaatatatttcaccagaggcgtaa

SEQ ID NO: 69368 - DNA, 129 bp, Acinetobacter baumannii
atggctacagattataacagtcgtatagatagattgaaaactagaagacgagggttagataagacaataccttcaatggaaagttatgcatatgattctgttttacaagaatcctttagagaaatgtga

SEQ ID NO: 69369 - DNA, 318 bp, Acinetobacter baumannii
atgtatacgatatgcgaaacgcctttatttactaaacttgcacctgattattggacagatgaagagtacaaccagtttaaaacttatctatctatcaatcctgaagttggtgatgatcttatcgattggttacgtaaacagccgtttcggtggtcaactggtcacaaaggtaaacgtggtggtgtaagagttatttactacaacagattagcaaatggtcaaatatggctacttaccatttacggaaagagtgctactgaccagctacctaaaactgtattgaagcaaattgtggaggcactaaatggtactttctga

SEQ ID NO: 69370 - DNA, 687 bp, Acinetobacter baumannii; identical to SEQ ID NO: 53645

SEQ ID NO: 69371 - DNA, 369 bp, Acinetobacter baumannii; identical to SEQ ID NO: 67821

SEQ ID NO: 69372 - DNA, 843 bp, Acinetobacter baumannii
atgagtcttaaaagttttcctaataatatcgatgatcgtcgagtagtatggtgtttatctcaggacactgttgatgcggctttaaatgataattcttctttagaattattacttgcacccaatattactgttgttcagctccctttaagccggatcgcaaaaaaaaagtcagttaaactttgtgaattagaaaaattaggattattaaaagttgatcaagttctagtatgttcagatgagggagtaaatcttgaagaaaagtatttaaatttagaggaggttatagaggattttttaacttataatctgaaaaaagcaaatgcctatgccagattctttgctgcacttggagcaatttcatttgagtttgaacataaaaaatttgatttttctaaatctaaagctgatttttcagtatcacttgatggcgttgcgtcgagagttactaaagctaatatagatttgacagctaaagttgaaaaaacactaaatcaaattgcttcaattatgaagggttatactcaaaatgaatgcgcaactgagcaaagaatattgttagcggaaaaaatattgaaagaatataatttggaaaatgacgaaatttgtcgccatgaattagctacatttaaagatggggttgctcacttaagtgatcttaatatatctatgtcctctacaagtgatagtaatagaagtataaatattcttgttgatgttgggcttaatttcccaaatattgaaacagaagggaaaagtagttcacttatatcttttaagtctaaacttgaactagcatctatagtcaagaatagctttgatttcaatttaaaagttaaattttag

SEQ ID NO: 69373 - DNA, 903 bp, Acinetobacter baumannii
atggaagaactgacctctgaccaacttcttgaacaaatagatcgatatgaaaaaaatgttcttgattctttttactacacgtccaataagtttaatcaacttaaattcgaggaaatcacttcccctactgaattcgataatgggaatcgatacgataaaatacttaaagttatatcaagtagccctccattggactacacctaccttcgggaagaattgctgaagaatccatttcaaatagcatcagtagaaagcacttatattttttgtctatgtaaagatgcccgttcaaaaatacattcatcttccttgatagaagccaatcgcatcatacaacgcattcaaaaggttcatgaaacaacgcataacatcattaaagcaggggtagaatacactgctatttcctccaatatgacattttgtattgatgaagaggaaactgaacaatcaacttatcaagataagctttattacctcccccattttaaaatccattttcttcaagctttactcgatgttagtcctgacctccttgaccgtaaaaccactctcacttatatacgacaagagatagaatatattctaccagactaccacaaacagattctctataacgaacttaataaaagcgttctagagaatggggaaaaatggaaatctgttcactttgcagcgacacagcttgaaaacaaaataaatgaaaaaatatctgagctgattgactctaataaagatcatttcacaaaaggtagggaagaattgattgagttttatagtgaaatgatcgaatgtttaaatacagaaataaacgataagaaatgttacaaccacaaaacactcgaagcatggataagacaaaataaatcaaaacctgaatggaaaagattatttaaaaaattataa

SEQ ID NO: 69374 - DNA, 567 bp, Acinetobacter baumannii; identical to SEQ ID NO: 68996

SEQ ID NO: 69375 - DNA, 162 bp, Acinetobacter baumannii; identical to SEQ ID NO: 43716

SEQ ID NO: 69376 - DNA, 582 bp, Acinetobacter baumannii
atgacagagctaaaaaatcgaggagtacaggacattcttgttgcctgccttgcgaagcagcgcttctcaggattaaaaggctttcctgacgcgatagcctctgtttaccctcatactgatattcaactgtgtattgtgcatgttgtacgcaatagcctgagatttgtaagctggaaagactacaaggctgttacgtcgggtctgaaagcgatttatcaggcaagtacagaggaaaatgctttaaagtccctagacatcttctgtgatcaatggaatcaccagtatcccaaaattggagaatcctggcgggccaattgggaaaatatccgaacgatctttagctatccagccgaaatacgtcatgcaatttatacaacaaatgcgattgagtcgttgaatagcgtaatacgccattcaacgaagaaaaggaaaatcttttcatctgatgactcagtaaagaaggtcatttacttagcaacatcaaatgctgcgaagaaatggacgatgccaattcaaaattggcgtttagcaatgaattggtttacgattcagttcgatgatcgattaaaagatcatttataa

SEQ ID NO: 69377 - DNA, 303 bp, Acinetobacter baumannii; identical to SEQ ID NO: 44592

SEQ ID NO: 69378 - DNA, 1227 bp, Acinetobacter baumannii; identical to SEQ ID NO: 44591

SEQ ID NO: 69379 - DNA, 375 bp, Acinetobacter baumannii; identical to SEQ ID NO: 44590

SEQ ID NO: 69380 - DNA, 375 bp, Acinetobacter baumannii; identical to SEQ ID NO: 44589

SEQ ID NO: 69381 - DNA, 1230 bp, Acinetobacter baumannii
ttgaagaataaagttgaacctgatttaattaatgttgataagtgtttaaattatattgaagaaagtttgaatattgataatagtttggataaccttgcttatgaaataaaagtagaattgctttttattaaaaaagatttaatttcaaagaaaacttcaagtactcttaatcgtaataaaattattgatgaaactaatgatcaaataaaagaattaattgttaaggttttaactgtgagtcccaaacatcaaaatagcattgattgtttaattaattacttaataaagagtgattcctcagttgattttttaaaattttataatcaaatttttttaaatattgataaatctagtaagaaacaaaaaagatatattattaaaagttttgctatgttgtttaataaaagaaaaatgttagaacgttatcaaaaagatagtgatattaaaaaagaggccgtaaactttttctcgaaacctgagtttgatagcaatatattttatttgttatataaaactatgtttatgatttctttaaatgtaagggatatttcattttataatctaatcgaaaaatgtattaatcataaaaatgtttatgaaattgctttagagttagtttctcttctggaaagtttagatttaaaagatgaagtaagaagtttagatttgataatgaaaaaccatcaagataaattaacaccatatgaagctagtttattttcaaagaatgtttcacttttgctgtatggggcaaaatctgatgaatttatggattatttagaaaatacaagaaaactctgtccaagtttttcaagatatttaattaaatatacctatgatttacttttagcagagaaatttgatcaagttctagaatgtttgaaaaatagctctgagattattcaagatttggatgaggatgacagagctgtgctaaaaattaatgaagctactgcttacaaaaaaattaataatgggcaattatcaaatagtatttatgaagaattgaagaagatcgtttctaaatctctttcacaagaaattacgatatcttgtaaatcacttatggatgaccagcaaactttatcgaacatcaagacattaataaatattgatcaccacttttattattatttccaacaatggccagtaatatcagataacttaaagcagcaactacggaataattatgagaaacatatgattgtgacattagatagagctagttaa

SEQ ID NO: 69382 - DNA, 222 bp, Acinetobacter baumannii
gtggcatctgcggtagccgtaccaactacggttcctgcagtatttttaatcgttacaacagcattggcttcagttacacctgtaaccactttacctgatgaatcaatcgttgtagttaaacttgaaggtgcagtggtgtcgggtgcattaactgtttttggtgcggtagcattaccagatttgtccgcagccgttgcacttaagctttcaccatttagataa

SEQ ID NO: 69383 - DNA, 162 bp, Acinetobacter baumannii; identical to SEQ ID NO: 44696

SEQ ID NO: 69384 - DNA, 222 bp, Acinetobacter baumannii; identical to SEQ ID NO: 44692

SEQ ID NO: 69385 - DNA, 306 bp, Acinetobacter baumannii; identical to SEQ ID NO: 44768

SEQ ID NO: 69386 - DNA, 363 bp, Acinetobacter baumannii
atggatcctaaaccatgccgaccaaaggattttatcggaagagatgatatacaaaaagaaatctgggattttttagagtcagttcgtactcaagaaacagattctagaattcttgcattaacaggactttctggtaatggaaaatcttcattagttgctaacctttcagatcgtttcacaaataaaaaatggaaaaacaaactttatctttatccagttgatgtacgctctgcaagaggttcacgttttgtcgctgaagctgtaggcaaagcattcaatactgctgtaagtcatggatttattgaatcggatacttcttttactattgaaaatattgacgaaataatacgcacaatttcttga

SEQ ID NO: 69387 - DNA, 1749 bp, Acinetobacter baumannii; identical to SEQ ID NO: 45041

SEQ ID NO: 69388 - DNA, 1017 bp, Acinetobacter baumannii
atgttattacttcgtgcaacttatgcagctttacttcttacatgtagcgaatatgccaacgcgcaattaaaagaatgcgttatgaacgtttatgagagcggcgacgactcaatgacacttagcgaaatctgggataagtgcggagcgcaaacatcggagatagaagttgacagtattaaacctatagctgcttcttccacgaccccaggattaatatcaaaacgctttaataatgaatcccgcacagagtttgaaccctatgtaataacacctcatagagtcaatttttacttacctttttacactacaaactcgattaataaatttgcttatcagacttatggtggctatgaagagaaccttgaggatttagagtctaaatttcagataagtctgaaagtccctcttaatcacaaaagcctctttatcgaaggtgacggtatttatttgggttttaccctacaagcgctctggcaggtctactcgagcaacatttctaaaccctttcgagaaaccaactatcaaccggaaatattctacgcagcccctttaggctggcaacccttccagagtaatacaggttttatcctcgggttcgagcatcaatctaacggacaagctcagcacttatcccgcagctggaaccgcatttacggcagctttctacttgagaaggaaaactttgcgctgtcgtttcgcccctggtaccgaatagaagaagaagcaaaggacttcccactcgatccagatggtgacgataaccctgatattaatgagtacatgggccattttgatctggaaatggtttataaatggaacgaattacaaataggcttcacgggtcgccggaatttcgccacacataaaggctcaactgaattcagcctaactttcccactttggggaaagttgaaaggttatgctgtgatgtttaatggttatggggacagtttaatcgactacaactatagccagacaagattcggattaggtctggcgcttaacgaacgattataa

SEQ ID NO: 69389 - DNA, 582 bp, Acinetobacter baumannii; identical to SEQ ID NO: 45335

SEQ ID NO: 69390 - DNA, 351 bp, Acinetobacter baumannii
  misc_feature (255)..(264): n is a, c, g, or t
atgtctgtcattgaagaaattaaccaacaagctcagtttgaacaaaagcagcaacaacgttcttatgaagttctgcaaaatgaaaaaagtgtgccagtcaaaatgtggactaaaggcgtgcttgttgatgacaactcaaaacaacaattattacaaacagctcaaatgccttttatttataaatggatggctgttatgccagatgtacacttcggtttaggagcaactattggtagcgtaattccaactaaaggnnnnnnnnnnaattattcctgctgctgtgggtgtagatattggttgtggaatgatggcaacccgtacaagcttaactgcttcagatttaccagataa

SEQ ID NO: 69391 - DNA, 297 bp, Acinetobacter baumannii
ttgtctgatagtggaacgattaacgaagaatcatcaatcttgaatttccctgcacttaatttgcgtcaagcacatgagcgtccagaaggaatggaagaagcggctgtaatgatggtaggtttgaaagccgaacgcattttacaaggtttggcaattttagaaggtcaaactagaggcgaaaatcgtcttttgcgtttagttgaagactacagtatgccaaatgtgagtgaaaaagttgtgcgtatcattatgagttacacagattatgtaaatcgagtgatttggaagaagtattga

SEQ ID NO: 69392 - DNA, 246 bp, Acinetobacter baumannii; identical to SEQ ID NO: 59301

SEQ ID NO: 69393 - DNA, 627 bp, Acinetobacter baumannii; identical to SEQ ID NO: 45474

SEQ ID NO: 69394 - DNA, 198 bp, Acinetobacter baumannii
atgatgaaacaaaatatagctaatatcttattttcaagcattgctttaagtgcttgtgcaacatctactgaaacaaatcaaaaacaaacaaagccctcacctgaactggagcaaaaaattcagaagttggttgagaaaactaaaaagaatatgatttttgtcgaggtggtagctatctcatgggagattttgggctag

SEQ ID NO: 69395 - DNA, 327 bp, Acinetobacter baumannii
atgagcaccatcctgcctttagaaaaaaatattattgtaagtgttcctcatgaatacactactccacaaaaaggagcttattttgagaaattatgtgcccagatccttcgaaagcagtcttatgaaattactggttatgaagttagaagaacaggaatggagattgaccttgaagctattcataaaccatctcaaaaaaccgtatatatagaatgtaagttttttaatgacaaaagctcaattgattcaaaaatagttgatttgtgctttgcacagtcttttagaggagagtttgataaaattgctctattctctacagttaaataa

SEQ ID NO: 69396 - DNA, 1206 bp, Acinetobacter baumannii
atgaaaaactatcaaaaagtactaggagtacttactgttatcgcagcaatgcctttaatggctcaaactactataaaagttacaacatttaatgatgaagataatgagaacatgaatacatgttctttacgtgaagctattacagctgcagaaatgagaaaatcttatggagggtgtgaggttccagcaattgatcaaaattatacaattcaacttgatgctggtacctataccttaaataaagagttaacacctaaaattgctttaaatattattggaaaagaggcgacagattgggagcgtaaaggagttttaactaatgactatcctgctcaaaaacctcttcaaactcgtataaatgctggtggaaaatcacgaatttttaatacagctgtttaccaacaatcgttaactttaaccaatatcattttggaaaatggtaaaagtgctgagcaaggtggagcaatttacgctggtgctgatgtaactttaaaaaatagccagatcttaaactctcaagcctctaaaggcggggcaatttatcttggcggaagtactgctagtttaacaatgaatcattcattagttcaaggtaatggtaaggcttcgactgaaggtagtattttggcaatgagttgcatgtttaataattcatacagtggacgtatcttttcatttgattcaaatagttttattgataatggtggaataaactctataagtatttttgatttttgcggtagtcctacggcgaaatttactaataatacaattgctaaaaatttagcgagtcttactaatggtaatattattaaatttactggagatgctgatccattaaaaaatcaaactagtaagttaagctcatctagtagtttaacattgcaaaataatacaatcgttgagaactctgcatacaccacatttttatacgataaattaggtacaaaagaattaaattttaatatattagcgtttaatacaggttcttatgcatgtaaatatttattaggagcagcggcggccgaaaaagatactggactaaatatgaaatttaatgcattaaacttaaatggtaatactcctaaatgtgatataccgacagaagtaatttctacaggcaatacgaatattgatataaaaaatgaagtttttagtaatttattagaacctttaaaagaagttttcagcgacagatttaattga

SEQ ID NO: 69397 - DNA, 210 bp, Acinetobacter baumannii; identical to SEQ ID NO: 46205

SEQ ID NO: 69398 - DNA, 258 bp, Acinetobacter baumannii; identical to SEQ ID NO: 46547

SEQ ID NO: 69399 - DNA, 762 bp, Acinetobacter baumannii; identical to SEQ ID NO: 69352

SEQ ID NO: 69400 - DNA, 357 bp, Acinetobacter baumannii
  misc_feature (7)..(16): n is a, c, g, or t
atgctgnnnnnnnnnnctgccctcatgtcttacatgagcgagcctaaatatccagacaatattccagaaccagatgaaatagaggttgaagacctaaatgctattttgtcagaaggctatgagctgctactcgaacctgcttcgcgtctactttatacagaacaaaatggcattttaaagttttggggtaatggagaagaattaccgattgtggaatcttttgccacccaactcaaatcgattgccgatgggaaaagcattcctttcaatagtgagcttaacaatacagatattttagaaaacattgttcaattattgaataattcaattcttatgttgttacctcctgcagagtaa

SEQ ID NO: 69401 - DNA, 993 bp, Acinetobacter baumannii
  misc_feature (979)..(988): n is a, c, g, or t
atgaattttcagcgcatgactgaccttaatttagcaggtaaacgtgtccttattcgtgaagatttaaacgttcctgttaaaaatggtgtgattactagcgatgctcgtttacgtgccgcacttccaacaataaaagctgctttagaaaaaggcgctgctgtaatggtattttcacatttaggtcgtcctgtggaaggtgagccaaagcctgaacaatcacttgcaccagtggctgcatatttaactgaagcattaggtcaagaagttaaattatttactgattatttaaatggggttgaagttgaagcaggacaagttgttttgcttgaaaatgttcgttttaatccgggtgaaaagaaaaataatcctgaacttgcacaaaaatatgcagctctatgtgatgtgtttgtaatggatgcttttggtactgctcaccgtgcagaagcttctacagaaggtgtagcacgttttgcacctgttgcagcggcaggcccattattggctgctgaattagatgcacttggccgtgcaatgcaaacacctgaaaaaccaatggtggcaattgtcgctggttctaaagtttcaacaaaacttgatgtattaaattcattatctggtatttgtgaccaactgattgtaggcggtggtattgcaaatactttcttggcggctgctggttacaatgttggtaaatctttatatgaagctgacttggttgaaactgcaaaacaaattgctgctaaagtaagtgttccacttcctacagatgtagttgtagctgatgcttcacaaattaacttcgaagatttcttaggttctttggcagcagcgcaagcagtaattaagaaagttgaagatgtcacagcaaatgatatgattttggatgttggtcctgaaacagctaaagcatttgcaaatattttaacaacttcaaaaacgattctttggaatggtcctgttggtgtatttgaagttgatnnnnnnnnnnggtga

SEQ ID NO: 69402 - DNA, 699 bp, Acinetobacter baumannii
  misc_feature (18)..(27): n is a, c, g, or t
gtggtatggtatggagcnnnnnnnnnngtttatggtttaaccgagttaaatcgtgaaaaaattaagcaagctcaagtcattggtaatccaggttgttacccaacaactgttcaactgggcttggctccacttttaaaatcggcacaagcattgattgaaacaaagaatattattattgatgcaaaatccggtgtttctggtgctggtcgtaaagcaagtttgggcatgatttacagtgaaaatgcggataactttaaagcttatggtgttgcaggccatcgccaccatccagagattgtagaggctttggaaaatattgcagctaagaaagatgtttttgagggtcttttatttgttccgcacctagtaccgatgattcgcggtatgttaagtacaatttatgtagacttgacagaagcaggtaaacaaacagacttgcaagctttgtatgaaaacttctatgcaaatgaaaaatttgtagatgtcatgcctgcaaatagttcacctgaaactcgcagcgtgcgtggagcaaatgaattacgtattgctttgtataaaccacaaccaaataaactcattattttggcggctcaagataaccttgtaaaaggtgcatctggccaggctgtacaaaatatgaaccttatgtttggctttaatgaagatgaaggcttacaagggattggtttattaccataa

SEQ ID NO: 69403 - DNA, 174 bp, Acinetobacter baumannii; identical to SEQ ID NO: 63580

SEQ ID NO: 69404 - DNA, 9261 bp, Acinetobacter baumannii; identical to SEQ ID NO: 46536

SEQ ID NO: 69405 - DNA, 291 bp, Acinetobacter baumannii; identical to SEQ ID NO: 48423

SEQ ID NO: 69406 - DNA, 1635 bp, Acinetobacter baumannii
atgtcagctaaagacgtaaaatttggtgattcagctcgctcaaaaatgattgcaggggtaaacgtacttgcagatgcggttaaagtgactttaggtcctaaaggccgtaatgttgtgatcgaccgctctttcggcgcgccgcacatcactaaagacggtgtaactgttgcaaaagaaatttcattaaaagacaagtttgaaaacatgggtgctcaacttgttcgtgaagtttcaagcaaaactaacgacatcgcaggtgacggtacaacaactgcaactgtacttgctcaagcaattttaaatgaaggtatcaaatcagtaactgctggtatgaacccaatggatttaaaacgcggtatcgacattgcagtaaaaactgtagttgaaaatatccgttctattgctaaaccagctgatgatttcaaagcaattgaacaagtaggttcaatctctgctaactctgatactactgttggtaaacttattgctcaagcaatggaaaaagtaggtaaagaaggcgtaatcactgtagaagaaggttctggcttcgaagacgcattagacgttgtagaaggtatgcagtttgaccgtggttatatctctccgtactttgcaaacaaacaagatactttaactgctgaacttgaaaatccgttcattcttcttgttgataaaaaaatcagcaacattcgtgaattgatttctgttttagaagcagttgctaaaactggtaaaccacttcttatcatcgctgaagatgttgaaggtgaagcgcttgcaactcttgttgtaaacaacatgcgcggtatcatcaaagtatgtgctgttaaagctcctggtttcggtgaccgtcgtaaagcaatgcttcaagatatcgcgatcttgactggcgcaacagttatttctgaagaagttggtatgtctttagaacaagcaactcttcaagatttaggtacagcgcacaaaatcactgtttctaaagaaaacacagttattgttgacggtgctggtgatgctgctgctatcgctgagcgtgttcaacaaatccgtgctcaaatcgaagagtctacttcagaatatgaccgtgaaaaattacaagaacgtgttgctaagttagcaggcggtgttgctgtaattaaaatcggtgcagcaactgaagttgaaatgaaagagaagaaagaccgcgtagacgacgcacttcacgcaactcgtgcagcagttgaagaaggtgttgttgctggtggtggtgttgctcttgttcgcgctgtaaatgctcttgaaggcttaaaaggcgctaacgaagatcaaacagctggtatcaacattttacgccgtgcgatcgaagctccacttcgtcaaatcgttgcgaatgctggtgatgagccatctgtagttatcaacgctgttaagaatggtgaaggtaacttcggttacaacgctgcaactggcgaatatggtgatatgttagaaatgggtatccttgacccagctaaagtaactcgttctgcacttgagcacgctgcttctgttgctggcttaatgttaactacagaatgtatgattactgacattcctgaagacaaaccagctgctccagatatgggcggtatgggtggtatgggcggaatgatgtaa

SEQ ID NO: 69407 - DNA, 375 bp, Acinetobacter baumannii
atggatagttattctccctataaaggtaaaagtggcctaaagcgcatcttgaacgctaccagttattcaatttcaggatttaaagctgcttatcaaaatgaagctgcatttcggcaaattgttttaattaatcttgtactcatccctgtcagctttttcctggatgtaactcgcggcgaacatgccctgatgatcattgtctgtttatttgccatcattgttgagctcttcaactctgccattgaagcagtggttgaccgagtttcactcgagaaacaccaactttccaaaaatgcaaaagatatgggtagtgccgctcagtttgttgcactttctattattgtcgccacttggcttattattttatttggataa

SEQ ID NO: 69408 - DNA, 930 bp, Acinetobacter baumannii
atgggtagcttgcatataagctatgcagaaccagcttcagctcaacaagtacccggatattaccatcatcaatttggtaattatcggataacttccttgctcgatggcactatttatctagatcctaaattgtttaaaaatttaagtcaggctgaaaaaactaaaattttaaccaaatatgctgctgtaaatgagaaggggatccagacttcagtaaatgcctttttagttgatgatggtaaaagtttgacgctggttgacagtggagctgcgagttgttttggcccacagttaggttcaattgctaaaaatcttgaattagcgggctatcaacttgccaatgtgaaaactgttttattgacccacttacatccagaccatgtgtgcggtattgctcaaaatggaaaagccgtatttcctaatgcaaccatctatgctcatgagcgtgaagcagattattggttaaatccagcaaatgaaaaaactgtaccagcggataaaaaagaaaattatttaggtactgttaaaaacgtaaaagctgcacttgcaccttatcaagcaaaaaaagcattcaaaacctttaaagatggtgatgttattcaaggttttgaagtgatcaatacacaagggcacacaccgggacatcatagcttccgtttgaagagtaaagggcaacaaattgtctttgttggtgatattgtccactcacattctttacagtttgatgctccaaaaactggggtagattttgatgtaaattcagagcaggcaattaatactcgtttaaaaatgtttgctgaaatttcaaataagcaacaatgggtagctgccccgcatttaccgttcccaggaattggtcatgtgtataaagtgaatgctgagcagtatcagtggattcctttatatttcaataacagtcttgataaataa

SEQ ID NO: 69409 - DNA, 1143 bp, Acinetobacter baumannii
atgtttagaaaagcacttttatgcttaagtttaattagcttggttggttgtaatgatgacgataaaactgaaacgacgccaaccacgccagaatatcaacttcctaaaattctagtagtaggacaccgcggcgctagcgctttacgtcctgaacatactttagcttcatatcaaaaagcgattgatgacggcgcagatttcattgaaccggatctagtctctacaaaagatggcgtattggttgcccgccatgaaaatgagattggtggaacaaccaatgtaagcactttaagtcagtttgcagaccgtaaaaaaacaaaaaatattgatggcgtcgacttaactggttggttcacggaagactttactttaagtgaattacagcaacttaaagcgcgtgaacgtattcctgagtttcgaccagccaacacaacttataatgacctttaccctgtcccaactctagaacaaatcattgagcttgccgaagctaactataaaaagacgggaaaaattattggtttatatattgagacgaaacatccgacttattttaaaaatcaaaatctggcaatggaagatactcttctaaaaaccttagccaaatataaatatacacgtgatattgcacctgtctatttacagtcttttgaagtgagtaatttaaaatatttaaaaaatgagcttgatcttcataagacgcttaaacatgcacaaattattcagctatacgactcaaaaacatctcgaccagcagacttcgtagagtctggtgacactaaaacttatgctgatttagccacagctcaagggttaaaagatgttgccaaatatgcaaatggtgtaggaccaagtaaaggttacatactgacctttaataatgatggctcttataaaactagtacgtttattgctgatgcacatacggctggcttaaaagtacatccttatactttccgaccagaaaataacttcttaccagcgccgttaaagtgcagcccagataaacctgcagaacgttgtccatctggtgcattaaaagagtttgaagcctatttcaaggcaggcgttgatggcgtctttacagatgacccagcactcggtcgcgaagctgtcactaattttgaaaaagcagcaaaataa

SEQ ID NO: 69410 - DNA, 693 bp, Acinetobacter baumannii
atgctatctaaattttttattcaacgccccatttttgccaatgtattggcgatcattgttatggctttcggtattttttcggtcatgaatttgcctgtagaacggtatccagacattgctccacctaaaattactgtgtcggccaactatagtggtgcagatgcacaaacggttgagcaaagtgttactcaaattttagaacagcaaatacaagggattgaccacttactctattttagttcatcgagtgactcatctggacgtagtcgaattactataagttttgataacggaacaaatccggatactgctcaggtccaagtacaaaatagtattagtggcgtaatacgtcgcttaccggatgaagttcaacgccaaggtgttacggtaagtaagtcactgggtgacacttttatggtaattggcttatatgactcgactggtaaaacaggaaacattgagctatcggactatttaactacgcatgtggtagataacctgaaccgtattgaaggggtgggtgaaactgatgtatttggttcacaatatgccatgcgtatctggttaaatccggataaattaaaacaatataatttaatgccaagtgatgtagcgaatgcaatcaccgcacaaaatactcaggtcgccgcaggggcaattggtgacttacccgtattgacggtcaatatttaa

SEQ ID NO: 69411 - DNA, 2031 bp, Acinetobacter baumannii
atgttcctgttcttacaaagctggcgtgctacgctcattccgagtattaccgttccagttgtaattttaggaactttcgctgtcttatatgtgcttggttttagtattaacaccttaacgctatttgcgctggtacttgcgattggtttgctggtcgatgacgcgattgtggtcgtagaaaacgttgagcggctcatgcatgaacagcacttatctcctaaagaagctgctattgagtcgatgggggaaattagtggtgccttagtcggaattacgttggttttaactgctgtttttattccaatgtcctttttaggcggttcaattggggtgatttaccgtcagttttctattactttagttgccgctatggcgttgtcgcttattgttgcgctcattttaacaccggctttatgtgcattaattttaaaaccaaaccctcaacctcagcgttgggccgtatggtttaaccaaaagattgagcaacttaaaaatcaatatatcaagcttgttcagacgagtattcattactgtaaatcagttattgtgatttttgtggctttaattgccgtttttacgctgttctataacggtttaaaaagcggttttattcctaaagaagaccaaggaattttaagtgttcaaattaagctcgtagacagcgcaccaatttctcaaagccagaaaattggtgagcaagtccgccaatatttcttaactcaagaagataaaaatgtagatttggttttaatccgctatggacgaaattattcgggcacaggacaaaacttggcacaagggtttattgctctaaaaccgtgggatgtccgaacaggaaaagaaaactcggctgaggctatacaaaagcgtgcaatgaaatactttagtcattttaataatgcacagattaatgtgactttacctgcctcagttaatggcttaggtcaaacagatggtctggatttatggattcaggatttgaatggacaggggcaagattttctagatagtgccttccgccaattgcaggctcaaagtaaaaattattcaactttcgaaaactttgataagcagtcaaccaatagtaaggcaaatcttaatattaagattgaccagaaacaggcactagcaaatggactacagctatcggcaattaataatactttatcgagcgcatggggcggaacttatgtaaatgactttattgatcggggccgtattaaacgtgtcatgattcaaggtgatgccgagtttagatctaaaccggaagatttatataactggtctgtacgtaatgaccaaaatgaaatggttccgtttagttcatttgccaactttagctggggcggggcgccggaaattgtaaaacgctatatgggatatagtgctttacaactacaagcagatgtcgcgagtggcagcagttctggccaagcgatgaaagatgtagaacaacttgttaaccaacaaaaagatattggtttagcgtggacaggtttatcttttgaagaacagaagtcgactaatcaggccgtgtggttatatttaatttcggctggatttattttcttatgtttagctgctttatatgaaagcttaagtattcctgccgccgtaatgacatctattccgcttggtgtgggtggaagtgtgattttctcttatatttttggtttgccaaatgacgtgtatttccaaattgcgctattaacgactattggtttgtcatgtaaaaacgccattttaattgttgagttcgcggccttagcgcaagaaaaaggtaagaatgccattcaggcagccttagaaggtgcgagcttacgattaagaccgattctaatgacctccttagcctttggggcaggcgtaattccgcttgtgtttgctcaaggcgctggtgcggttagtcgtcaagagattggtattagtattttaggtggcgttatgtttggtactctactggttcttttctttattccagtcatgtacgtgttattacgttcactgtttaaatcgaaagcttcaacctaa

SEQ ID NO: 69412 - DNA, 576 bp, Acinetobacter baumannii
atgcctcaagaaaaaaaattaacacagcagcaggttatcgctctagaacgagatctggccaagtttgcaaccatgatggatagtgcggttcgtattccttttacaaagcagggtattggcgctgatgctgccttaagtacgattccaattgcaggtgatgtcgctgggttcgcactgacgtgttatgccatctataaggctaaacaaataggtgtgcctcagcataagctcactccagtgatcaaacttgctgtagtcgatgccgtagtcggttttgttccagttgcagggactattttcgatatttttatacgaccaagtcgaaaagcattagatgtggtgcatacgcatattcgtgaagaatatgcgatccaaagtgatattcatgtcgttcatccgtatttacatgaaaagctcgaaaagaagcaacaacagtcggccttctggcgtaaccctgttgtgagttggttatggttgcacatacccgatttattaggtgcgtttgtactgctattaattggcttagctgtgtggtggggtgcaagttacctttggggactttatcaaaccatgtaa

SEQ ID NO: 69413 - DNA, 906 bp, Acinetobacter baumannii
atgatgcggattggtttgtttttgcttaccaacctcgcggtactggttgtagctggcattattttgtcactcttcggtgtcggtagttaccatggcgcgggtggcttaaatctaggcaaccttttagtcatctgttttgtgttcggtatggtgggctctttagtctctctattcatgtccaaatggatggctaagaaaactactggtacagaactgattgacccaaatgctcctcgtaaccaagctgaaagctggttattgcaaacagtcgctgaactttctcaacgtgctggtattaatatgccagaagttggtatcttcccttcatatcagtctaatgcctttgcaacaggctggaataaaaatgatgccttagttgccgtttcaagcggtctacttgagcgtatgaacaaagatgagctacgtgctgtgctcgcgcacgagatcggccacgttgcaaatggtgacatggttacactcgcactcattcaaggtgttgtaaacgccttcgttatgttctttgctcgtgtagtaggtgactttattgaccgtaatgtctttggtcgtcaagacaatgaagccccaggtatgggttatttcatcattacaatggttctagatatcgtgttcggtattcttgcctctgccattgtgatgtggttctctcgttaccgtgaataccgtgcagatgaagccggtgcacgtttagctggtaaacaagcgatgatttctgctttattacgtttgcaagctgaaacagagttacctgaccaaatgccaaaagaaatgaaagcgttcgcaattgcggaaggtaaagaacaaggctttagtttagctgcattgttccaaactcaccctacaattgaacaacgtgtggcagctctacaccaattagattgtccataa

SEQ ID NO: 69414 - DNA, 1248 bp, Acinetobacter baumannii
  misc_feature (1074)..(1083): n is a, c, g, or t
ttggctcatcgcaacgtcccaaatagtcgtcatgaacgacggtggcaagatgttaatgagttgctagacgctggtattgatgtatttaccactataaatattcaacatttagaaagcctaaatgatgtggtctatcaaattacaggcattcgagtaaatgaaacggtaccagatcgggtatttgatcgtattcgagacattcgtttaattgatttaccagtcagtgagcttattgaaaggctccatcaaggaaaagtctatgtaccagagcaagcaaatctggcattacaaggcttttttagcatttcaaatttaacggcattacgtgaactcgcaatgcaatgcgttgctgagcatgtcgattcagacttaaaagagagttatgtctcaaagggtttgaaatctatctcgctgcaaaatgaattgatgattgcgattgatgggcaaggctcttctgaatatttagtacgagcaggctgccgtttagcagaacgtaatggtgctacatggactgtagtgaatgttgctaaaagtttagactttgggcagagttcaaggaattcttataaaaaagaatatattgaaatcgaccgggcatttgagttggctcggcaactcggtggtcgaaccgaggttttatatgggcatcaagttgcgtcagtgttaatggatgccgccgttgatcgaggtatttccaatctggtgattggtaaaagtatttcaccgtggtggttaaagttatttaagaaaaatttagctcagcaattattaaatcaagaaaactcgattgctttaaccattttgcacccagaacagggcactaaaaagattaatcagctcgaaaaaccttcatttttatcattaaaagaaagtgtttttgttttagctgttacatgcgcaagtatttttatagctcacttcgcagaagttctatttggtattgaagacttctctgtcatttttattatttctgttttaattgttgcaactaagacccgaatgttagctgcagtagtggctgctcttatttgtttcttagcctataattttttctttattgccccgcgttatacnnnnnnnnnngcgttatacctttcagatttcagcacaccaaggggtagtcaccgttgttgctttttttgcagcagctttaattgccgggcgtttagcttctcagttacgccagcaagttttgtctttaaaagctgcgaatgcctacactacggtaatgcaagacttggcgcgtaa

SEQ ID NO: 69415 - DNA, 1275 bp, Acinetobacter baumannii
  misc_feature (1156)..(1165): n is a, c, g, or t
atggaagaaggtgacttctaccacggtgaaaagtcaatgacacttgaccgtccacgcaatgtaaaaatggaacttatcacaaacagtggtaagagcattgttcttaagccaaaagttgcgcttcaagaaggcgaaatcattgactcaatgttcatgagcaaaaaagcgctttgcgacttctatgagaaacaacttgatgactgccgtgaagcaggaattttattctcattacacgtaaaagcgacaatgatgaaagtttcacacccgatcgttttcggtcactgtgtgaaaatctactataaagaagctttcgaaaaacacggtaagttgtttgacgaattaggtattaacgtaaataacggtatggctgggttatacgagaaaatcgaaactcttccaacctcattacgtgaagaaatcattgaagatttacatgcttgccaagaacaccgtcctgcacttgcgatggttgactcagcaaaaggtatcactaacttccattcacctaacgacatcatcgtagatgcttctatgcctgcaatgatccgtgctggtggtaaaatgtggggtgctgatggtaagcaatacgatgctaaggcagtaatgccagaatcaacatttgcccgtatttaccaagaaatgatcaatttctgtaaatggcatggtaactttgatccaaaaacaatgggtacagtaccaaacgttggtttgatggctcaaaaagctgaagaatacggttctcacgacaagacttttgaaattcctgaagcaggtattgcaaatattactgatcttgacactggtgaagtgttattgactcaaaatgttgaagaaggcgatatctggcgtatgtgtcaggtgaaagacgctccgattcgtgactgggtaaaacttgcagtaactcgtgcacgtaactcaggcatgcctgcgatcttctggcttgacccataccgtccacacgaaaatgaattgatcaagaaagtacagaagtacttaaaagatcacgatacgactggtcttgatatccagatcatgtctcaagtacgtgcaatgcgttacacacttgagcgtgtagttcgtggcctcgatacaatttctgtaaccggtaacatcttacgcgactacttaactgacttgttcccaattatggaacttnnnnnnnnnncgaaactggtgcgggtggttcagcacctaaacacgtacaacaacttgtggaagaaaaccacttacgttgggattcgcttggtgaattccttgcgcttgcagtttctctag

SEQ ID NO: 69416 - DNA, 345 bp, Acinetobacter baumannii; identical to SEQ ID NO: 46540

SEQ ID NO: 69417 - DNA, 657 bp, Acinetobacter baumannii; identical to SEQ ID NO: 59203

SEQ ID NO: 69418 - DNA, 123 bp, Acinetobacter baumannii
atgacgaaaaagccatatttggaatattcgcgctcagctgaagaaatcgaatatatgaaagctttgaaaaaagtatttgacccgaatggcattatgaatccgggtaaattatttgatctttaa

SEQ ID NO: 69419 - DNA, 918 bp, Acinetobacter baumannii; identical to SEQ ID NO: 46807

SEQ ID NO: 69420 - DNA, 750 bp, Acinetobacter baumannii; identical to SEQ ID NO: 46764

SEQ ID NO: 69421 - DNA, 762 bp, Acinetobacter baumannii; identical to SEQ ID NO: 69352

SEQ ID NO: 69422 - DNA, 258 bp, Acinetobacter baumannii; identical to SEQ ID NO: 46674

SEQ ID NO: 69423 - DNA, 336 bp, Acinetobacter baumannii; identical to SEQ ID NO: 46673

SEQ ID NO: 69424 - DNA, 249 bp, Acinetobacter baumannii; identical to SEQ ID NO: 46672

SEQ ID NO: 69425 - DNA, 435 bp, Acinetobacter baumannii; identical to SEQ ID NO: 46671

SEQ ID NO: 69426 - DNA, 1248 bp, Acinetobacter baumannii; identical to SEQ ID NO: 46669

SEQ ID NO: 69427 - DNA, 204 bp, Acinetobacter baumannii; identical to SEQ ID NO: 46668

SEQ ID NO: 69428 - DNA, 468 bp, Acinetobacter baumannii
atgtccgtatggctggccatgcttattggtgctggtattggtattattatcacgacgcttattttatcaaatacccgtaatggccgaatcaaggctgaatacgagcaatatattgccgagttggagcttgagcatcaacaagcccttgcccaagcacaaaagagaagtgtaaatacgagccgcgccgtattaaaaggaaaaatggcagaacaatttgcgccagtcttgccggaatttcagtatttgccaagtgatgccaagtttatgggcgacccggttgattatattattttcgatggctataccgattttcgagatggagacgggactgccgatgatattcaaattattttgctggatgtaaaaagtggaggggcacgtttaacaaaagggcagcaagcgattgctcaggcaattaaggaagggaaagttcgttttgaaactttaagaatagattttgaagattaa

SEQ ID NO: 69429 - DNA, 576 bp, Acinetobacter baumannii; identical to SEQ ID NO: 48902

SEQ ID NO: 69430 - DNA, 366 bp, Acinetobacter baumannii; identical to SEQ ID NO: 48905

SEQ ID NO: 69431 - DNA, 369 bp, Acinetobacter baumannii; identical to SEQ ID NO: 57619

SEQ ID NO: 69432 - DNA, 363 bp, Acinetobacter baumannii
gtgagatatgcagcaagaagaaaacaggatatttccgtttccaccacaccgctagaggtggtaattccactggaacaaccagtaaagatctattcggctaaagaattagcagctatgccactttcagttatgaatgccgcaattgaggctcaggaaagattttatcaacttgaagaattaacccatatgggggggcaggctatagcagttcgccgtctcatggaggatgggcacaaactaattcaggtgaaagaaaagtctcgtattcgctacaaaatcaacaacgaatttattcctccaagaattattcgtcagttggaaatgcgcggtcttgtaaaattaggagcagtcactgatgtataa

SEQ ID NO: 69433 - DNA, 657 bp, Acinetobacter baumannii
ttggagttatttataaaaactcttactcctattgttgatttaattgaagattttaattttggctttgtagataagattttttcttttaattatacaaatacatatattaagttttatgacgctagtgtagatacagattttcttcatggaagttgtggagaaaatcaaaatattgtgttgggtatttctgagttaaaaggagatttattaagaaatttaaaagcttatggttttactaaatatcatcaaaaactatttaagaatacagattatcagtttctaagtgaggatagaaatatacagaagatactaaacttttggaaggtaattaaagaaaggaatcttgcaattacgttggctgaaaaagagaagcatattataaatatctttatttggggacattctttagatatttctgatgaaatttatattaatgaagttttttcattaaatgatggaaaatactttaatactaacgtaataatttattattttgataaccatgcgaaatttaatttacttactaatcttttgcatattttaggtaaagaaaaagttgagctatggatgaaaaagggctggttgaaatttgaacctaatcctaatattgtagaacttaataatattgaacctgtggatttaactaaattgaaataa

SEQ ID NO: 69434 - DNA, 636 bp, Acinetobacter baumannii; identical to SEQ ID NO: 53529

SEQ ID NO: 69435 - DNA, 381 bp, Acinetobacter baumannii; identical to SEQ ID NO: 47135

SEQ ID NO: 69436 - DNA, 396 bp, Acinetobacter baumannii; identical to SEQ ID NO: 47244

SEQ ID NO: 69437 - DNA, 135 bp, Acinetobacter baumannii
atggctgaactatttgcgtttttatcaattgccattgcaacacctactccgataagaccgaacattccagaaactgggctggcagaagcattgcttgaatcaccaactaatatttggctgtcttttataaagtaa

SEQ ID NO: 69438 - DNA, 783 bp, Acinetobacter baumannii; identical to SEQ ID NO: 47349

SEQ ID NO: 69439 - DNA, 270 bp, Acinetobacter baumannii
gtggtatgtgcagataaaggctatgattcagaaccactgcgtgaacagatcaggaaaacagggactaaagcgaatataccaaagaaaacaaatagccaatcgaacaatgaccatatggactggtatttatataaaatcaggcatttagttgaaaatatgttttgtagattaaagcaatttagaggaatagctactcgatatgacaagctcaaaagaaattatcaaagttctgttgctttagcatgtatatttttatggctacctttatag

SEQ ID NO: 69440 - DNA, 390 bp, Acinetobacter baumannii; identical to SEQ ID NO: 47328

SEQ ID NO: 69441 - DNA, 783 bp, Acinetobacter baumannii; identical to SEQ ID NO: 47622

SEQ ID NO: 69442 - DNA, 531 bp, Acinetobacter baumannii; identical to SEQ ID NO: 47624

SEQ ID NO: 69443 - DNA, 288 bp, Acinetobacter baumannii; identical to SEQ ID NO: 47623

SEQ ID NO: 69444 - DNA, 783 bp, Acinetobacter baumannii; identical to SEQ ID NO: 47622

SEQ ID NO: 69445 - DNA, 588 bp, Acinetobacter baumannii; identical to SEQ ID NO: 47621

SEQ ID NO: 69446 - DNA, 996 bp, Acinetobacter baumannii
atgaataagatgatgaatgctcttatcctagaaaattttggtgatcatgaatttacacgtgtagaactccctatacctcaaccagaggctgggcaagttctagtacgtattcatgctagtggtgtaaaccctattgattataaaattcgtcttggtgaagcaccatatgctatgccagagcttcctgccgtgttgggaacagatatggctggggttgtaactgctattggtgaaggtgtcactcacttcaacgtcggagatgaagtttacggtctgattggtggcgttcgtggtcttcaaggatctttagcagaatatgttgtagcagatgctgatctgatcgcattaaagccacggaatatctctatgcgcgaggcagcagtactaccattgacgttcctcaccgcttgggaaggtttagtggataatgctaaggtccaaccagggcaaactgtactggttcagggtggtgctggtggcgttggttatatggttgttcagcttgcaaaagcacttgatgcaaatgtttgggcgactggtcgtacagctgatcaatcactgatttcagaactcggtgcaacacctctcgattacacaacagcatcttccgatgacattattgctgcaagccctgagggtcaaggttttaacattgtttacgacactgtgggtggtccagtactcgaagcttcactttccatgacaactcactatggccacattaccagctgtgctgcatttggtaatcataatttagcgatttcatctctacggtgtgccacactgtctggcgtattcgtcctattgccgatgttaacaggcaatcgccgttctcatcatggtgatgtccttaagatcgccactcgtctcgttgaggaaggtaaactgcgtcctattgttgatcctcgtcattttacactagaccaagcgattgaggctcatgatgctgttcaagatcgctctgccaatattaaggtcgttattgatgtcatttaa

SEQ ID NO: 69447 - DNA, 1017 bp, Acinetobacter baumannii
atgtcatttaacgcacttcaggccaagacttggcgcttcaattgtattggagatacagatgttctgacattagaaacacttcctgtggctttaccagccgcaggagaagttctaatacagatgaaaacgatcggactcaaccgggctgatgtaatgtttcggcgtggtacttatattcaaaaagcagtattcccctctcgtctgggatatgagggagcaggcgtagttcttgcgataggtgaagctgtacgtcaattttctccaggagatgcagtatcgattcttccgactgacaatctagctaaatatgggacatatacggacaagcttctgattccagaaacttttttagttcacaaacccgacagtttaagctgggaagaagcttcttcaatctggatgcagtatttgacggcttggggtggtgtaatccatgctggtggagtttcgaaaggaaaaacgatcttgatcacagcagcttcaagtagcgtaggactagctgcgatacagatcgctgaagcagcgggtgctaaggtaattgcaagtacacagacgatagagaaaaagcaacgtttactagatctcggtgttaaaaatgttatagccagtgaagatgaaccagatttgtatgaggcgcttgttttacgtttgggtggagaacatcttgatgtcgccttcgatgctgtaggagggccacatattgaacagattgcaaaagcgatgtctgtgggaggaactatggtcatgcatggtgcacttagcccggagatcacaccatttccccttaaagttgcattacgcaagagcttaaccatgcgaggttttttgttccttgaggttctccatgaccctgttctaagggagcaagccagacgatttattcttagcagtataggtgcaggatatcttcgtccagtgatcgactgttgctttaactttgaggacatgcatgacgctcagcgctatcttgaatcaaatcagaaaataggaaaaattgtagttactctgaatacatga

SEQ ID NO: 69448 - DNA, 681 bp, Acinetobacter baumannii
gtgggatcgattgatgctctgcttgtaaaagacaccaaggaaaaacgagatgaaatgcgtgggaccgtccgtcttactgtgtcgtcagtgttagggcgtaaattggtagtacctgcactagcagaatttgccacacgttatccagatattgtcgtggattgtgtgctaacagattcacactcggatgtgatcgatgagcgaatagatatcgggatcagatttggatttttgccggacaatcgatatgtggcaagggaattggcgaaagtgaacttttattctgtgggtacgccagagttaattgataaggttggaatgcccaaaaaaattattgaccttgataaataccctctaacagcactattcgatcataaaacagggcgttactggccatggacattcaccgaaagtcgaagcttcacgccatcaaagcctcgttttattacagatgatctagaagctgaatttcaagctattctcgctggagttggattcggacacatgcctggatttctagttttgccgtggcttaggagtggtaagctcattcagatacttcatgaggaaacctctccagtttggcgcctgtatttatatcgtccacagcggggcccgacacctttgcgaatccgagcattgtttgattacttagcggaagtgttgggccatatagaaacctga

SEQ ID NO: 69449 - DNA, 270 bp, Acinetobacter baumannii
gtggtatgtgcagataaaggctatgattcagaaccactgcgtgaacagatcaggaaaacagggactaaagcgaatataccaaagaaaacaaatagccaatcgaacaatgaccatatggactggtatttatataaaatcaggcatttagttgaaaatatgttttgtagattaaagcaatttagaggaatagctactcgatatgacaagctcaaaagaaattatcaaagttctgttgctttagcatgtatatttttatggctaccgttatag

SEQ ID NO: 69450 - DNA, 270 bp, Acinetobacter baumannii; identical to SEQ ID NO: 69439

SEQ ID NO: 69451 - DNA, 270 bp, Acinetobacter baumannii; identical to SEQ ID NO: 69439

SEQ ID NO: 69452 - DNA, 276 bp, Acinetobacter baumannii
atgaaaattgagtcattggaacaacaaatttctaagcaacaagagcggttaaaacagttaaaagctcaaaaacaagctgctgtagctcgtgaacgttctaaacaaaaagagttagaacgaaagaatgatacaagacgtaagattttaatcggctcttgtatgttaaaaatcgtcgaaaatgacactgttgctcatgaaaagttaatggctcagctcgataaatacttaaccgaaaatcgagatagagaattatttaatcttccattaaaggagtga

SEQ ID NO: 69453 - DNA, 963 bp, Acinetobacter baumannii; identical to SEQ ID NO: 47782

SEQ ID NO: 69454 - DNA, 447 bp, Acinetobacter baumannii; identical to SEQ ID NO: 54630

SEQ ID NO: 69455 - DNA, 447 bp, Acinetobacter baumannii
gtgcatgttgtacgcaatagcctgagatttgtaagctggaaagactacaaagctgttacgtcgggtctgaaagcgatttatcaggcaagtacagaggaaaatgctttaaaatccctagacatcttctgtgatcaatggaatcaccagtatcccaaaattggagaatcctggcgggccaattgggaaaatatccgaacgatctttagctatccagccgaaatacgtcatgcaatttatacaacaaatgcgattgagtcgttgaatagcgtaatacgccattcaacgaagaaaaggaaaatcttttcatctgatgactcagtaaagaaggtcatttacttagcaacatcaaatgctgcgaagaaatggacgatgccaattcaaaattggcgtttagcaatgaattggtttacgattcagttcgatgatcgattaaaagatcatttataa

SEQ ID NO: 69456 - DNA, 336 bp, Acinetobacter baumannii; identical to SEQ ID NO: 47820

SEQ ID NO: 69457 - DNA, 342 bp, Acinetobacter baumannii
atgccaaagaatgtgattcatcattccgacagaggtgtgcaatatctttccattcgctataccaaccgtttagaagcagcgaatttacgagcatcagtcggcactacgggggattcatacgataatgcattggctgaaacagtgaatgggttgtacaaaacagaggtgattgaatatttaaaagcagattggcgtggtttgggtgatatacaacttgccacattaaatttggtagattggttcaataaagaacgtatacatagttcactaggttatgtatcaccttttgattttgaagcgatgtactatgataaaattaacccgttaggtcaggtggcctaa

SEQ ID NO: 69458 - DNA, 393 bp, Acinetobacter baumannii
atgaaacaaattgcttcgcctatctttcaatcttttctagtacttctgtcccgcaaccaaattgatggatggacatcaaacaaaatttggaacaacttgaatctttcaaaagatgaaaaggaacgaatcaaccagcaacaactgtatagactgctcagaaagcttgtaaaacaaggtcatttgactaaacatattcactctaataatccaaggctttcaacatttgttgaaacagaaagcatgcacgaattcagaaaaaaatttgaccttttagcacaagcactcatagactttccagaactaagaactaatattttgaaaagaaaaaatcaattacttcaagatattgaaaaactaaaggcttacactgactttttaacatcactgatataa

SEQ ID NO: 69459 - DNA, 423 bp, Acinetobacter baumannii; identical to SEQ ID NO: 47442

SEQ ID NO: 69460 - DNA, 477 bp, Acinetobacter baumannii
atggctaatactagatatgaagatgataacaatagttcaggtacttcaaatcgtggatttgcaagtatggatcctgaaagagtcagagaaatagccagtaaaggtgggcgagctgcacatgccagtggcaatgcgcatgaatttacttcagaagaagctcgtgaagctggccgtgctgcacatgccagtggtaacgcacatgaatttacctcagaagaagctcgtgaagctggtgctttaagtcataaaaacgatgatcgtaatggtcgtggtcgcagccgttatgatgacgacgaagatgatgaccgcggccgttcaagcggtcgaggccgtggccgcagtcgttatgatgatgacgacgaagatgatgatcgcggtcgctcaggcggtcgaggccgtggccgcagtcgtgatgatgacgacgaagatgatgatcgtggtcgttcaggtggccgaggccgtggccgcagtcgttga

SEQ ID NO: 69461 - DNA, 1236 bp, Acinetobacter baumannii
atggcttcatttaatgtcagcatactttttgaaacaccacctaatgttttaacttttaccgcgtctggttcgcaatccatatctttggatgatgccggtgtctataaatttattcttgctccaaattcctcaacctcgagtgctttaagtaacttattatctctgaacttattaggtaatttagtattatcgtctgacgatgtagtagcaaccattaataatacagatcttattactggtaatgttttatctaatgatactgctgcaccgataggtttagatttgtcaattgtttccattaaagaaactacagcaggtgtagatgaaactgtagtgtctggagctcctaaagtcattgaaggcaagtatggtactttaactatagattcaactggtgcatatagttatcaaatgacggctaatgcaactgctttaggtaaggttgaagcatttacttataccgtacaagataatgatggccactcaaaacaggcacctatttatattcgtttggactctaatttagttacattagattggacgggtaaaacaggactacaagaagctgataagttagtaacgcaactgaccgctgataataaggcttctgcaggtacagttactactttatttgatcaggtattaaatggttctggtgattctttaaatagtattcaggtaactggcagtaacggtgcattacctacttcacctcctgcgacaggtagtacggcaattccagatgattctgggcgttttaccctaggtgtagggcaaacagcatatatttctttcacatcaatattaccatcaaatgtgactcagaattttggtctaggaggaaatcaaaccagtgcttataatgtggttattgaactagagagagatggagcagtactagatactcaattggccacttggacatcaaccatcagtggtacaaaatattattataaagtgactaatacaggaacttcatcggctgattatgatttaaatattgcttatggtgatggttcaggattgtttaactggacgaatactactggtaagacatttggtattaataatattcaattagatattacaggtacaacatatacagcatctactgtatcaggtgacctaatctctaatgacttattgtattcaagtgaaccgtaccgggtttgtcggagagtcaatattctgagagactatcccgatgacaaaaccaaactatacccccgaaattag

SEQ ID NO: 69462 - DNA, 447 bp, Acinetobacter baumannii
gtgcatgttgtacgcaatagcctgagatttgtaagctggaaagactacaaggctgttacgtcgggtctgaaagcgatttatcaggcaagtacagaggaaaatgctttaaagtccctagacatcttctgtgatcaatggaatcaccagtatcccaaaattggagaatcctggcgggccaattgggaaaatatccgaacgatctttagctatccagccgaaatacgtcatgcaatttatacaacaaatgcgattgagtcgttgaatagcgtaatacgccattcaacgaagaaaaggaaaatcttttcatctgatgactcagtaaagaaggttatttacttagcaacatcaaatgctgcgaagaaatggacgatgccaattcaaaattggcgtttagcaatgaattggtttacgattcagttcgatgatcgattaaaagatcatttataa

SEQ ID NO: 69463 - DNA, 174 bp, Acinetobacter baumannii; identical to SEQ ID NO: 47989

SEQ ID NO: 69464 - DNA, 270 bp, Acinetobacter baumannii; identical to SEQ ID NO: 69439

SEQ ID NO: 69465 - DNA, 174 bp, Acinetobacter baumannii
gtgagcacaaaagaactcgatcataaccaccgttatgaaattaaatctcccgatgatgtttcacaattaatttccaaatttgcagggaagggtggcgaattcaaacatgaggtgcgacagtttgaaaagtcttatgataatcaacaagctgagcaaatttctctaatggtgtaa

SEQ ID NO: 69466 - DNA, 501 bp, Acinetobacter baumannii
gtgggtgactttacgtatattcaaactcattcaggctgggtctataccgcatttattattgatgtgttctcacgagcaattgttggatggaaagtatcaacacggatgaataccgacatggtgctcgctgcacttgagcaggcattgcatgatcgaggaatgccaaataacgtgattcatcatagtgacagaggcgtacagtatctttcaattcgctataccaaccgtttagaagcagcgaatttacgagcatcagtcggcactacgggggattcatacgataatgcattggctgaaacagtgaatgggttgtacaaaacagaggtgattgaatatttaaaagcagattggcgtggtttgggtgatatacaacttgccacattaaatttggtagattggttcaataaagaacgtatacatagttcactaggttatgtatcaccttttgattttgaagcgatgtactatgataaaattaacccgttaggtcaggtggcttaa

SEQ ID NO: 69467 - DNA, 267 bp, Acinetobacter baumannii
ttgattgaatctgaaaaagattatccatcgaattgggctgcgatcaccgctattgctcccaagataggttgtactcctgaaacattgcgtgtttggtatttaaagcatctggatcaactaaatcctgccaaagtacaacagatatctgaccaagaaaaaatgaagcaaatggaacgtgaaattaaagaattaaaacgtgccaatgaaattctacgtaaagcagccgcttttttcgcccaggcggagctcgaccgcccacacaaataa

SEQ ID NO: 69468 - DNA, 318 bp, Acinetobacter baumannii
atgacaaaaccaaactatacccccgaaattagagaaagagcggttcaattactaattgaatctgaaaaagattatccttctacttgggcagcaatcacagctattgctcctaaaatcggttgtactcctgaaacattgcgtgtttggtatttaaagcatctggatcaactaaatcctgccaaagtacaacagatatctgaccaagaaaaaatgaagcaaatggaacgtgaaaataaagaactgcaacgcgccaatgaaattctacgtaaagcagccgcttttttcgcccaggcggagctcgaccgcccacacaaataa

SEQ ID NO: 69469 - DNA, 255 bp, Acinetobacter baumannii
atgaaaaagctaggtatacaaggtgtttggcgaggtaagaacaaacaaaccacccgtagccgagatgaccaaaaacgagcagatgatttagtgaaacgtaattttactgctgatcatcctgacccttgcgaagcagtgcttctcaggtcagtgactttacgtatattcaaactcattcaggctgggtctataccgcctttattattgatgtgttctcacgagcaattgttggctggaaagtatctacacggatga

SEQ ID NO: 69470 - DNA, 126 bp, Acinetobacter baumannii
atgtttgccgaaactccctcttcacgtccacctcaactcccgtttaaagatactattctagttaagttagtaactaaattttatcaaattaataagaaatttcatttagtttttcaattaatttaa

SEQ ID NO: 69471 - DNA, 1548 bp, Acinetobacter baumannii
atggactattacaacctattaaacgaaaatgttttaagtgttacttctacacaaaatactcaaattaaccttaaaataaataccattaaagaaaattttattaggcctgaagcttatggagcacaggctaataatccaaattttgataatacgaatgctttaaatgcagcatttgctacaggaaaaaatatttatagtactcctgataaaacatattacgtaactaaaaatctaagaactagaggtcagcgtttaattggcgggtggaaaattcattcaaaaaagagtacgtcacgtgctggaatttgggagcaaacagtttccacggttgatgagcctaaagtaaatacgaatataattagaatgatgtatgttgctacagcttatgatttatcagagtttttatatattaaatctctagggtttaacgtattacagcactattcaggaatgcatattcagggttgggacaatgatggaaatgtccaaaatatgcttgataatgctaaaagtgctggtttaaaagttattgtgggaacacaaaatgatccaggggctagagcaaacctagtatcatgggtgaagagtatagattctcatcctgctattattggctatagtgtatttgatgagccagttcacaatggaataagtgtcacagaacaaaatgcaaaaatagctctacttagaagtataaccaataagttacttacaactgttgaatttacagtagatcctttaaaaaagaggttatctaataattacgatattatttttttagatatttataatgattcaaatgcagatttaacaaatgaagatgcaactcaaaaagatttgcataaaatgcaagtaacatttgatttatacaaaaaacaatatcatgcacgaattatcccagttgtaatgggttttaaatatgtgaatggagcaccattaaatagaattgtaaaaacttcaaaattatttgctaaagtaagcagtggaagtttaggagtatttatttgggatggcgatgctgagccgtctattgaaacttcagtacgtaattcatctcaattagaagatatgagtaaagaaattaataaatttaaaagtctaaaactgcaaactcataaagccttattagaggaagatgtcacagaaatggataaaaaaaatcaaagttttaaagaagtatcgaaaaatcaactatcccaagatctatactctataaatatatttaaagagataaataattatccaccacaagttcttgatagatttaatgataattttcaattttgttcttcaaagataatatggaaggctttatcagctttatggtttaagggaacttatggtgcatatgtttctaatatgattatacataaatataacaactttatattttatgcaccagtaatgcaacctgataatatttcactaaaatttttacttgataaatctttaaaatattataatttagaaaattttcctaatgatgctggtaattataattttaagtatgcgaataaatttctaactgattttatttgtattaaataa

SEQ ID NO: 69472 - DNA, 330 bp, Acinetobacter baumannii
  misc_feature (318)..(327): n is a, c, g, or t
gtgaacaaccctgcttttcgtaacattagctttgatgaactaaaagaaaattatattgaagcgactcatgcactaattgaaggtggtgcagacattatcctgattgaaactgtatttgatactttaaactgtaaagcagcgatttttgcagtcaaagaagtattcaaacaaattggtcgcgaattaccaattatgatttcagggaccattaccgatgcatcaggccgtactttaacaggtcagacagcggaagctttctggaactcggttcgtcatggcgatttgctttcaatcggttttaactgtgcccttggtgcnnnnnnnnnntaa

SEQ ID NO: 69473 - DNA, 222 bp, Acinetobacter baumannii
atggcgaatgaaaatgcaaaattagaagacctactttggggtgcggctgaattcctgcgtgggcaaattgatgcttctgactataaacagtatgtatttccgcttttgttctttaagcgtttgtctgatgtatatgatgatgagcttgaagatgccaaaaaagaaatggatacagatgaccctgtctcttatacacatctgacgctgccgacgaaggcttag

SEQ ID NO: 69474 - DNA, 798 bp, Acinetobacter baumannii
  misc_feature (757)..(766): n is a, c, g, or t
atgttagaacttatacttgttttatttattgctatttttctagcatggtgcctcagtaaatatctatccaaagtgatggcaaatcagccgatgtggggggatggattatttcgctggattgaaaatcctgtataccgcttattaggtgtatctccacaacaacaaatgaattggaaacaatattctctagcatttgttgtgagctgtatttttcttgcagtggctattcttactatttttatgacgcaagcatggctaccattaaaccctaaccatgcaccaaatatgagttgggatttagcattacacacggttatttcatttttaaccaacaccaaccaacagcattattctgggcaagctcaattgtcttatttgtctcaaatgacaggtgttgtgggtttacaagtcattacgcccatgatggggctggctttggtggttgcgaccttaagagctttcttttatcagcgcccaagccatattgcggccgatattgccgagcagccagatcaaattttaattggtaactattgggcagatgtaattcgtcctacagttcgctttttgcttcccctctgttttgtctggtcattattgcttaacagccaaggcgtgccagcaactttccaaggtgggccagaagtacagcttattgataaagccaatagcgttgaaactcaaaaaattcctttagggccagttgcgccaatggtggcgattaagcaattaggtagtaacggtggtggttggtacnnnnnnnnnnttggtacggtccaaatagttctgtgcctttag

SEQ ID NO: 69475 - DNA, 585 bp, Acinetobacter baumannii
ttgaagattaagaatttttttaaaaatgaaaaactcgatctaacgtgcttagcccaacgaacagaacaccaaattataggacctatttatgagccaagtaatcaagaaaaattcctaaatttacttgaacgatgtgctgaagataaaagtgttcaagatttatattggttaacaccatcaaatcctttttttggtcaatcaacaaattttaagaatttcttgaataaactaattacttctgaaagctatgatttaaaaatgtttcttccatgcacatctttgaagaatgcaccatgggagaataatcatattgaacgccctctattcagtagtgggaagtttcttgcattagatgaaagtggcttatttaatagtgattttgagatacttgttgttaaaaacaagttttgtattgtgattgcccatgtacatgacagtgatgcacctgtcctgacagctgtaccaattggcgagttaacacttgatttaaatgtagtgaatagttttgccgatgtattcgctaaatcgaagcaacaagcggatgaagaacgaggaccatgctatggtgttatcactgttaaatga

SEQ ID NO: 69476 - DNA, 471 bp, Acinetobacter baumannii
atgcaacagaaacttcaactcccttttccatttattaattatgaacgagaccactttccttataattttgaaaaactgaaactaggcacatcctatatcgtttggtggtatgggggtattttaagagaacaatctcataaatctatacgggttttctatcaggtcattcttcgtgaagttaaaaagactgaaaatgaacttatttttggagagtacataactgaaaacttaccaatcgatccatatctcacttattttaatctgaatcatatattccagataagtgaaactcatactgctacaattaatagttcgattacttccacagttttttctctaataacttcttttaatgaatcgaattggtgcattattgatgttaatgaacaaaaacttataaatccagatattcaatcttttcttgaagcatatccccttccccctgatgttagggataacaattatttctaa

SEQ ID NO: 69477 - DNA, 807 bp, Acinetobacter baumannii
atgacgctgaatagtgatttccagaaactatatgtagatggattaatccatttgtatgaacttgatgccagcagcttaggtgctggcatcttgcgttttcacgggcatatttcttttcaagactgggagaaaatctactcttcaattggttccgaaggtttaattggtgccgactctggcagtattggaaagatatttgatattggtgatcagaaggtatggaaccgcaatattatttggcagggacaaatttttgagccaatggcacttgaggtgtctggtcttgaaatgcgtagtgatggtaaagcttcagcaccaactttaagcatggccaacaatatcaacggcattcaaaatgctgtgtctgcttactgtttgcagtttaaagactttgctggtgcaaaacttaaagtgattaccacacttgctaaatacttagatgctgaaaacttcacagaaggcaatccaactgcatcgaatgaatcaaaagagcaaatctggtacatcgagcaaaagacatctgaaaatgcacaacaagtgactttcgagctgtccaatccaatcgattttgagggtttgaaaatcccagttcgacaaattacttcgctttgtcattggtgcatggtcgggaagtaccggggcgaagaatgtggttacacaggtgtagcaatgttcactgataaagatgagccaactgataatccggcacttgatcgatgcggtggacgtttacgttcttgtcgcttgcgcttcggtgaaaataaaccgctgccatttggtggtttcccggcttcaagcttattgtga

SEQ ID NO: 69478 - DNA, 840 bp, Acinetobacter baumannii
atgaaaaaaaatactgggaagccttatgaacattttgttcaaacactttatcaagcaattttggcagctgagtttactggatttggtgggcaaaaaaacattaaagttgagaccaataaagtattaacaggtaaaaatggtattaaacgagagtttgatatttattgggaatttacacagggaggtttcatatataagaatgtaatcgaatgtaaagactataatagcaaaataaagattgaaaaaattgatgctttagaaagtaaattgcgtgacttccccaatctcgtaggtatttttgcaaccacaaagggctatcaatcaggggctgaacaaaaagctcgagattgtggaatcgaacttttaattgttagagaacaaaatgatgaggactggaccgataaagatggtacgccatgtttaagagaaataaatatcagcatgaatgctatatttcccgcaagtattaccaatttagacttcaaattaccccttaattcgaaattaccaaaaacaaatgaaatgaataatcaaattgtaatatgtaatttggaatctggtgatagatatacagcacatgacctgcaatttaggttactaaaagatcatgaagagagtgatggagaatttgaaaaagagtatttatttaaagggaaagtgattttaccagatgctgaatttcaaattttaggctacaaagtcaactatatcatccataaaattgctgtatcagagataaatatcgatttttcaaaaaaattgaagggagtgattgagtttttaaaccaaggaagaaaagcaaaagtttatgatgagtttgtaaattttatagatgaatag

SEQ ID NO: 69479 - DNA, 339 bp, Acinetobacter baumannii
gtggcaagtgatacaaatggtaatggtggagcgggtaacttagaccatgctattgctgatgcagatttatatccaaaagtagttcgtacttttgcttggcatattaatgctgacgagccgacggttctagattacaacgaagaatataaaactgatgagcaaaaagccttgttctatggtgaagatgcctatcgttcttcagaccatgaccctgtgattgtcgatctagatttaaatggcaaagactcgaatcagccaaatgataaccagaaaagtccaattttcgatttcttatctcaattaatggaatggattagtcagctttttaaacgtagttaa

SEQ ID NO: 69480 - DNA, 450 bp, Acinetobacter baumannii
atgaataaaataatggaaaaagtattactagcattagaaaattatagtaaagatttccctaatgaagccaacattttgtttattggtcataaactttatgttgagattatggatatccaagcagtttggtttcatacttttgtccaacacaatagaactttacttggatgtgaattagttgtgattcataaagatgattttgagttattggcttcctctcatgaacagatgcaactaatttcaaagcgccatgttggtactacagatgatattcaattaatgaagttgccaaatagctgggaaactgagatggattattcgaaacctgacacagtgccactacatcctgaatatataacaatgcctttttacctattagaaagctataggaaacaattccagccaactcaaaaacaatatgctcgtagaggattcacccgtgaatattga

SEQ ID NO: 69481 - DNA, 360 bp, Acinetobacter baumannii
gtgaaaaaacttattattttaattcctttgcttcttacgggctgcctaggaaatccatttctagaaaagaaacttgaggccaaaaaagggcttactaaatctcagttaattagtgattttgggattcctgatcgagaatataaagcagatgactttgaaatagtggaatataaccaaagtacaattagttcacgaaatacatcggactacataacaggctaccagaataaaggtttatatagtcagcaatatcagatcgaagttcctcaaaaaaagattcagcaatggcactgtaagattgaatttaggttaattgatggcgtagtgaaaaactatagatacagtgggaataactgctaa

SEQ ID NO: 69482 - DNA, 2022 bp, Acinetobacter baumannii
atggcagtaccagaacagacgccatttatagaatatacagccaatgggactactacaattttccctttaacttttgactgtgataattctgattatttaattgtaaagctaaatgatgaggttgcaactacagggtcatgggcgctaacagataaatctgtcaaatttgttgttgcgccagaaaatggcatgaaagtctcaattcaacgtgacacccctcttgagcgtaccacagactatcagctttataacaattctctccaaccctctgcgatcaataaagactttgatgcaatctggcgaaaacttcaagagcttggctataccgactctgttctacttcgaatgattattcaagaaattttagatcgaaaagaaggcgatgcctttttgctagcgaaacttgccgctgaagaattggcaagaatcaatgctgatgcatacctccaatctcaaattagtacaagtagtctcgatatctcaaagctacagcagaaacttgccaaagagatccttgaccgaatcgaaggcgatagagacgccaagcaatacgcaaaagattacacagattttatgatttcaaaggtggacgaagaaatgccaatttttgacggtgtagctgacaatattgtgattactgaaaatggtgatacacaacgagatttaaacaagtactcaaagcgaggggctattaatctttatgatccagactttgctactaagcatgggtatgatgaaggccatataatcgttttaaacaatggctctcgagtaagaagccaaattgataacaatcccaatgatccaaatgcaaacatggcaaattgggaatttgtagatcttgcacatgaacgaacctatgctccgattttaggttcagcagttcgatttatattaaacccaattaaagccagttttttatttggtttaagcgaccctaatccgcttgatgatttagagcgagatttcttccgaggactttctaataaaaattcatgggcagttgaaaatcttggggtggggtcaagctctagaggccgtaatggttgccctaaagcctatctttcatctactgatgggcatgactgtattacatatggtgttgtatcccatgcatttggtgcagcttgctgtactggtaatcctgatgaacctgaagatggtacaaattggggttatggatcattggcaggcggacgaaattcatgggcgagaggtaaaaaagcccttgcatttggcgagtggtgcgatgcgctgagtcgttactgtgttgcaatgggttataaagcaattgcaggaccatcggatcctgaagatccaaattatgatgattatggtggagatggcgcagaaggcgctgcggcatatgcccacggttatgaagtaaaagcccatggtaactttgccttagccattggagcgtttgttgaagcactcaatggggcgcaagctattggaagaggcctatttacagaacaaggcattaagccactcaaggttagcaaacgtggtttaggcattggttataatgttgatattccatcaattttttgtaaggaaggcgacggtatttctaaaaacggtgcatctattggttttaatactgaaacgccaactaatcgttatgactttagattccgtcaatcagatgttatggccttcaatattgattctattgaagaaggttcacagatggctttagtcgtgaatggacttaaaaacaatctagtcgaccgtatggaactgttcaaaatcggtgtaacacatccaaactctggaactccagttggagtaacgacattttatcaaaatggtaacccatgtgctcagttcacagatattggcaatgctgtttttaatggttgggtagatgccgagaagggattttacgttgatggtattaaagtcatcggtggccaaggcaatactattcctaatgccggaactgatacaagctcacttcaggcgacagtcaatgcaattttggccgtgttgcgtgcacatggactgattgcaacttaa

SEQ ID NO: 69483 - DNA, 405 bp, Acinetobacter baumannii
atgttattgttttcttcagaaaggattaataagtataattatttctctttaatgacttttttattttatgttcaaaggaaaaaacagtatcagcctatcagagatagaatttatgcaataataattcaaaaatttaatcagaataatctaaatgtctcaaatgattctgagttaattcacattttttttgactcacttagctgtccttatttaactaaaaatcaaaaaattaatataactaactctgcattaaattctattattaaattaaatgataatgaaattgatgtttttgtagaagaaatgagcaaaactaattggtttattgactggaacttgcaaacaaaagatgcaattcagcgtttgctgatgaaaaaagaattgaaatcaccctatgaaaattga

SEQ ID NO: 69484 - DNA, 411 bp, Acinetobacter baumannii
atgggattgaattttagaaaaagtataaaaattgctcctggaatccgtgtcaatattagtaaaaaagggctatcaagtgtttctgtgggtgggaaaggtgcacgtgtaaatgtaagtaagaagggtactcgcacaacagtaggtattccaggtactggtctttcttatacaacaaataccagctacaagaagtcaaaagggactttaaatgaccctattcacttaatacaacaagaaggttcagataaagaaaaaagaaacgtcttagttactattctgttatggatcggcatttttattttccctttcatttttgcatggtttactcttcaaagaaaatacacaaaatttgaaaaagtaatagcatttggatggttgctgttagttttgttcgctatggtttctaaataa

SEQ ID NO: 69485 - DNA, 675 bp, Acinetobacter baumannii
atgaaaaagataattttattgggtctaatgtttggactcgtgggttgtgcagcaccaaaatacaattatcaagccacgccacagaatgttagtagacctcctataggttcaattaacgaggcatttgtgggtgataaactattagaacaaggggtttttgttgaacgtgaagctatcaacgtcccaaaaactgctaaatctagtggatataccttcaatgcaggatactacttgaaaactggtgatgataaaaaaggacaatattatcaggctataaacatgattcctaacggaggtaacgttcagaagagtgtttttgttgatcctgtcaaggccgtcatgattgatgaagaaaatagactatgtgcaattactgtttttaatgctaaaagctgtacagaagagcatgaagctaaggccacaaaaataggagttgctacagataattcttttcaacaaacactaatttatagtggaaaagttgggaataaaataaatattggatatcgcgaattctctagcaatttagcaagacctgcttttaataacgatgtggaatatgatttaactgaatccagacaaattggttacaagggcgctcttttagagattttagatgctaataaccagaatataaaatacaaagtaattagaaactttaataaggtagattaa

SEQ ID NO: 69486 - DNA, 471 bp, Acinetobacter baumannii
atgaaaaagactatttttttgatcttggctataacaacttttgcaaatgctgagattgtgacgaacgcgaaaggacaaaaaatcgaacttaaaaatgatggtacatgggctgtagttactaagaacaaaataaccaaagttgaagatggaaaagagttcttcgcagaagtaagtgatggtaaagataagccaaccaaaattaaggtatatgcaaaagtagataacggcccaattcgattatttacagaatcagaagtagcagagaagataagaactactgctgaagttgcaaaaatcgggttaaaaaataagtattcctttattcctaaggttgcttatattgagcaggaaggaacaggtttaacaattgatcttgaatatacagctgaaaatagttatggggctgcaactgttgggcatcagaaagctaactacgctctagattcaaatgataagttaaaaatgtattag

SEQ ID NO: 69487 - DNA, 468 bp, Acinetobacter baumannii
atgagaaagttattcttgccacccaatgagcaggactataacccaacattgggagatggggtgattacccagcaactcacggcaggtatgccaaggcagagacgcaactttattggtgcaacacatagcgtcccgttaagttggtcgctcgatattgatcaaatggagttgttgctagccttttactttgcaaatcaatatgaccctcagcctttcttgatggatctgattttagattacacagaaattaaggaatatcagatagcgttcataggggcattgagatggagtaaacagggcaatctgtggcgggctaatattgatgctgtagcaaaaccatcaccacgaaacccagatgacgatgaccaagttattgaagcttggaggcttggacttattcaagcttctccatcattagaaaaattagcaaacaaagcagcagcagacgcattggaaccattcttatga

SEQ ID NO: 69488 - DNA, 498 bp, Acinetobacter baumannii
atgagtgacataaaagaatttcatttagattccagtccatcagtcgttttgcttgaatgtattgaagtgaagcatagcttatggccaaacccactccgatatgtgaccaacaatgcaaatggcataacagttactcatgaagattcgtcccaagctgtttatgagtatatgccactagctatccagaaaggaaagacttctgatgatctagaccaatctatcaatattacgataggggaattggggcagatagtaccgcaactaatcaagatcattcttgacgcgaacagcgaagagaagccacaagtaatttatcggtcttatttgtcgagtgacttaactgctccggttgatgttatttatggactagaaattgaaacaatgaatcaggactatcaagcctgtacttttgaagctgtggcacaaagattaaatagtgtaggtactggtcgtatttatacaactgacatgttcccaagtctaaaagggttcttttaa

SEQ ID NO: 69489 - DNA, 384 bp, Acinetobacter baumannii
atgaaaagtattgattgcttgctagatcgacagtatgacccgcaacactatcactgtgttcacttcttgcttgaagctgctctatatctttttaatcaagattattcaagctcgtttattggtttgactggatcactgcatgaaacactaaaaacttcgcgtcatacagttgtaaaaaacaggcgaattgatcatccaattgacggctccattgtcttgatgacaaatcaaaatcaaagctcccatgtggggcttttttattgtggtcgtgttttgcacctcactgagcttggtgtccactacttaaacattcaagtattgaagaagttctacaaacggattcgctattatgagccgattacgcatattcaccaatccagttga

SEQ ID NO: 69490 - DNA, 2835 bp, Acinetobacter baumannii
atgagccgattacgcatattcaccaatccagttgacgggcatgacaatgttctacatgttcgtactgatcgggttcttgaagcatttaaatacataaagaaaaaacacccacgagcacgaatctacttgcagccagcatgtgcacacaatgatgtaacacctacaaataagatagatgaagcgtcactattaatgttgtccaaaaagcacgactttgatgttgtctgtgaagctggtgagccagctactattattgctgctgtatcccttgtggtatctctagcattttcaatttatacattgatgacaatgccggatgcgaataaaggcatagaaaggtcttcatctaacaataagcttggtaatcgagaaaatacacaacgtatcggtgggcgtatcccagatatctttgggacagttttggctatcccggatcttattgcaccgcctcttcgatattttcaaaataatgtagagattgaagaatgcttgatgtgcttggggcgtgggtattatgaaatctcagatgtaaaagagggtgaaacctcaattaatcagattgatggtgaatcagtttctgtatatgacccaaatcaaagcctagatactacaacgccgatgtatcgatacggtgatgttttaaatcatgcccctctagttggtaagcaatcccgaagcattacaggtcaaacgcttttgaatccaagctctgcccgagttgttgaaaacaacatcacttttagttatccaaacgttattaatgtcgctacaacggcattcgtaaatggagagactatttctattgaaggtgctcaatacggggttaaagatcaactgttatcgggcactgtagatgttggtcttgactatgtattaacagtcgcgacaagtacagatatttaccaaccgcaaaacttcaagggcctaaccatacaagcattactaatagatgatccagtagaagggacactagatttagctgggctttatgaagtaagcaacattgtgaaatctggaagtgctggttcatgggtttatgagatttcattagtaaatccacaatctgttaaccagaactttcttaaaatgactcaggcagcttctagctcaatttctggcacactcacagataatatcgatagtatggacttagacggaacatacacaatcaatattaattcaggtacaactatcaccttgtcagcgcctgatgccaccaatccagattggttgaaactccagaattggggtagtacagctggcaatatggttggcttatatggttcacaagagaattggttagggtggtatgaaaccgacacagaaggcgaccaaatctttgctaactttaatgcgccacagggcttatatcatattggtgagaaaggctataaagaagttattggtgttcaacttgagatggaatatcaacttctggactcaaccggagccccaacaggttccatttatagtgtttctgaaaaccttttcggtaatcctcagagtattgcaagcccggttggtttaacgctaaaagcaactctgccatctacaagccgccttagatatagattaagacgacttactgtacattcttcaaagggcacagtagtagatgaagtgcaggcgcattcagtgtatatcatgacagctttaaccaagcttacttatgatgacgtaactttagttcgcactgttactgttactaatgacattacttctggagtaaaaaagcgtgagctaaatatgcttgctactcgcaaagtattttcatacgaatctggttctaaatcacctgaacgcattgcatctaataagtttgctgacattgtttgtgccgttaatacagatgattatattggtcgtaggtctatagacattgttgatattcaagacttgtatgcaactcaaagccagattcaaacctactttggaacttctaaggctattgagttcaactacacgtttgataatgacaatatgtcatacgaagagacccttgcaactattgcatattctgtcttttgtaacgcacgaagaacatcagggaaagtcttttttcaatttgagaaggtaaacccatcatcttctatcttgtttaaccaccgtaataaaaagccccaatctgagactgtgacaacgcgatttggcaaagacaagcaatatgatggtgttgaagcaacgtggcgtaatgctagtgaaaactacacagaagagtcaattaagcttcctaatgatggaattactaacccgaagaaaattgaacttattggtgttacgaacaaagttcaggcctatcttttagcgtatagagcatggaacaggattcagtatcaaagagagacagttcaattcacagcgtatggcgaagctgatttagtcactattaatgatcgcgttgcagtagttaaagattctatccctactttggtaccgttgggtgaagaaggtggctttacttcaggagaaattgaggcttggagtggcctgaatatccagatttcgcagcccgtccattttgatgctacgaagtcatacacgattcatttgcagttatcaaatggctcagtagaaacaatgctggtcacacaaggtgtggatgaatggcatttagttttagagcgcttgccaatccttccactgatcacaagttcagatggcaaagtaacagccacaaattactccatcacactatcaaatgaacttgatagtgaggcttatctcatttctgaaaaatcgccaagcgccacttttgaaagtgagattactgctgtgaactatgacgagcgttactactcaaatgatagtgattacatcaacaacctaatttcataa

SEQ ID NO: 69491 - DNA, 1557 bp, Acinetobacter baumannii
atgtcaaatttacaaaccaaagtagataacgcaattgtcgacatgggcaccgtggagcagttcacgagtggcgatgagttttcagatgtcattagccggttaggccgtaaatatgcaactcttgcaaaagcagtaagaatgattagtctccttggtgaaactaagatagacgaacttctagaagatctgaaagtacggtatttatcattggctgtgcgaggcgagtgggcgcctaatactgcttatgaactcaaggatctagtatttgtaaacgaaataacttacatctgcctagttccacacacctcatcttcagactttcagaatgatcttgcagcaaagaaatgggctatatttcaaggtgcaacacaagtagatcttcaagagtatgtgcaattaaagaatgacttcccaccaattcttggcgaaagaagtattcaatttaatcttggctattccaaaggatttattcgttatggtctaaatgacgccacaccacttgatgattttgtaaaacaccattttcgtggcttagtaagtccagatgcatggggggatatacgcaatattggtgcaggttcagtgtcttttggtcgaaatggtgcctcttatgcgtatttaactactactgttggacatgactgtgtaacttatggtgcagcttctatggcagggggagcagggtcttgcacaggtaatcctgacgaacctaacgaagacgcaaccttcggctattgttcttttgcatatggtaagaatacaaaagcccaaggccgtattagtaatgcaatgggtgaagaatgtgaatccaatagccgatattcatctacagatggctatcaatgtattgcaggtccgcagactatagaattagagggggatattgaaagtgaaggtgctgcagctagagcgcatggttacgactctcaagcatatggtaacttcggcttttcttatggcgcattattacgtgcacataatggtgctcaattaattggaaaaggtaattactcaacaggtacgcctttaacattaaggaaacctggattagggcttgggttccatgtatcaaaacctacaatattttgttcacaaggcaatggaattgatgctgatggggcttcagttggatttaacacagatacccctactaaccgttatgactttagattccgtaaagcagatgttatggccttcaatattgattctattgaagaagggacacagatggctttagtcgtgaatggacttaaaaacaatctggttgaccgtatggaactgttcaaaatcggtgtaacacatccaaactctggaactccagttggagtaacgacattttatcaaaatggtaacccatgtgctcagttcacagatattggcaatgctgtttttaatggttgggtagatgccgagaagggattttacgttgatggtattaaagtcatcggtggccaaggcaatactattcctaatgccggaactgatacaagctcacttcaggcgacagtcaatgcaattttggccgtgttgcgtgcacatggactgattgcaacttaa

SEQ ID NO: 69492 - DNA, 357 bp, Acinetobacter baumannii
  misc_feature (344)..(353): n is a, c, g, or t
atgactacacttaattatacggtaaggtttcaaaaaaccgttttagcaagcttaattggactttttttaagtcagtcaagctttgctcttgaagaactttctgatgccggtttaagtgaaactacaggcgaaggtattgcaatattaccccaaaatgcatttatggtattccgtggtgctggtccaaatgaatctgtaaatcaaattattactgatcgtagtaaggatactggctatatcaactatgtgcctgtgggacccttaagtgttgcagccgcagatacaagtggtaatggtagcgttggacctgaagataaagctgtaggtaaagctgatatctttcnnnnnnnnnnttag

SEQ ID NO: 69493 - DNA, 231 bp, Acinetobacter baumannii; identical to SEQ ID NO: 47478

SEQ ID NO: 69494 - DNA, 990 bp, Acinetobacter baumannii
  misc_feature (939)..(948): n is a, c, g, or t
atgcgtccattacaccctattgattttatttttctatcactagaaaaaagacaacaaccgatgcatgttggcggattgtttttatttgaaatacctgaaaatgcccctgaaactttcgttcatgatttagtagaagaaattcgccaatctaaaagtattcctgttccacccttcaataaccgtttaaatggtctattttgggatgaagatgaagagttcgatatcgaccaccattttcgccatattgccttgcctcatcctggccggattcgtgaattactggtttatatttcccagcagcacagctctttaattgatcgtgcaaaaccactttggacgtgtgacattattgaagggatcgaaggcaatcgtttcgcgatgtactttaagattcatcatgccatggttgatggtgttgcaggtatgcgcttaattgagaagtcattgtcaaaaacaccacaagaaaaacatgtggttccactttggtgtgtagaaagtaaaagaacaaaacgcctaaaagtaccaaaaccaagcacaagtaagatcaaaagtattttagggggtataaaatcacagcttgaagtgacccctaaagtcatgcaggaattatcgcaaaccatttttaaagaaatgggtaaaaatcctgattacgtctctacctttcaggctccggtttcaattttaaatcaacgtgtaagtgcttcacgtcggtttgcagcccaatcttttgaattaagccgtcttagaaaaatttctaaagcacttggtgtaacgatcaatgacgtcgtacttgctgtgtgttctggggcattacgtgaatatctgattagtcacaacagcctgcctaaaaagcctcttattgccatggttcctgcttccctacgcacagatgactctgacgtgagcaatcgtattaccatgattttggcaaatttaggnnnnnnnnnncaatcgtattaccattattttggcaaatttaggaacccataa

SEQ ID NO: 69495 - DNA, 195 bp, Acinetobacter baumannii; identical to SEQ ID NO: 53414

SEQ ID NO: 69496 - DNA, 1329 bp, Acinetobacter baumannii
atgggtgagttaaatatcaacagatacacaacctgtgacaacttgaaaattaatttttgtccagagtctcaccctgtagatgatgacatccaagaacttcttaatgaaataaaagcaggtgatcaattaactcatcagattcatccatatccagcaaagctactaccccatataatttacttctttctaaaagctcatagcaatttgaaacataaaattgtattagatcccttctgtggctcaggtacagtagctttagaggcatctattcagggttttcttcccttggtagcagatgcaaatccttttgccttattaatagcaaaagtaaaaacaacgccatactctataaagcacttaatagagacagcagaaaatattttaattaaagctaaaaaatataggactgccccatctgtcgatatagttaatccacacttgtggtatccgcctgaacacaaaaaaaaattagaaattcttttaagagctattaatgaaattgaaattacagatgagaaagatttcttcaagatttgcttttcatctttagcaaaaaagattagctatgctgatccagcaaaaactaaagaatctttttcagatgccactaatgagcgaattcaaaaacgattagactggatcaaaagtcttagtgtaatagatgaatttcataatattgtaaattcaaatattgaacgtattaaacaaacaaatgaacaatatcctcaacgagttgttgctaaaaatgtaggtattgatgcaagaaatatctttactaattctgatttaacaacacaaatgccagataattctgtaccactgattattacgtcacctccatatggaagtgcacaaaagtatataagatcttctagcctttcattgaattggttaggttttgtatcgcccaaagagttaagatctttagaagagaaatcgattggtagagaacatttaataacagaaccattgtgcttaaaagccggtgatctaccagaaaattataacaatcttattgaacgaatagccaaaactaacaaaagtagagccagaataactcagaaatatcttattgagatggaacaagtagcacaggaactttctcgtatcctagctcctaatggacgtatcatcttcgtgttaggaaacaatcaggtatgtggtgagactctaagaaatgatgagtttatgacttattgctttaaaaaatatgggttacgattgaaactggttcttattgatgatattaaatctagagggttaatgacaaagcgtaatcgaacagcgtcaataatatctcgtgaaaccgttttagtatttgaaaagtaa

SEQ ID NO: 69497 - DNA, 300 bp, Acinetobacter baumannii
atgaaatcatatatttataatttacaattgtttttattttttaaacaaatttttcaaataataaaaaataattttttaaatacagatgtaatacttattatttttcttatgactattccacaattttttttcatttttgtagattattttttagatgctaatcgttactattttgttgttgagtattatttttgtatattatttttcttttttaaaagtatatatttaagagtcattggaatatttttatatatatttggcagagtaaaacttgaagtgcgacataaaccacctaattaa

SEQ ID NO: 69498 - DNA, 285 bp, Acinetobacter baumannii
ttgggattacaaccgggcgaaaccaaagaaattgagcctctactctacccagactttaaagatgttccggctgaacaaccttatcgttcacgttcatatgtgaaaaaaccgggtggcactggcggtaagccaatggttcgcaagaacaaagatggttctgcgaaaaaatctggtacaaagcgtatttggcaaatggatgaaagtgaaaaaccgcgtcgtaagactaacggtacaacgcgtccaaataccaaagcaccacgtggtcgtagccgcaatagccgataa

SEQ ID NO: 69499 - DNA, 246 bp, Acinetobacter baumannii
  misc_feature (228)..(237): n is a, c, g, or t
atgaaaatcgcggtgtttggaaccaccttacatgctggtgtaatggcagcattattagctgaatatggcaatcaaatttattggtgtacaagtgtcacctgcgaggaaaatatatctgtactctcatatcaagatcaagaagttaatcattatttaaataaacagagaaaagcaggttttttaaaagaaagccctttttctgaaattcctttagatattgaagtttannnnnnnnnnttgttttag

SEQ ID NO: 69500 - DNA, 492 bp, Acinetobacter baumannii
  misc_feature (459)..(468): n is a, c, g, or t
atgcatacaattttaggctacttgtggcagtacatcacgaatcctaaagcaattatcgccttgtcattgttcgtggcattgatgtcttcctatacttcaattcctcgccatatattttgggctttagcatctgcatatgctttagggctcatcgcttatggaatttattggctaattcagcgtaaaaaacatgctgttcaaggtgaagagcttgcacaagcgattgaaaaggatacccaagcagagtacggcaaaaataaagataaagaagagctgcaacttattagccaacaaatgaaagaatctattcaattgattcgtaagtcaaagttaggcgataaaaaggggaacgcagcactatatgagttgccatggtatatggtcattggtaacccagctgctggtaaaagttccgcgatctataattctggtttaaagtttccttttgaagaaacccannnnnnnnnnaaaaaatggtttcggctggtttaa

SEQ ID NO: 69501 - DNA, 570 bp, Acinetobacter baumannii
atgcgtgcattagttatttcaacagtggtaggggcagcagtagtactttctggttgtcaaacaacaggtaataaccttggtggcgttgaatacgataaagccgcattaggtactttgatcggcgcagcagctggcggtttatatcttgaccaaaaagagaaaaaattacgcgaacaaatggctggtactggtgtagaagtaggccgtaacccagatggttctgttcaattgatcatgcctggtagcattacttttgatactaacaaatcaaacatcaagccaaacttctatgcaactttggacaaagtagctcaaacattggctgaagataacaagagcgcgattttagttactggttatacagataacactggtaatgactctattaacatcccattatctcaagcgcgtgctcaatcagttaaaaactatttagctggtaaaggtgttccatctagccgtatcgatgcacaaggttatggttcttctaacccaatcgcagacaactcaactgcttctggtcgtgaacaaaaccgccgtgtagaaatcagcatttatgctaaacaataa

SEQ ID NO: 69502 - DNA, 531 bp, Acinetobacter baumannii
atggctgagcgtttcaatctcccagttttcacctttattgatactatgggtgcatatccgggtgttggtgctgaagaacgtggtcaggcagaagcaattgctactagccttgctcaactttcaagcctgaaagtgcctgtaatcgcaacagtacttggtgaaggcggttctggtggtgctttaggtattggtgttgctgacagagtgattatgttgtcacatagtatttattctgtgatttcgcctgaaggctgtgcatctattttgtggaaaactgctgagaaagcagctcaagcgagtgaagctttaggtttaacagcagataaactacaatcgctaggtattgttgaatatgtagtagatgaaggtgaaggtgcgcatttagatcctgagcgtgtgatgcaaaacttaaaagtagttttaaagcaggctttggatgaattgctaccaatggatgcaaatgaacgatgcgaagcacgttatcaacgtttaatgaagtttggcagcgaaaatttaggcatggcgtcttaa

SEQ ID NO: 69503 - DNA, 723 bp, Acinetobacter baumannii
atgggcaaaacaaccatcattcatgagtttgctagacagtattatacaaaaaccgtgagtgatgccgacatggatttattgtccgtgaccaagcctgttttgccaatacttgctcctgcaaaagctaatgttaaagaactctatattaatattttaaatcacttctttgtgccatttcgggcaagtgatcctgaagcaaaattacgaaatcaagcagtacacttgatgcgtaagtatgagacaaaaatgctgattattgatgaaattcataattgtttaacaggttcagccaaattgcttcctgaagtcatgaatacgctcaagaatctcagcaatgaattgagtctgaatgtcattggtgttggtactcgtgaagcaatcaccatactgcatactgattcgcaatatgccagtcgttttgatgtggtgaatttaccaaaatgggaactcaaccaagattttttaagattattaatgagctatgttcgactattgccgttaaaaaaacagtctaatcttgcatctaaagagattgccacgttgatttttgaagtatcaggcggaaatttgggggatttaaaccgattactggtcgagtgtgccaaagaagccattttacaaggtgaagaagaaattacatatgacattgtccataagtttaaatggcttaaaccgactgaaggtttaagaaatattagaaatataaatctcagcgtactttag

SEQ ID NO: 69504 - DNA, 372 bp, Acinetobacter baumannii
atgattaaatatttaaatatctttatattcagtttattattagggtgtaatagccttgatagttcagaaaattctgaatttgtaaatttgaagagcgcagcagaagagggagatattcgggctcagtcacaaatgggcgatgcatatttattcggtgaatatgatctaaatgtagattatgaacaagcttttaattggtataaaaaagctgctgatcaaaatgatgtaaaatcacaatataatttaggaattaggtacttaaatggagagggagttgaaaaaaatatagaaactgcaaaagaatggtttcagaaagcaaaattatctggtaatcaagaagctgatgtttatttagaaaaaataaataattaa

SEQ ID NO: 69505 - DNA, 306 bp, Acinetobacter baumannii; identical to SEQ ID NO: 57884

SEQ ID NO: 69506 - DNA, 393 bp, Acinetobacter baumannii
  misc_feature (370)..(379): n is a, c, g, or t
atgctcgatttatataagcttcatgcctttgtagtggtggttgaagaaagaaatattactcacgcggcaaaccgtttgtttattcaacagccacctttaacgcgtttacttaaaaaacttgaacaagaactcggtacacagttacttattcgtcaaccgcgcgggattgaaccgacagaagcaggtttagcattatttaaagaagcacaacttttattagaacatgcccgccatattcctcaattggtccaagatgttagccaaggtaaaactggacaactcaatattggctttacaagttccgcaggtttgcatccgctcatttcactcgtattacgttcatatcgggaaatgtaccctgctgtgcaannnnnnnnnncaaaccaaacttga

SEQ ID NO: 69507 - DNA, 447 bp, Acinetobacter baumannii
atggtaaagtcttttcaagtagggactgcttcaacgccagatacaaaaggagcgaaagcaattggtcgtaacgcgatttcgataattgatggtagtcaaaaattaggtgcttctgatctttccaagttaaaaggtaaattttctgcaagttgtatggcgggttatatttttaataaaccaaataaagaggcacaagcagacagtaccgatatatttttgaaaggattagcaggtagtgctagtggtggaatctggggcgtgcgagcgggtgttgtacttccactggatacaggttcaagcgctgttagtgataagataaaagcatattttacttcagatacaatgaaaggcttagaggttggtattggtacacctggtgcagattttaattttggatatggtgctgaagcgcaaggcagaaccattaagggagcgattaaggtctaa

SEQ ID NO: 69508 - DNA, 162 bp, Acinetobacter baumannii
atgaaacccgtaaaagaattaatgaactacaaggacatgatgtcgttacgttcagcatataaccatggctttcgtactgatgaaacaagagcagcagcactacagtacatcaatcttcgacgcaaaggacagctaaaagagtttaaggagtgcagccgatga

SEQ ID NO: 69509 - DNA, 366 bp, Acinetobacter baumannii
atgaaactaactaaacaacaacgtgctgagcttaagcagaagtttggaggtcattgtgcttactgtggtgagttgctcggtgacaagtggcatgcagatcatctagttgcagtagtccgtgacttaattacaggaaagcctgaaaaacctgaaaacgatacatacgaaaacttaatgccagcatgcactgcttgtaatcacaacaagcgttcattgtctttagagtcttggcgctctcttctagcgcactatcgtgatattcaagtgcctcgtgactgctctcagatacgccacttaatgcgctttggattggttgagttcatccagaagcctgtgaccttttactttgaatcaaaggatgtttga

SEQ ID NO: 69510 - DNA, 261 bp, Acinetobacter baumannii
atgatatcaccaacagcaaaggcactacctaaaacaggtacatttctacagattgtctctagtcggtcaacagtaacaataccatctgtatattccctaaaccatttatcaacttctgccttttttgttgttaaatctttgggactaaaagtatttaaaggagcaacgactgaattttgtgacatgttcttctcaaattatacaaacgtttcaaatggtgattggatttttgttattgctgttttgttagaaccagcttga

SEQ ID NO: 69511 - DNA, 375 bp, Acinetobacter baumannii
atgcttaagtggatcaatttctttgatcaggtttccagaaccatcatattgcttaaaccaacgaccctgttcggcatcaaccataccagtgagttgatttttttcatcatattcaaaataacttgtcgcaccatcatcttgagttgtagtcaagacattaccacgctcatcataagtgtaagaagttttcgaaccgtctttagcaatatggagcgttatatttttcgcatcatctcgaaagaaccactcttcaaaattatcaggataaacaatacggtaagtatagccatctatatcatagtaatgttcagtgctattcccttcaacatccaatactgtggtttttcggatatttttatcccactccagctttga

SEQ ID NO: 69512 - DNA, 447 bp, Acinetobacter baumannii
  misc_feature (394)..(407): n is a, c, g, or t
atgccaggcgaagaggtcagccaagccaagcaacagctcaaattaattatcgacccttacttatcggtaagtgaagtcgaaaaagtgcttgctgcctgcgattttggagatctggcacacactggtattacccgtaaaagcggagaaccttatattctgcatcctatcgcggttagctgtattttagcgaatatgcgcctggatcctgaaacattaatggctgcacttttacatgacgtcattgaagatactcaatatacaaaagacgatattattgaacgatttggacaaacagttgcagagcttattgatggcgtaaccaaactaagccagtcgagcgataaagaatataataaagctgcttcttttagaaaaattctacaagctactttgnnnnnnnnnnnnnnaccacaatatgaccacattgggcgccttacgtcccgataa

SEQ ID NO: 69513 - DNA, 465 bp, Acinetobacter baumannii
atgaatccttgtccatgtgggtatgcatttaatcaagatagccgttgtcagtgttctccagaaagcattaagcgctatcaaaaccgcatatcggggccgttactcgaccgtatcgatttacatattgatgtaccgcctttaaaagctcaggaactgcaagatccaacacctgctgaagactccaatagtgttcgacaacgtgtgatttctgcttatgagcaacaaatgcaaagacaggattgtttgaatcaggccctctcgcccaaacaactggaacaatatgccgttctcgatagtacttcacagcgaatgattgaaatggctcagcaacgtttaaatttatctgctcgtgcttatcatcgtgttttacgggttgctcgtactattgctgatttggcccaaagtgaggtcattcaaagtcctcatcttacagaagcactctcttatcgaggtaatcactcttaa

SEQ ID NO: 69514 - DNA, 258 bp, Acinetobacter baumannii
atgaaaccagaacagtttattcgtgagtggggtattgagtattccagaaagtatgtagcacttgctgaaagtgaaggtgacatattgccttgggagaaacagcttaagcagttgattgcgtcacttgatcttattacccatatgggtggcctatccgaagttaaacgcaaatttagagataacggttcatgtcatggcgaacgaatgaaagctttgatcaaagaccacgaatcaatatacggaggcggggatgagtaa

SEQ ID NO: 69515 - DNA, 531 bp, Acinetobacter baumannii; identical to SEQ ID NO: 69502

SEQ ID NO: 69516 - DNA, 1284 bp, Acinetobacter baumannii
atggattcaatgctactgctacatttaatggctcaaattttccctcaaaagattagagcaatttatattgatcatcaactgcaagatcaaagtgcagagtgggcggaagtggttgccacacaggcaacaatattaaatattccttatattattcaaaaagttcagatcgcaaacggcaatctggaagcacaagcacgtcaagcacgttatcaagcatatcagcaacatttacaagaaaatgaaattctgttgcttgctcatcatcaacaggatcaggcagaaacagttattttgcgattattgtcaggtgcgggagtagatggacttgctgcgatgcaggctattgattaccgtaaagatatgacaatttggcgcccctttttggatttaacacgtgagcaaatcgctttatggactgctcagcttgaagttaaatatattgacgatccaatgaactatgacatccattacgatagggtgtggtgtcgtgaagcactgtggtcatttttaacaagccgttttccaaaaatgcagcaagctttgagtcgaaccagttatctgatgcaagatgcttctgaaattttagaagaagttcttaaagatgattggcaatattctggttcagctgactatttagatttaacgaaattatatgagttatcttttgcgcggcagcgccagttactttctgcgtggatgaaaggccaagggcaatatcgacctgcatttgaaatggtcgaacggctaagaacagaagttattgagtctaagtcagatgctcaagccgctttacattggaaccagttttactatgtccgttatcaaaatatactctataggttgagtagagaggtttatctcgctgaaactttaaatccggttgttgctgaactagagcattcatttaaattagaagaaagatggcagggcgcagctggactattccatgttgagtgtaaaaaaattggtttaagtcattctttattgaataaaaaattaaaaatcattcgacgtcaaggtggggaaaagattcacctatatggtcgtgttgggcaatggcctttaaaaaaagcaattcaagaagcacatattttgccttggcttcgtcatacaattcaaatattagtcttagataatgttatgcttggggtttttacaccgaaaggattttggttggctcagtctccatattgtgaggaaggagggtggcaaccagatttaatttctcattcttgtaatctggtaaatggcgaatatagttatggcaacagcagtgaattgtaa

SEQ ID NO: 69517 - DNA, 831 bp, Acinetobacter baumannii; identical to SEQ ID NO: 41545

SEQ ID NO: 69518 - DNA, 570 bp, Acinetobacter baumannii; identical to SEQ ID NO: 41546

SEQ ID NO: 69519 - DNA, 2772 bp, Acinetobacter baumannii
atgccaccatttgtcttggttgatgggtcctattttttatttcgtgcatatcatgcattaccaccattgacgacctctacagggttacataccaatgcaatacgtggagcaatttctgccattcaaaaattgatgcgtcgtatgcaaccgacacatatggccgttatttttgatacacctgagccaactttccgtcataagctttcacctatttataaaggtgatcgcccaactatgccggaagaattgtctcaacagattccatatttacatgcattgattaaggctcaagggattcctttatatagccttccgggtgcagaagccgatgacattatcgggactctcgctaaacgcgctgtaaaagaaggtcatcatgtgcttatctcaaccggagataaagacatggcccagctggttaatgactatgtaaaacttgaagatagctttaaagaccgagtattagacaccgacggcgtatttgaaaaatttggcgtttggccaaaccagattatcgattacttaacccttatgggtgatgcatctgacggcattatgggtgtacctggcgtaggcgcaaagacggctgccaaattactgaccgaatatgggacattggataatatcattgccaatgtagaccaacttaaaggcaaactgagccaaaatattaaagataatttagacaatattaagcttgatcaccagttggcaagcattgtctgtgatcttcctttagaactcgactggcatgaattaaaacttactgatccaaatgtagatgccttacgcaatctctatacggagcttgagtttagaaaccagttacagtctctcgatcatccaaacaatccaaatagctcaagctataagcagcaagcttcacaaactattgtccaaaatgaagtgaaacctgctcaaacaattgaaatagaagatcaagcaagcttgactagtcaagatgaccagcttggaactgcaaactatcacactgttttaacacaagaagcatgggatcagctctggcaacgcatgcagaatgccgatcattttgctattgatacagaaaccacaagtcttgattaccgtattgccgagatggttggtttttcaatcgcatttgatgcgaaagatgcctactatattcctttagcacataattacgaaaatgcgccacaacaactgaaccgtgaacaagttttagcgcaaatcaaacctgtacttgaaaatgaagcagttaaaaaaatcggtcatcatcttaaatatgatgcgcacatttttgctaatcacggtattgaacttaaaggttggtatttcgatagcatgctggcatcttatgtactgaatgcagcagctactcgtcatggcatggatgatgttgctcgtgtttacctaagccatttgaccactacttttgagcaaattgctggcaaaggtgcaaaacagaagacttttaatcaaattgagattgaagttgcagcacattatgcagcagaagatgcacatgtgacttatcgtttatatgaagtactttcaaataaacttaaagcacatcctgaattagaaaatattttatataacattgagatgccagttgctcgaatcttatcgggtatggaagaagatggaatccgtttagatcatgctttcttagataaattaagtgttgaatttgcgaaaactatggaagaccttgaaaatcaggccatggaaattgcaggtgaaacttttaatattgcttcgcctaaacaggtaggtgaaattctatttgataagttaggcattaaaggtggtaaaaaaactgcaactggacaatacagcaccagtgaaagtgttcttgaaaaaattgagcatcctttaacggaaattattttagaacaccgtggattagcaaaattaaagagcacctatactgaccgtttaattgagcagtcgcataatgacacccatcgtgtacataccagctatcatcaagcactaacggcaacaggtcgcctatcctcttctgatcctaacttacaaaacattccaattcgtagacagattggccgtcaaatccgtaaagcatttattgcaccggaaggacgagttttgttagcagccgattactcgcaaattgaacttcgtttaatggctcatttttctcaagatgatgccttagttcatgcattccaacatggtcaagatgtacaccgtagaacagcggcagaagtgttaggtattgcaattgaagatgtgaccaatgatcagcgccgtcaggctaaagctgtgaatttcggtctactttacggcatgtccgagtttggtttaattcgtcaacttggctttactcgtgaagaatcgcaaaactatatcaaacaatacttccaacgctatcctggcatttacgaatacatgcaacgtactcgccaagtagcatcggaacaagggtttgttgaaactattttaggtcgccgtctgtatacaccggatattgacgcccgaaatgtgatggtacgtaaagctgctgaacgtgctgcaattaatgcacctttacaaggtagtgctgctgatattattaagttagcaatgattgaagtagataaaatcctgccaaaagatcaagcaaaactattacttcaagttcacgatgaattggtgtttgaagttgattcaaacattgcagatgaactttcaaaacaaattgcggatgtcatgcagtctgttctggaaatttctgtaccgttagtcgtagaagtaggccaaggtaaaaactgggatgatgcccattaa

SEQ ID NO: 69520 - DNA, 147 bp, Acinetobacter baumannii; identical to SEQ ID NO: 56883

SEQ ID NO: 69521 - DNA, 372 bp, Acinetobacter baumannii
  misc_feature (309)..(318): n is a, c, g, or t
atgggaggcaatggcgataatggcagtggaactttccgtgtacgccatgcctatatgtctttaggcaaatggttagctggtcaaaccacttcacctttcgtcaatacagatacttctccggaaacactagactttaccggtgcagtaggtacaggaaccacacgtactgtacaggttcgctatactcaaccaattaatgctcaacaaaaaatattagttgccttagaaggtggtgatgttgaaaaagtgagtaatgctgctggaggaagccgtttccctgctctaacaactcgttatgatttcaaaacnnnnnnnnnncagataataaaggcttattacagcttcatggtcttgcccatgaaaatcgagtag

SEQ ID NO: 69522 - DNA, 675 bp, Acinetobacter baumannii
atgactgatttagttatcgtagagtcatctaataaggttgactctatacagggctatctagatagcctttttggtcgaggtaaatttaaagtttcatttagtaagggccatatacgtgacttacccaaagactcactaggattaactgccgaatatacacctaactatgtgtttaatgattctggtgcaagtcgtgtaagagagctaaaagcattagttgagaaatcacaaaaagtatatcttgctacggatccggatcgagaaggtgaggctattgcatggcatcttaaaacggttctccggcttaacgaaaattatggtcgagttacatttcaggagattacaaagacagcagtagcacaagctatgggtaacgagcgtaagttaaatatgcaagttgttcaagcacaagaaacacgaagaattctagaccgaattattggatacattggaacaccggcttttactttaatatgtggtgaaaaacagattgctggtcgagttcaaagtagtatcgtatggtatctagtcgatcttgaaaataagatcaaacaattctcgtcagttttgcattttggtgtaactttcaattttggttctgtagatgagtcttgggaagcaaaatgggatacatcaaatttcataactaagttagatcactgtagaaacttttga

SEQ ID NO: 69523 - DNA, 606 bp, Acinetobacter baumannii
atgattaatgttaaatcaggtggtcgcacacgcttatctactttatgcgcaggcatattcttgctgattttagtagtatttttaagtgattggttgaaagttattcctatggctgcgcttgttgctgtcatgattatggtatcaataagtacttttgagtggcgttcacttacccaatttaaaactaatcctaaaagtagcaataccgttatgattgcaacggttgttgtagttgtagctactcacaatctagcattaggcgtattgacgggtgtactactctccgcgcttttcttagccaataaacttgaaaatgatatacaggtaataagttcattagaaggcaacgcccgtttatatgatttaagaggacaaatcttttttagttcttcagatagattcatgcagggctttaactttaaagaagaagtaaaagaagtcattattgatctgactcattcacatatttgggatgtcacttcggttgcaatgcttgattcagcagtagaaaagttccaaaagaatggcatacaagttactgtacgtggtttaaatgaagccagttcaatcatgattgacaagtatggtacacatgcaaaaatttaa

SEQ ID NO: 69524 - DNA, 546 bp, Acinetobacter baumannii
atgagtttattagtgttttatctttttacgagctggatgccgacaattttaaaaactgttggttttgatctacaacaattaagtcttatgtctactttattcccattcgggggcgtgattggagctatgatcatgtgtagattcatggatagattaaatccaaccaaagtgattacttcctcatatttctcagcattcttattattcattcttcttagctttacgcatacaaacattagcatcttttcaatactgatctttatgattggaggcctattagcaggtgcccaaacagcattatttccgttagctactcttttttatccagcgaactgtagaggctctggcgtttcatggatgcatggaataagccgtattggggcaattttaggttcatttttaggttctttcatttttactttaaagctagatatgagttcaattttcttaagtttagccatacctacttttattgcttttatttgtttagcacttaagtggtatggggagctaaatatagctaaacaaaaatttaaagttgtctga

SEQ ID NO: 69525 - DNA, 624 bp, Acinetobacter baumannii
gtgaaattcttcctatctctttttacgctgtttagtattttctgtactactcttaccaatgctgctctacttaatattgctcctgaaagtgttgaagccgctgcatggacaattgtagatacccaatctggtcaaattattgctgagcataatagtcatgtacaacgtgcgccagcatctttaaccaaaatgatggtggcctatattgcattaaaagagattaaggctggaaagttaaaactgaacgaagtcattactgcaacaccagtcgtaagcgtggtgcagtgggatgaatcacaaatgtacctcaaagcgggcgagcaaatttcagttgatcagctcttggccggtttaattgttatgtctgcaaatgatgcagctgtgactttggctgaaaaaatttctggtgatgtgcctcatttcgtacaacgtatgaatcaagaagcacaagcactgggtatgaaagacacgcactttagtaaccctgctggtattacaatgccggatcattacacgacagcccatgatttgagcttattaagtcaggcagtgattcaccagacccctgaatatttacattattcgaaaatgccaaccttgcgctcaaatacgatccatctgtag

SEQ ID NO: 69526 - DNA, 942 bp, Acinetobacter baumannii
atgaaattaaaacatctgagcactgcaatgattttagcaacgctgcctgcaactggggtttttgcagcagctttagatcgctctggacagtcaatgtctgcgttcttacagcctaacaactattttgaggcgggtatttcggttttagaccctgatgtagctggtaaagaagctggagtaagtgcaacacgccgtgatattagtgatatggggaatgattattactttcctaacgctgcattgaaattacagcttactgataagttctcttttggtttactttacgatcaaccatttggagctgacgctgagtatagcggccaaaacgtatttgtttctgatccatctaatactattttagcgccagccgcattagatgctatccgcacaagtacaatagatacaacttttaataatttgacagctgatcaacgtgttggagcagctctacaagctcaaggagtaaatttatctactccagagggtaaagcccaatttgcagcaacattgacagcttacaatagcaatcctgcaactaaagcagctattgatgcaggtgtaaaacaaggtgttgccgcaaaagttgatgctggtataaaacaaatcaatgggctacttggaactggtaatacaaaagttaaagttgatactcaaaacttatcttttgtatttggttttcaacccactcaaaactggaatatctacgcaggtggtgtatatcaaacagtaaaaggaaatgtaagtctccgcggacaagcatatagtatttataatggttatgatgcagatattaaagaaacaggcggtgcaggttggttagctggtgttgcttatcaaattcctgaaattgcacttaaagcttccttaacttatcgttctgaaattgatcatgatgtaaatattcgcgaaaaataccaactcttccagctttatcacttctag

SEQ ID NO: 69527 - DNA, 348 bp, Acinetobacter baumannii
atgagtgaattatatagcagtcaagctgtcaaagatgttcttaatgaaagagaacgtcagatccagatcaaaggctggacaagtgaacatgatgatgtgtacagcaaaaatgaacttactcgagctgctgcaagttatacaactaatgttatccacagagggtggactttccttgctaaacctgctggcgtctaccaatccgaagaagcgccagaatactggccttgggatgattgctattggaagccaaaaagcccaagacaagatctggttcgtgcagccgctttattaattgcggagattgagcgtcttgatcgagaagttaaagcggaaagtaaggaggggtga

SEQ ID NO: 69528 - DNA, 354 bp, Acinetobacter baumannii
atgattgatcacgtaaacatggatgcactaagtaaattttttgatgatatccacttaaataagtctgaatatatttatataaaagcacaaggtgaatgggcttttaaaacacaagatcaatctgccttactggcttatattgttttaacgggttctgtatatatccaattaaatgtgtcagagaaaataacagcaagagctggagatattattttaattccttctggaaaagcgcatcatgctacagactcaaaagctactgcaagtaaacttgtagatccggtcgatattactccattatttaatggacatcgccacgatccaattgagttaggctcatcaacatcttattaa

SEQ ID NO: 69529 - DNA, 435 bp, Acinetobacter baumannii
  misc_feature (340)..(349): n is a, c, g, or t
atgaaccaaaacaatactgaagctgaagtaaatctatttcgatttactttccactttattactcaaaatacgaatagtttttttgttagcgtagaagggccagatgagaatgaaactcttataaacttcgtcaatgatatgtacagagttttatacgccagcaatgtcaaacaggatctcgatccagcacatcccaatcaaatcaaagccagcgctttacaacgcatgacaccaagtttacggacacaagttaatgctatgttaagcgattacactaaactcaagcctagtattcataaagcgattagtaagctcaattcgattgaagatgatgaatacnnnnnnnnnncttctttgtatttccctatgagtttacagaaaagatgcaagcacaaatgcttttgcaaacttttcttagagccaaaaattcattga

SEQ ID NO: 69530 - DNA, 1089 bp, Acinetobacter baumannii
atgacatcttccaacacatcacgcattgcagtgcaacaaattgatccacatgaattaaaagcatggatcaaagctcaagcattagacttgggttttgctgattgtgtcattgccaaaccagatgctcaagagcaaatgccacgttttttagaataccttgaacgtggttatcatgcagatatgacctatttagaagaaaatctggaaaagcgagcagatccaactttattggtgccaggaacaaaaagtattatttgcgtacgtatgaattatttggtggaatcgccaaaaccacgatatgtaccttttgaaccaaactctgcgattattgcccgttatgctcgtggtcgtgattaccataaggtgatgcgtggcagattaaaaacgttagccacacgtatccgtgaaaaagtgggagattttgaatctcgcccttttgcagactcggcacctatttttgagaaatcattagctgaaagtgctgggatgggctggacaggtaaacatactttactcattcataaaaagtcaggttcattctttgtcttaggtgaactatttacatcacttgacttaccttttgatgaacctgctacttctcactgcggttcttgtagtgcgtgtattgatatttgcccgacacaagcgattgtcgaaccttatatgttagatgctagacgctgtatcgcttatctcaccatcgaatataaaggaatcattgcagaagaattacgtgcaggcattggtaaccggatatttggttgtgatgactgccaattaatttgcccgtggaatagttttgctaaaacagcgtctattcccgatttcaatcctagacatggtttagataatattagtctgcttgatatttggcagtgggacgaagctacttttttagccaatacagaaggcagcccaatacgacgtacaggttatcaatccttcaaacgtaatatcgctatcggtttagggaacgcaccgtactcaaaagaaattgtagatcagctaaacaaaggcaaaagtttacatgacgaaatcgtcaatgtgcatattgattgggcaattgaacagcaacttaatcaactttag

SEQ ID NO: 69531 - DNA, 252 bp, Acinetobacter baumannii
atggattctatatttgtacaagctggctcaggaaatagatcagatagtttgaatttagtccttaagggagatctttcacaaggaactcgttctagccagacagttcaggtccctattgaaaaagtaactaaactgctaaccaacctttccactgaattttctactgtgaaaattaataatcttgatccagacgtcttagatcaacttaaaccgaatacgtcgaataaacttactcagaatctcatgtattag

SEQ ID NO: 69532 - DNA, 2079 bp, Acinetobacter baumannii
ttgcgtataagttggaaaaatcaatttaattcaaataactgggtagggaaatggtcaggaaaaagaaatataaattcaaaaaaagattttttaaagcatcctgaaattcaatatgaaattatcaaggaatggattaaatatttatgtaatcaacttagaaataataattttaatgaatatttcggtacaaccattcaaaatatagaaataacagaatcgggtgcaatagctggtatgcatcttgttggaatagggggactaggagctttcttaggaatcccaaaatttcatggtaaaaaacaaacagatggtaatggaacccacattaaaaaatatattgaaaattttggtgggtttgatttggagcaatgttgtaatagaaaaatctacgttacattaaaagataatttaggtttggaattaaaggataaagaagtaataattgtttctcaaaataagggtaaatatgtttctggagaaacaaaggttaaagttaagagcgatgagaatggtaatttacctgttattgttagaagtcccaatacagaaataaaaatttgtgctgacggaaaagagtcaaatactattattcaaaaagcaaatgaaaaacaaaaagcaattctaagtgattttaaggtttcaagtcatccagcaactgctccagaaaaagagaaagactcttcatctaaagatgtagactttaatattcaaatagttgaaggtgactctggtaaagcaatctctaatatgaatttttttattacgtataaaggtaatattaaaaagcatactgctgatagtcatggggtcaagcaaaatattattgcagagataggccaagacattgaagtttctgtacagggtactggacataaacaagttatacatcattttacagcaaatgcagcattaaaaaataaaactgtaaaagtaagtcttcctgtacattcttttaatatttcagtaactcaggataataaacctgttccaaatactttgtttagtattttttacagaggtagagaaatctctaaaaggacagatagccgcggtatactgaatgttcgaatgttaacaggatttgtttttggcttcggtataaagggaaaaagtttaatattaagtcgagttgaaaaaaatactgtaacaaaagcttttacagtgaatgggagtgcggttcatgcttcaaaagcatatgaagctaatgatgcaaaacagaagcaaaatgtaaatttaaataagcatcagaaagaaaagcaggaggaaactgccaaaaaacaagctgatcaagctaaaattcagaaaaataataaaaatgaagtaaaacaaagtaatacttatactgaaaatggaggtaagccattaacaactgttagtaatcaagctagtgttacaagtgatacaactagatttcatatttatcataatgggaaaataaaaagagagaataaagctgcaacaggttttgctgagtttatttattatgatcaaaaagggaaatcccataatttaggaaaatcgagatatgtagttgctaagagatgggaaaaaaaggatgtactaggtaatggtaatattttcttaatagatgtccgacctttctcatcgtaccgtcagggtgatgtcggatataaaatgttaatgaatagtggacagcaaagatactatcttgctagtgtggaaatggctgcttttttaggtggattatgcaaatcgggctatgatgatatttcattcaatggttttagtacagtcaatggatcgcccggagagagcgcatcccatattaatggagaagcgggagatataagatatcttagaaaagataaaaaagctaaagctgtgactttacaggatgaaatgtatgaccaccaaagaagtttagagctaataaataatttcataagctttggatgggggaaatccaaattaatgataagtgaatatttcactaatgctaaagcaggtgtagagcataattatatttttccaaagtgttttcaactaaaaagcaaaaagccaagacataataatcatttgcatatgcaaggattattagcaaatatagaggatatttga

SEQ ID NO: 69533 - DNA, 165 bp, Acinetobacter baumannii
atggccttaagtgcttggggctttactgatttaccttcttatacagataaatatgatcctaatgagaaagatatagtgataaagacaaataattggttgaatgatgaggcagcagaggaaaaaactcagcaaggtcttactgcctttgtaaagttcgcttattaa

SEQ ID NO: 69534 - DNA, 327 bp, Acinetobacter baumannii; identical to SEQ ID NO: 63606

SEQ ID NO: 69535 - DNA, 513 bp, Acinetobacter baumannii
  misc_feature (388)..(397): n is a, c, g, or t
atgcagataaggtttctttgttttcatacttgtaaaaatgaaaacactgaggagtatattcttcaaaatgcaccatttcacagcaataaaggtgtacctcagtggttaggacaaggttattatctatggacagattcagatcattttgcacatgaatgggggtatttacctccaagaaataacaaatatgcaattatcaagtttaattttatgttagataatgataaggagttcttagatttggttggaaatgttgatgatcaaattgcttttaaaaacttagtagatttatatcgaaatcatttaaacgatgaaattgagaaatctaaagataagtccaagcgaaaaattgctcgtgaacaactttcaaacttgtgtgtgtctactnnnnnnnnnnttaaacgtacagaaggtaaaatatcctcacttttttacccaacaaggcaacagattgtagtgtacgaacatggtagatttgctttgagtaatgctgtacttcatcatattcaatag

SEQ ID NO: 69536 - DNA, 372 bp, Acinetobacter baumannii
atgaaaacacatcatatagatatgctagaagcggcaaaaaaacttctcgcagaaatggactctaatgaattaatcaatgaatttttggagcttcagacagatgcttgtggtccctcagttgatgatttctttaaaatcatgatgagaactacagatgatttatacgggtttaatattgataatactaaaggccttttcagtagtacttatagaatggaacttagtgattgggctattccatgtattctgagtcatagtaaagactttgatattaagtctgctaatgatgaaaagtatcatttagatctgcaagaaattaaaaacactaattcattcctaattagggatgatttttacgcaatagcatcttaa

SEQ ID NO: 69537 - DNA, 438 bp, Acinetobacter baumannii
atgaatataagccttgtttcaactaaagctttaaaaattgaattggagcctttgcttgaagaagaagcaactgaaatagaattagatgaggatgaggagtttgactttagattcgattattctgctcatcgtccagatactttagatgttaggaataagtttgctatagcatttaaagctttaattcagtaccctaaagattcagtccaattcagtattgtctttctagcacaatttcatactgatgatgattttgaagatgaatatttgaattcaaaatttgctttaattaatgcaccagctattggttatccttttttaagagcttttattgcaaatactttagtactagcaggttatgaacaattaatgttgccaacaattaattttgttaaactttatgagcataaattagagcaaataaatcaaacagaataa

SEQ ID NO: 69538 - DNA, 549 bp, Acinetobacter baumannii
atgtctggtgcaaatttgcaagcctctactttatttgagtattcatcagcgaatgataagtatgctattgcaaaaactagcttcattaacaatatggttggtttgccggatgcacccttatctgcaaatgcagccaaaacgcctcgtggtaaagaatacatgagacagaaagttgaaaatgatgcagttatttcaccacctattaatagtttaatggcaatcaaatctgaatttactgaaaaccctaatggtggtgagtttggtcaacctgttaaaccattgcgacaacaatatcgggaacaagtagaccgttatcttggtcatggtgaagaatataagaattggaatagaacattagttgctgcacctgagcgtggggtacttgtagagattcttaaagaaggtgcattagagcttgcaatcatgggaaataaacatgctcaaaacgaacgtattgaagcaaatttagcttctttagttgcattagaaaataaaaaggcaaactcgcttaataaatctaatatagctggttctgctaaagctaaataa

SEQ ID NO: 69539 - DNA, 378 bp, Acinetobacter baumannii
atggttggatcgtcacaccacattcagggcaatggtcaattaaacttaactgatgctcaacacaactacaatgccacccaatacgccacattaagcgcaaataaggcggattttcatgactcttcaggcattcaacacatacttgccgacctgatgtatttgagcggtttcgtgtgcccaaggataaaacccaagggatattttgatttgaatcataatttggctgtatctgagaaacgacgctactcaacatcgattgctgtatcttctgttttgactccatactatgagataacagagcatcgaatctttcggcatctactcctttgtctaaatcaatcgttaaagctctccatttcccccataaagcctcaatga

SEQ ID NO: 69540 - DNA, 276 bp, Acinetobacter baumannii
atgtttaaagcaaatctagctacacgtagtaattcacataaattttttacagcatctctagcaagatctgaaggtctgccaaaatttgaatcttgttcaaatataaatctcgctgaatctaaaacagctttactttggtcttctatagataatggttttccattgataaaatctatatttttaaacctcgccaaatcatatgctgcacctaaaatacttagtaagttacgagggttgccagatgacatttcaataaatgtatccagtccagcataa

SEQ ID NO: 69541 - DNA, 669 bp, Acinetobacter baumannii
atggagtcgttggcaacaggtttaaaacaatgggcaaataattttaactttccacccgacctgattgtgattattcgtggtggcggtgctgtaaatgacttagcttacttaaatgattatgagctcgccgccctcctctgtaaacgcagcgtgccgatttgggtcggtattggacatgaaaaagatcgtactatccttgacgagattgcacaccgttcgtttgacactccaagtaaagtgattgcgggtattcgcaaccatattgttgaacgtgtacaagaagctgtagacaacctgcaaacaatcaaactcttgtcacaacatcaaattacgacctaccaaagtaagagtgatcaatatctacaacatattaaatcctctgcccaagctcagcttaattcagctcaccagttccttgagcagataaaggaacgcattcaatttgtttcacagcaacaagttaaattttctttgtcgcaaactgaatcccttatgcgagaaattcttttgcaaaacccgaaacagattcaagcaaaaggttatgcaattgtaagatcagaaggcaaagcaattcgttccattcaccaaatcacaagctctaccattactgttgatatgcaagatggagcaattaacgctaatattaccgaggtaattccaaatgaatga

SEQ ID NO: 69542 - DNA, 249 bp, Acinetobacter baumannii
atgagtaataaagaatggcgcgagctttttaatagaaatgagtatcacgaaattacgggatcttatcttttagttattgaggatgcaaagagaaaatttgaggagatttccaagggggaatgggatctgaagaaatatgtagtatggctacaaatctcaactaatcaaaaatatgcatcaataggttttattccaaattattatgaaattgataatgtagagcttaaagaaacgatctttatgagatga

SEQ ID NO: 69543 - DNA, 597 bp, Acinetobacter baumannii
atgcctttatttaatacgctttcaggctacggtagttatatttttcctgcagttgcatcacttattattcaccaaacaattgtgttaggtctggccatgctggttgcaagttaccgcgaacaacatgaaaaaattacccctattcgttttgcaggaatttttgccagtatctttacaattggttgtttaggaagtttttatctttttggttttaccttgtggttcaatgactatccacacggtggaaactttatcggtttgctagtcgctgttcctatttttattagctgtgtaattggactaggtatgctgattggctcacttttagacatgccggaacgtgccggtcatattattgtatttagctcagttcctcttttcttattaactggtgccgcctggcctcatcaagccatgcctgaatggttgcaatggtttgcttggtgtttaccctctacacacggcgtacagatgtttgtacaacttaatcaaatgggcgttcctttaaatgtcgtggccccgaaattaatttttcttgcgactattggggttatatttttaattactgcctattcacgtttaaaagtatctaaataa

SEQ ID NO: 69544 - DNA, 477 bp, Acinetobacter baumannii
atggaaagtttagttgaaagaagtgccaaacaagatttggatactttcttacgttttatatgcacatatgccttaaatgatacatatgtgtctaaagatcttataacggaaagtcttaaagacttaccgcaatccgttgtgacgtttgtatacttacttgagttttctccaaacgatcagatcagttctatcacttctatctcagatagtgttttaaaaacattgtcagagcttattcataattttagaacagcaaatattgatgagttaccacttgttgttaatttgaatatcacagatttcttccagtttttactagatcgtaaaagttcagtctttcactcaagaattttttattttatacgggcttggcaaactgtttctgtatataacgaagcaaatatcagcgagctaaaagaaacaatgctgtatgccagtcaaaataaagtctttccaaacatttcagtttcatcttga

SEQ ID NO: 69545 - DNA, 705 bp, Acinetobacter baumannii
atgtttgaattcgcctttgtttttatttttgatatttataattggattaaacagttttttaattttataagatttgaagatcttatatatttgactaaatttgcaaatcaagctcctagtatttaccttttttatatttttttgttatttgtagttcttcttactaacgttatcttagtcagcttaatttcagttaaattaaggagtaaacgttctttattttgttttttattctttggtatcgttttttactttttctatgattatcgtggggcagatgtatctacacataggagcacaattggttattggggaagtttaattgaatataatgataatttaaaatataactattatgttagattatacaattctaagaataattcattctctaaatcaaaatatcctagtatattaaatgagtatatctctcatagtgataagaatgtactttttattttaaatgaatcatggggaagttttgataaaaagataaataattatattttagagagtatctataaggaaaaaaattattttaaaaaaattaactatgggcaatcagattttgaaggagtaactgtacagggcgagttgagggagttatgtcaattaacatcgactaaattaaattttaaggatgatattgatgaaaattttgataattgtttacctaataagttgttggaaagaggggcagagtaa

SEQ ID NO: 69546 - DNA, 399 bp, Acinetobacter baumannii
atggataagtgtagagaagagtttgagaaaaagctcaaatgccaagatctcctgtccgagcttaccttttgtgaaaaaacaagtagctatgaaggggatattctcccgacaaacctggcgaccattaacggtgcttattgggcttgggtaaagcgtcaggcagagatggacgaacagcaagcgaaagtggaggatctgcaaaagcgggtggatgccttaacgcttgcgttagaccagatcgcttacccgattccacatatgcaaaaagaagcggaactcaatggatgtgagttgaatggatattgggcagtaaagatgtcagaagaccatacatattctaaagacattgcacgcagagcattagagaaagagcaagcgctcaagggggaaggacagtga

SEQ ID NO: 69547 - DNA, 438 bp, Acinetobacter baumannii
atgacagtagctgcaataaaattagaacttgatcaaccttctttaggtagtcaggttatgctttcaagtgttatcgatttgctgttagtgtggtcaataagattctggctaaacaaagaaacacttaaccataaaagttggatttcagctttgcagagtcctactattagcaaggcattattcttaatgcattctaatcctactcaagagtggaccgtagaaattcttgtacaattggtaggtactaccccaattaattatctcaaacattggcgaatgaagttagcaaaacaatatttaattgaaacgaataaaagtatttcacaaattgctgatttagttggttattcttcaccagctgcttttaccagatcttttattcaaacatttggttatagcccaagaaaatttagagaaatttcagaaactaaaacttaa

SEQ ID NO: 69548 - DNA, 147 bp, Acinetobacter baumannii
atggactcgaatgcaatcatcatcgaatggaatcgaatggaatcatcatcagatggaaatgaatggaatcgtcatagaatggaatcgaatggattcattgaatggaatcagatggaatcatcgaatggactggaatggaatcattga

SEQ ID NO: 69549 - DNA, 288 bp, Acinetobacter baumannii
atgcttgataaactagggtggcataagcagtcagcgaagcaagccattgtcgagctagagggtataactagaaaaataactactgcttcagcagctaaaaaaatagaaaaattacagatggagctaaaaaaattgaatcaggtactcaaggcaaaatacccgtctaaagagatggaaaaatttgggtataaaatgccttacagtggtggatacattgctgaaaccatcatccatgagttaaggaatcaacctgaaatattgaaggaaattttattgaatacaggttga

SEQ ID NO: 69550 - DNA, 1587 bp, Acinetobacter baumannii
atgactaagcgtattttccaatctgtactatcaatttcggtacttacaggaatgtttcctgcggcttatgccgctgaaagtgaaaatattttagttgattcttccataaaaaataaaaaagatagtgaagttacacaattagaaaaaatagtcgttacagcaagtggctttgaacaaaatataaaaaaagcagcagcttcgatttctgttctgacacaagaggaaattaataaaaaagcatatcgcgatgtaacggatgcacttaaagatgtaccgggggtggtcgttacaggtggcgggagctcatcagatattagtattcgtggaatggggagcgcctataccgttattatggtcgatggtaagaaagtaaatacacgttctgtgcggccaaatagtgataattcaggtattgaacaaggttggttaccaggaatcgaaagtatcgaacgtattgaagttattcgtggtccaatgtctggcttatatggttcagatgccatgggtggtgtgattaatatcattactaaaaaagtcgcagatgtttggaacagttctgttaagttagatacaacaattcaggaaaataataaatctggaaacctttaccaagctaatacttatgtatcgggaccattaattaagaatttactcggtttaaaagccaatggtacattttcacaaagagatgaagatgaaattattggagggtataacaaacaaaaaattcgggcaggaggggctactttaagcttaactcctaatgatcagcataccattgagcttgaataccagcgttctattcaaaatcgtaatgctacagttgggaaaacagtttcacctattcaaactggtcgtaatccaccagcagattcattaacagactattaccgtacagaatatagtttaacgcatcgtggtgacattggtcctgtgaagactcattcttatattcaacgcgaagaaaataagaacccgtctagaaatatggaagctgtaaatactacatttaatacgcttaaccaaatcacattagcaaatcatgcgcttagtgtcgggggcagctatttaaaagaagaattggatgatttaggtaaccagttaaaagtaggcgggtcacaacctgtttctaatttagatcgttatagctgggcattatttgcagaagatgcatggaatattacagatccttttacattaacaatgtcactgcgtatggatcaggacgaaaaatttggagatcatttcagtcctaaagtatatggtgtatggactttaaatgataactggattattaaaggcggcgtatcaacaggctataagacacctgcactacgagcgacagtagcagaatgggggcaagctacgggcggaggacgttcggcaggggttattgttggtaatccaaatttaaaaccagaaaaaagtacgaactatgagctgtcattttcttgggataatcttgataacctcaatgctggtctaacgatttttaatagcgaatttaaagataaaattacagaagttagaacatgctcgggggatgcgggtacttataattgtgattggttgggtactaaaatttga

SEQ ID NO: 69551 - DNA, 360 bp, Acinetobacter baumannii
  misc_feature (224)..(233): n is a, c, g, or t
atgatgatgaagaaactaataagtttgttagtacttataatagtagcatttcctactgtagcaagaattcctacgggtgattatattatgattgataagaagaaagggggatttgttaggctttgtaaaagtgaatcaactgaagaacttgagaacataatcttaacagataaatctttacatttagcattaccagagagtacagaatatttaattcttaaggnnnnnnnnnngattaataatagtgatgtctataaatgggatgcttatttaggaaataagaggattgaagacttatcgttcttttctattgctaaaaataaagctaagaatattatcagcgtaggtatttgtaaatga

SEQ ID NO: 69552 - DNA, 300 bp, Acinetobacter baumannii
atgaagaaaatactttttattgttgataacttaggtaagggtggtgctcaaagcattacaagtgctctcgcaaactttttaagccgctcttcattaattaaagtcacagtttgtgcacttgataatacgaatcaggaatgtcatcttgaaccatcagttgaacgtattagtttaaatattcgccatgatttttcttatggtaaattgtggaaaaggaaaaatttaacaaaagctgaacaggttatggttgaagaaaaaattaattattttaggatttcacaatggatattatctttatga

SEQ ID NO: 69553 - DNA, 1182 bp, Acinetobacter baumannii
atgacaatttttaatcaaagtaaagaacgtttagacacttcagctaaattgcatacgcaaactaactatcagtatcttaatcaatctggaacgccttatgctcaaaaaattagagaagttttaaataactgctttgatctatatgattatgatgaggctgaaaaaaaagagatcctacaacgaatccgtggctccaatgaggttaattttcattctgcttgttttgaactattcattaatgcacttttagttaatcagggttataaattattgcctcatcctgtgttagagcattctgctaagcatccagattttttagtgacttcgccaagtggtgaagagttttatcttgagttagtaactggagtagaaaatactcattcttctcatttaaatagtattcttgatgtttttgaaaaaaattcacatcctaatttttttataagtattaaacataataatggggaaatgactaactctcccaaaacaagtgagttaaaaaaattcattttcagttggcttgacagtttgaatcctgatgatgttctcagtgaaataaaagaaggcatgcaaaataatacaggatcaatgtttgatggaccttcaaagatatggactcatgaaggatttgaaataaaaatgacagctattcctgtatctttagaaaaaagagggaaaactacacggttatatggtataggtttttctggtgttgtatgtcttaaaaatgatgaaattattagatcttctctaaaggttaaatccggtaggtatggcgatctagataaaccattcattatcgctacagcattaagaccgtctcattttagttttggtttagacgaagatgataagaagcaagctcttttgggttcatatcaatggatattcaattcagaagccaatacctcagaaattattttttctggtcaagggttatggatatataataaccaaccaactaatacacgagttagcggtgtatggttctttaataacatagattgctattctcttaagcaattggaaagtgatctatttattaatccatggtctcagatgagtttgaaccaagctcttaatgagtttccaaagaccacaatcgacttaatgaataccaatttatttaaaaaaacaaatggcactgttaatcctattgatattttaatgatggaaaaatga

SEQ ID NO: 69554 - DNA, 399 bp, Acinetobacter baumannii
atgttaaaaaaatctttatttaacctaatcatttcagttgcagtattattctcaatttcatttgtagatttgtattgcacacatacatcctttaaattgtttaaagtttggttagtagaatttaacggaattaataattattcaattgttattaataattttataattaattttttaattgttttcttaattgtttctctaattttatactttataaaaattaagaatatttttatttatatagccttagttttgctatgtatttcacttggtaacttctttatgaaaacgtctataaatttaactatagatactagaaaagaggttccatcaggtaattcggttgataaaagtttagcttttttattgatgcataaaaaagttgagtgtgaagactaa

SEQ ID NO: 69555 - DNA, 1071 bp, Acinetobacter baumannii
atggttattaatatttctttagtgatactttatttactcattatctgcctatttattttaatcttaaaacccgaatggcaatcccgtcttaaagagacattatcttttttaaaaaaagggaagaaatcttcccctaaaattattaataataattctccgttaaatatcacagaagataattccaatgaattcaaaataaaatttaaaaaaatcaataaacaacttttaaatattaaaaattatttagcctcttctaaaaacaacaatatctttgacttcacaagctcaattgacaatatcatcagttatcttaatagattaggtactgatgaattatttattttagaaataattgaaaaaaatttaaatcgcatcgaaactccacaatcatctttaaatccagatgatacagttaataaaatttggggtgaaatttcaggtattaaaaatctattacgttattatggagatgcaaatatagaatatagctcaggtatgaaagaattctacaaaaattctttagctgaattaagtatagaattaaaaaaatttagaaaactaaagggtattctagaaaactctgcaacgacaaaagtttatgaaaatgctaagaaaaaatactctttagctttttactcatatttagcactattactttccacaatatctggtttattatttttttcattttatataattaaagaaaaagcagcgctaaaaaaattagatatggatatctatgactattggactattaaaatcacttgtatttttatttttgcaactatgattacttttctcttaaaacaaatagctcattatcaaaagaaaagagatgaagccgaacgtactacactcgaactaaaagctttaccttcttatttagctgatctagaagcaaaagatgcaacgaatttaagaaaagatcttgcaccaaaatattttggtaaatccaatgataattcgactttaaatgaaataggcagtattgtcactgaacagcttaaaacatcttctgatgttgttaaatcttcagctgagatcattaaaagtttaaaacctaaaccataa

SEQ ID NO: 69556 - DNA, 510 bp, Acinetobacter baumannii
atggacgcttgtaatattgactgggacttagtatctaaatttacaccttatattcttgcattcattgcctaccgtatttggcatatgcaaaagggtagagaggtaatagcaaatgaagcaaaagaatttctctataatttgagcaagttagaattcctgcaatgtgaaattgaatcaaaaggtgacagcaatacagacatacaagaattacttggtgagtataaaacaaccaaagagaaaatgtctaataacgccaattttcttggattagctcttaaaaaagataaaacattgagtcatttgagcacaagttatttagcacaatgcataatttatataagaaaaattaacctaaaattaagtgaaaataagagttatgaattaacagatacaccgcatccgaatgatgcatttctacttaatgaacacttattaagatatgcgttatataaatctaggtcttgtaaaagcagaatactgtctataactaaaggttattaccatccataa

SEQ ID NO: 69557 - DNA, 588 bp, Acinetobacter baumannii
atgacaattagaatatatgtaagagcaagtaccaaagatcaagatgcagaacgagcattgagtgatcttgtctcattcagccaaagctatggcgatcaatacaaaacatacatagaaaactattcaggtacgaagctagaacgcccagcattaaatcaattacttacagaggcaaataagggcgacattcttttagttgaaagtgtggatagacttagccgactatcacaggatgattttgcaattctaaaagataagatcaaggctaaaggtttacgcttgatcgtagctgatctgccgaccacacatacaaccaatgacggtatgacaggcgagatattgaatgtgattaatgccatgctcattgatctattggcgactatggcgaagctggataacgacaaacgcaaagaacgaattaagcaaggcttagtacgttcaggatatgtgccaacaggtaaaaaagctgatttaactaagcatgctagaataaaagggttaaacaataaaggcttaacaaaagaagaaattgccaaagctgtaggatgtggtgtagctacggtgtatcgagttttgaaggaggaatag

SEQ ID NO: 69558 - DNA, 498 bp, Acinetobacter baumannii
atggatggacttcaattacttattgaacaacaaaatgaatttgaagcctataaaagcgagaaagctagacagttggaagagcatgtaaaccatctaaagtatttgattacaacagagttcctttctacctgtcccgatttcgatcatgagattaaagaagataatgttttatcctttaagtacaaggagttaattcttttaattcaaattgttaatcctataacggagaagcgtaatgagaaagaatataattttgctgagcgtgctactaaaagattaaaagttaaagtaactatgaaaagaaaaaaggaagcgcatccagaaatctttgaaatattagatgtaactcagtataaaaagaatggaccttacacatataaatatgatgataagaccactgaagattttctcgaattacttgatttattctttaagtactttgttgttaaaaaagttgaattcaatcaaagtgaatttacagggggctttggtttgtag

SEQ ID NO: 69559 - DNA, 474 bp, Acinetobacter baumannii
ttggagcatatccagcaagagggtgcagaaatagagctaatagacagccaaaccgtgcgtttacatcatgcagagcgcatcacagatattgaaatacagaaagtaaaacagtctaaagcagaaattatcgaaatactgagtaattcgacagcatccaattccgaaatattagaccaagatatacagcaagaagtgatacagacctattttgaacggctggagcgacaccgtagcaacttgcgtaagattaataatcctgtagaaaatgcccttgttaaacctgagcatatacggcaagacctaatacagaaatttctagtgaatcaggagcaagcccagcattttattaatgctctaattgaacagaacatcttttattacgacagtaattttagattctatttattccctaatttcacccatccagcaatgaccgcttttcagcatcacaatagctttgcccaagctcattaa

SEQ ID NO: 69560 - DNA, 2538 bp, Acinetobacter baumannii
atgactgaatttttagattatcaggaagtccaagaacaagcgtttatccatgctcaaaagctggcagaacgtgaggttaaaaatggttatcagtttgagtacctattctgctataccgatggtcacggtatgcctgtttattggaaagtccgagcaaaaaaccaccatactggtgataaatggatacgtatattctccagtggcgaacgtggttttaaatttggtgatcctaatttcacggaactatacccaatagggcaaggcaaaaagccgttatatgcccttgaacaggtattaaatattgccgaaaaacagcctatttatatcgttgagggtgaacagaaagccgacattatcaattcattgggcttaactgcgaccacatgcggaggcagtgggaatacagataaaaccgaccttaagccacttgccaatcatgccattgtgatatgggcagataatgacaaggctgggaccaagttttttaatgaaattacccagcaacttgatgtattgagctgtgatattcgatatatcgttttagatgggctgaatttgcccgaaaaaggcgatgtaatggattgggtagacctacgcaagcaacaagggctaaccacgacagcaagagacattacagcgttaatcacagcacaatatcagccaccatcaccaagcgataaattacctgatggcatgcttgcagagccaatggaatgggaaaacggcagttttgaggtacacgataaaggcgtgttctatattgaaaagctgaaaaatggtgaatatcgggaacgctttatctccagtccaattctagtgacagccaaaacaagggataacaccagtaacaactgggggcgtttattgcagtggcaagatgatgcttttattcaccataactgggctgtaccgaatgagctatttcaaggtgatggcacagagtcacgaaaagccctatccaatcaaggcgtgatcattacaccagaccgcagagggagagagctttttcaaatctatttaatgagttatccagtcgataaatttgccttatgtgtggatagtgtcggctggcatggtcatcgttatgtattgccgactgaaacctatagtaatccagccactaaacatgatgaagtgatcgtgtatcagcgtacagatgggctagataaccgctttcaattcaaaggtgaattagaaacgtggaaaaatggcgtaagtttattgctagaaagccattctaagcttgtatttagtgtggcgtgtgcctttgctgggcagttacttgaaccattaaatcagcaaggcggtggcttccatattaatggcacatcatccaaagggaagagtactgctatttatcttgcatgcagtgtatggggacacccgaaagagtattaccgtacttggagatctacaggcaacgccctagagcaaacagcctttatgcacaatgatggttttttggtattggatgaaattggcgaagccagtgccaaagatattgggcaaaccgtttatatgcttgccaatggtcaaggtaaggcacgtatggcaagaacagcaataaccaaagccccacagcaatggcgtgtcttgttcttatccagtggcgaaaagacctttaaagagattctaaacgagattgggcaaacagctaaacttgggcaagaaattcgattacctgaaattagcttagatgcttgtgaatatggcgtatttgatcttgtggattttgcccctgatgcttcacagcaagccaatatgctgtatgaaaattcaatcaatgcttatggtgtagctggtaaagcatggcttgaatatttgaccaatgataaaggtcaaatgactgaaacagctttaaaactttaccaacaatataaagcaaaacttactcccgataatgcacaggggcatattgcccgcgtggcttcacgttttgctgttgccgccgtggctggcgagctggcaacacaagcaaatattacaggctggaaaaagggcagggctttagaggctgtaatcagcgtatttaagacatggttaaatagctttgaaatggtcggggattttgaagatcggcagatactccagcaagtcagagcattttttgaggcgaacggaaatagccgttttgataccttaattgagggaaataagcgtgcaagctatggcaattcagatcatgccgatgatgcaaataccgataccaagagctttagagaaaaaaccatttatcgagtgggctataaggttgtaaatgcccaacagcgtgaaaccttgcgttatttgttctttaaagagcaatttaaacaggaactttgcacaggttttgaccctaagaaagtggcgaaggtgcttaaaaaacatggctggttagactgtgctaatggcaaaaccaccaaacaggaacgtactcccgaaagtaaaaatccagtttggctatatgtgttcaacacttcaatgtttagctatgacattgagaaagccaccaatccatatacggatgacgtaaacacaggcacaaccatagatatttaa

SEQ ID NO: 69561 - DNA, 336 bp, Acinetobacter baumannii
atgaaaaaagcgcaccctacgctagggaaatacagaaacaccaataccgataagccaaagaaatttggcttaaatcgggcattacttcctgatcctatcgaatatttaaccgctagaggctacgccgtcaaaggtcgtggcgaatggcgagaaatgatttgtccttttcatgatgacagtaccccaagcctacgcattaacagccgtaaaggttgttttaaatgtatggcttgtgaagctaaaggcggtgatttgattgcatttcaccaattgctaacaggcaagtcttttattgaagcgtgtaaagacttgggcgcatgggagaatgacaaatga

SEQ ID NO: 69562 - DNA, 528 bp, Acinetobacter baumannii
atgcctaatctaccgtacaacaccagtaagctattggctgaaatcagcaatatcaatacagattatttagaccgtatatccgagttaaaagaccttgcaaatattgctatccaagaatctgaaaacgtacaaaacacgctaaaacgcaatgacttagagcctataattgccatttataaggcggttaaagaactgtcatttatttggtgcgagtacatagaagaaaacaactttatcatccgtgaaattaatgcagatagcccttttgatggcaatctatttagctttgaagatgatcttgcatcatatttggaacgtgcagagaccttatccaatctaattgcagttatccgaaaggaaattgaaaatatacatattcaatatgttgattttcgcctccatttgcagagcgtgaatagccttacaagtgttattcaacgttcatttaaagcgttatgcgctgatattgaagctgaacaggacgttttaagcgaaatgtaccctgaaactataaaaacaggggcataa

SEQ ID NO: 69563 - DNA, 306 bp, Acinetobacter baumannii
atgagcaattttcaaaattacattgcaaacaccaataaagatttatattctattcatgcccaacaaaaagcagttgggttagctttggtcggctattttctacaaggcgcacagtccgtttattgggctttttttgtgcgtaatatctctatgcgttcgcatgttatggcgaagctggagagggacactttcgagtgtgtagggaaccttgtagacctatcgaccaacccttttcagctttgccaccctcatttggtcgtgaatggcaaagctcctaaactacaaggagtgcataatcatgcctaa

SEQ ID NO: 69564 - DNA, 633 bp, Acinetobacter baumannii
atgacagctaaacaatataagaatgatgaaatttatctcataaaaatttacggggatgcaatcggtgaaaataatcctgatgaccgttatttgttggggatttatgcttcagatagtcaattgcatgcccatgattgtgctagtgatctatctcgaaaatttttactttcaatatcgacacagattgaggaaaccaaccgaaagcatgccattacggagatacagaaaaagctacgctttaatgatgatttagagcatctaagtaatgatgaattaatagaactttcccagtggtggtattgctacgagttacggtcaagtgatgatccaacccaacgcacacaaggctttatgcgttttactgactttatacaggcgcaaaatactcaaagtgaatttaagggtaactttccaaaggagcaaactagcctagattttggttgtgaacaggtaaactggcagaatcaggctgatttttatagaaaagcgattaaatacacgcccgagcatcaactatacaaggcgaatcaatgggtcattaataattatcagcgtagccaaaccattttggatgtaatccgaaagcgtaaacctgtgcctaatcctatcaatgaacatatttttgaggagtag

SEQ ID NO: 69565 - DNA, 324 bp, Acinetobacter baumannii
atgtatgaatcaaatcagccaattcaaaaccaatacggtacagggtgttattaccgcatgaaagaccttgctaacattcccgaacgtccagcccgtatccatcaatataaatcaggcattaacaagggcaaaaccagagtaatcggcgaacgtagagctagcaaaggtctaataggcgtatctgaaaaaacactatgggaatgggtccgtaaaggtgattttccccagccaataaaacttagcccaacgattaccgtatggcgagcaacagatattgcggaatggatgaaatcaaaagaaataggggcaaaccatgacagctaa

SEQ ID NO: 69566 - DNA, 237 bp, Acinetobacter baumannii
atgcaaattcatgctttacctactcatgcacaaccgctacgagtatctcaaaaaaccacttgtcaaatgttagacctcactgccgagggactacgcaaacttatagctaaagacccaacattccctaagccttacaaagctggaactacacgccaagcccctgtttattttgattatgcggaattggtgcaatggcataacagccaaaaacaaaccaatacgatgcaatcggcttaa

SEQ ID NO: 69567 - DNA, 738 bp, Acinetobacter baumannii
atggatatttcaactacagaaaaaagaaacaagtttattgaaaatctatctaaggacttatggattgaatgggttctattaactgcggatatcacagctttttatgctaaaacacccccacaattagatgcgaatgaagataccttttttattctcagcctgttaaaaactgatgaaaaagacttaacaattaatatttttagggaagtttttaaaaagcatattgaacaggggaaaggaaagttaagaaaattacgcccatttccagaaaactatagcgcacaaaataagtgtttaacaaaaagtgaagatgcggaactttctttttatttcgctgtaagagcgtgtatttgtgagtttaaaaatgatgctaataaaggattatttggactatccagagccatattcttgcatggatatgcgcttggtttaagtaagactaaatcagtatccattatttcctacaatgaaatggcagatactcatgatttgggagggcaagccgtggcaaataaagcagatttagctaaacagcaggtgatagctttatggatcaatagatttgataatccagacttgaaacctaagcataagaaatttaaagcacaactagcacaatggataattgaaaaccctgatgttattaccgatcaaaaggggagtacccttactaaaagtaatggtgaagcatggtacacagataagaacactattagtggtattttagttgggcaataa

SEQ ID NO: 69568 - DNA, 1371 bp, Acinetobacter baumannii
atggctaaacagattaagccactttcttctactcaatgtgatagcgcaaaacctaaagaaaaagattacagcttatatgatgggcaagggttaattttattcgtccgtaagaatggctcgaaagtttggcggttcaaatataaacgtcctaatggtaaagatggattaatgacactgggcaactatccagcacttactttaaaagaagctcgggaacgtcgtgcaatctatttaaatcaattagccaataatattgaccccataaatcaaataaagattgaggaagctaagaatagcgatgagtttagctttgaacgtattgcacgagattggcatgaggcttatgtggctactggcaagtggaatcaagctacagctagaaaagccctaagcaactttgaaatgtacgttttccctgtcattggtagcaaaccaatagatacgattaaaacccgagatttgtatagcgtcctgagtaagattgaagaaaagggctatttagaaattgtgagtaaaacacgccaaagattttcaggtattttcgcttatgccattactaaaggctatattgaccttagcccagccgtggcattgagtgatgcaatcactattacaagaaagacaaagcactatcctaaattgccattggtgcgattacctgagtttttcagccgtttaaggaatgacggaggcaacccaattaccaagctgtgcttagagttcgccttgcatacctttgcccgatctagtgagctacgctttgcacgctggaatgagtttgattttgataaaaagatatggaccatacctcctacaagggaattgattgcaggatataaagattctcacagaggcgcaaagatgaaagaaaagcatcttatccctttatccccacaagcattgaaactcattaaagaaacacaggtttatagcggtatttccttaaatgtatttcctaatagcgtagatatgggcggttttttgagtgaaaacactgtcaatgacatgatacggcgcatggggtacagcacacaggatgatgtatgcattcacggctttaggggtatggcatgcggtgcattgattgaaagcacattatttactgaggatgcagtagagaagcaaatgagccaccaagaacgcaacggcgtgagattggcttatatgcaccatgcggaatttatggaagaaagtagaatgatgctttgttggtggagtgattacatcgaagccaaccaagagaaatttattagcccaatggagtttagcctttcattgatggagcaggcaaagcagggcgtaattaatattaaatatgcgaagttgattaagcttaaattggctgaaatgacaaattcattcatagcttaa

SEQ ID NO: 69569 - DNA, 477 bp, Acinetobacter baumannii
atgaaagttaatacaaaattataccctcagtatttagcaagtgaatttatcatagcatttatatcatcaatatttacattatcaattacatattactttgatggatcatttggagtgataaaacttttagatagtgctaatggaaaatatagttttaccaatcttatagctttaggtattttatttattattagtattatactttttgtgatatatcgcttatttaatcctaggaataaacctatttataaaagagtcggaaatagtttatatgatcttaatttgagcctcctgcgagtaggaggaggttttctagtagcctttccttttctatatatatttacagatggctttgactcagcattaattaaattcttcttttttggtttttgcgctttagctgaggctgcaggcttttctttagttagagatagcattgagccacgtttagatagacctatccaatatagaaaataa

SEQ ID NO: 69570 - DNA, 207 bp, Acinetobacter baumannii
atgagccatcgaccagggcggattattgaggaaatttcgcttaagtttgaacgtccacgggatgttgagcttgtaacgagtagtgaatttacagccattaaaaaacattgcatccaaacgttaaaagaagccactcaacaagaagagttaagccgtttaaatccattagggcttggaaagaaatcacaaattaaggaatacgaatga

SEQ ID NO: 69571 - DNA, 1656 bp, Acinetobacter baumannii
atgttagtacgatatatttttattttttcagcatttttaatgagtgctgcttggttgattcctaatcattatatgccttggcttgctgcacatagtgattttcttgcatttttagtattattaattttaagtatagtttttattaaacaaaagcaaataatatttttacctttgccctttatatatttatctttaattgcctttattccaattttacaatttttagcaggtaaaatatttttttttggagatgccttaataacagtcgtttatatattaggttttgttcttgctttattgtatggttttctgttagggggagaaaataaagaaatttataaatggtttttttttctcattttaattaatagtttaatctgtatttatattgagatgaatcaatggttgttattaagtaatggaagtatatgggttgttgatttatctcaatcctctagaccttatgctaatttttctcaacctaacacatgcgcaacttttctttcaatgggattgatgtcaactttatatatatatgaaaaaaaatatattaataaaattggtcttattgtaattggtacttttattttatttggtgtcgctttgactcaatctcgtacatcttgggtttttatttcactttttataatttggtggttttggaaaaataattacctaaaaacaagattaaataaatggttaatattttattttttaatagtttatatgttttatatattaattttgccaaaaatttcaaaatcattaggtgtaatcggcacagctgatattataactcgtactacaactggttatttacgtattacaatgtggaaacagatgttaattgcaataaaagaacaacctttatttggttatggatggaatcaggtaagtgttgcacaattatctgtttttctaaaatatccaacacaggagtggattgagcatagtcataatattgtattagatatatttatatggaatggaatcccgttaggtatattaattattggttttattgggtggtggttatatcaattaagtaaactcgctatttctatagaagcttttgctgccttatctatggtgggtgcagttttagttcatgcaatattagagtttccactagaatatgccttttttcttttaccagttggatttttattaggattggtacagagcgaaaataattatacgaaaactataagtgtgaataataaattattttctatttttatagtttctgctttttctttatatatttggatttttctagaatataaagcgatagaaaaagatgttcagttagcacgttttgagtctcttaatattggacatattcatgctaatcaatctgctcctaaaattttattacttagtcaacttcgaaaccagctaaaatttattcgtactcctcctgtagctaatatgtcaaaagatgaattaaattggatgaaatcagtatcatatcgttatgctacaccaaccgctttatatcgctatgcacaggcccttgctcttaataagcagcttcatgaagcaaaaaagcatttattgattattgaaaaattacatcataagaaatttagtacagaatctttatatcaagtcaatgactctttgatatttggttggaaaaatacggggaaatga

SEQ ID NO: 69572 - DNA, 561 bp, Acinetobacter baumannii
ttgagtggattaaagaatatctttgagacattagatcatgattatgcagtattttcatcagatttttcatatgagaaattaagaaatgagattgagaatgctaaacttgaagagcaagtaaaaatacataaagttattaccgatatccagaatcaaatattaggaattcctatagcaactgtcattgtagctacacaatttaaaactcaaaagcaggttgattataatgcaatttatcagttttgcttaaatacaggtatttttattggagttttaatttttgtggttattttgtggtttttaataaaaaaccagaaagaatcattgatgggtttaaaaactgagataataaggaaagacaataaatttaaaattgatagtccagttgtatatgaaaaaattgtaagagaagggaaatctccatttgaagatgtatttaaccgtataggtacccaaaagaaaatattaaatactattaactgggtgggtatacttggcttagttattactttttttatttactgtgccattactgttgatccacgatatttttttaaatag

SEQ ID NO: 69573 - DNA, 489 bp, Acinetobacter baumannii
atgtcacttcctcatgttttattgaccagtttactagaacggccaagcacgggctttgaactcgcccgccgttttgaccgatctatgggctttttctggaatgccacacatcagcaaatttatcgtgaactcaataacatgcttaaaaaaggctgggtttccactttagaaaatgagatggatagtggccgaaaaaaaacttatcaggtcgaacaacttggccgtattgctgaggctcaattgggcaataatcaaatattacccgaactgttacgacatcttggtctacaccaagaaaagcttaagctttaccaaaccatttacgataaagattttaaagatagcgatgatttgaataatcgagtgttatatattcataaaatgatcttagaactcggcattactatggaaactgagtggatcaaatggttagaacaagtcatcccgcaattaaaactctttgctcaagataatgtatctggagaataa

SEQ ID NO: 69574 - DNA, 222 bp, Acinetobacter baumannii
atgaaagtttttataatattatgtaaagttcatactgtagctgaaacaattatgcctttagccatgagtaaagctttcgtaaattgttatattaatacttcttcctatgaagaagctacaaataaaattttgaaacagtttacgagtgatggaatatatttggatgaaattgaatctcctgtgtatgaaatgcctgctactagttggtcgtcatatatttaa

SEQ ID NO: 69575 - DNA, 1005 bp, Acinetobacter baumannii
ttgaaatttattaaatgtaaggttgaaatgatgtttattaatcagcaaagacaaaaaatggatgaaaagtattatctctctaccagagctgctttaataaatgctattcaagactttttaggtgaatctaatagtgatgaagatattgaagcgggatggattgattcttattctatagcggcaagataccaatttgatctattcatgctagactatactgcaggaaaatctatagatcacttacatatagattttgaaagtgttataaacctatttaatattttatctgaaaaacaaagagcttattataaagatcctaattttagtacctttgatttagaattaatagatgattattgcttatatatttggttaattagtctttgttatttattaaagagaaatgacttattgatgagtgttgccaaattagtagatggagagactcaagaaaatggaggtaaggactggatagttgaagagtttttagctttttctgatgataatcgttttgactgttctgatgttctttttccacagccttattttgagctttcaaatgcttttgtaagccaagataataagctttctctaaagcatttgcataaatttttaaagaaatggtacaaagatttagcaggtgcaccttggtatgatactcataaatctgatgacggatattatggatattggtcttttgaggctgcttgtgccgttattttattggaaatagatgataataaagaattacacgagtatctttattatcctaaagatttaatttctttctttcattcatttaaaccaactaagggagaggaaaaattattgagtaaatataatagaatagctattaaagcaggtgagaaggctccaatatcgggtttttggtttacagtagttagtgataattctcgaaaatattttgaggccggagaaattcttccggaaattaaagatcaagactggggagaagtcttttggcagtttgctagtcaagaataa

SEQ ID NO: 69576 - DNA, 984 bp, Acinetobacter baumannii
gtgtcaaattttacagaacagcgtaggcagcaatttttaactgaagattattatttaaaaactaaagaatacaatgaggaaggaattcctctatatctagaaagtgatgcatttgaagatgatcaatataattgtggtgaagcaagtcgttggactgcaattacagatatatatacttctttattgtatcttacatatactgctggacattctatacaagaacttatacccgtatttgaaaaagttatcgatggttatgaaaagcaatcagaagcattggctctttttcataaatcagaaaaaccttctgttattactagccaaaatgaaactttaaatatattaagccttgcttttttactacatcgcaatgatctttttctccgtattcattctttagttaatggtgagggagatagtcatacaggcgaagatgaaattattaataaattttttaagttaaatgattcaactcatccaactataaatgaaggaaatttgttttccttaagttatgctaaattatgtgatgtgattgacaatgttttagtaaaaagtgataaaaaacattcagtcgagcttttggatgaatacttatcaaattggtatcaaatgaatagaaatgaaatttggtataatagtcacttggatttagaaaataaaagttcctatgtaggttattgggcatttgaagcagctgcattagtttatttacttgatttagatgatagttctttatataaacatctattttaccctaaggatattgtacagtgggctcgtaatcaaacaaaaataaaagcattaaatgatgatgtaatacaaataaaattaagagggggggagaaatgtacaagaactggttattggcaaacacctgcacagccaaatttacgccggtattttgttcaggatgaagttcttcccacacttattgaaatggactggggtgaggtatattggtattgggatggtgagaattaa

SEQ ID NO: 69577 - DNA, 1353 bp, Acinetobacter baumannii
atggttgatttaaataaagatgatgtagcacttattactcaagcaattgctattggtttttctccagctggagttgcacttgatgtggctgatttagcaagagcctcatataatttatatcaagaaaagtctgatgataattattttgaagttattttatgtgtgattggatttataccaggaccaggagatgggttaaaagcaggattaagaattgtaaacagaaaaccagaaatactgtttgaattaatacgttttatcatgacacattgtaaaatatatgggaatcctgaacaatggttgagtgaaataatcagtgatacaaaaataagagagttgattagaagcggtaaacgtgaagctttaaatgcatctaataaaaatataggcaatagatgggcaaaatattggattaaccaaagtatcgaaattacatttaattttttagaagcatctatttcatccttggtgcaattactcgcaagaaaagttttacattggaagacaaaaattcctaaatcgtcagcggataaacggcatgtaggtggtggtaaaggtcatcaaaataattctgcccatggaacaacttatgacggtaaaactggtcaaaatggaaatggtcatggtagcaagggtaagactttatcaaaagttgatatttcaaaagttttatcaaatcttgaagttggaggtgttggtgaacatatggcagactattgggttgctaacaagttggcaattccggcagttcatgattctgggcagcaactgactcccaaattacaacgccctatgacgaaattacacataggtattcatgatcaaggtattgatgcgatatggaaatctgataaaaaaaatattggtattatgaatactaagagttacgcgattatagaagccaaagctagtttaagcatggggaaaggtacaggaccaggttctctattaaatgatttggataaacaacaggatacgagagaaaggcatatagaaagagctagtgctaaaaaagaaaaaagagctgaaaagaaattaataccaaagaaaaagtttttaatcaatcaacagatgagtgatgaatgggttaaaaaaagattaagagcaacttcgttaagaaatgttgaaattgcaggattttcacgtcatttactttattttaattacgctcaccctgaaactgtagaacacttaaatgttttagctatatctattcaagataatcagccagttgatcatagtgaacatttaaatgaacatactccatcaaacttttggggggcagctaaaatagatgaggctttaaacaatcgagttactcgagcgaacattaagaatggtcatactaagtaa

SEQ ID NO: 69578 - DNA, 1794 bp, Acinetobacter baumannii
atgatggggtttttttatttatatgagtcaaaaatgcataaaataagtgaagtaactattaagaactttaaatcatgtagagatactttttttaaattagaatcttttactgctttagttgggtataacaatgctgggaaatcaaacttactaaaatgtattgatgcattagtaagaggtaaagcacaagatgaaagtagtttttacgatcttaatcagccaatagagatcgttgctttattagaaggattaaataaaaaaaatttagcgcatctttcggatatacagtacaaaagtttagaaccttacttagaagaaggaagaattagaattagatttttccaagaaaaagctggaactggtaagaacgctgtagtgatgggtgtacagtctccaagtcaaactgatgaagtttggaataaccccaatggtctacctcaagctataaccactttatttccggaaccaacgtttatcaattctatggaggattcggcagaagacgtttctaaatataaggctagtaatactattggaaaattaatagcaattttgcaaaaagaaataattacaacaaaagtagaggtaattaatgaggctttacaagtaattgggtcaaaattaaatgtggatggagtagaaagattaaaagatttcgaagagtttgatgattctattaatgagaagatagaagatttttttcctggtttgaaattgaatatagatattccaacgcctgatattgctgatttgtttaagcagggaaaaattaaagttacagaagagggtaatcataaaaagatagactttaatgatatggggcatggagcacagagagctatccaaatgacgttaatcaggcatttggcagaaattacaaaaaatgtatcaaaagaaggtaaaacaaatttacttcttatagatgaaccagaattattcctgcatccgcaagctatagagttattaagagcttctcttaaaagcctatcaaagaaaggctatcaggtgatttttactacccattcaccttttatgattgaacaggaagatattccttataccaatattgttcgtaagaattgtgatgggacacgagttgaagtcagattaaaagaagctattgctaaagttttagatacacatgaggcacaagctcgtttattattcgaaacttataacttagggcaaattctattttctgatactgtacttatcgctgaaggtgataccgaaaagcaagtattacctcctttaattaaaaaaattataggtaaaacaatgggagaacttaaacttgcattagtcatagctagtggttcatctagtatctcaggaatgatgaatattttaaaagaaatgaatatacccgtaaaagtattagcagatttggactttgctttttcggcgtataaattccatttaattgaaaaagaaaatcaatatatacaaaaatgtctagatattttaagtgaaatacagccagaacatggatttaatcttcaaggacgttatccaagtagtgggaatggttttaaggctgcccaaatttatgaacttttggctcaacaatcaaaagcgaaagattcaattcaaggattgatagagcattttaaaacacattcaatttgggtgtggaaatctggtgctatagaaccgcatctttgcttagaagctaaagaaactggtgaatggtataaatttaaacaagacttaaatgaaaaagaaattgaagaagtaattggagattctatttatattcaggagtttgcaaattggtgtgttcatagaatctaa

SEQ ID NO: 69579 - DNA, 771 bp, Acinetobacter baumannii
atgaatataattgcacaaaatatgccacatgaaagcgttgtacctattattctagaattagatggacatcctttttttagtggcactggcttttttgtatactttcctcaattcgaggatgatattttttttgttacagcccgtcattgtttaaaatctgatgctacagatcaatttctaggaacacttaagattccttataaaagctcagtagaagctggttcttcagcaataaaatttgagtgttttttagaaacaaaatatagagattcagaggatcaaaatatggaggatattattgttggagttattgaaaggactacacctgaaaattacaggattcttagaggaagagctttaagagtactaaatcaagactgtgttaattctattttagaaaaaaaaattgaatttaatgggaattttcgaactttaggtttccctagcctatctaaagaaataatttatgacgaagaaagcacaccaattagtagtatttgccaatcacggggattctatggaaaatttaaaaaatacaattgtttttataattggtatgaaatgaataatataagttggaaagaggatggtattgatggttttagcggctctccaattatagaattaatccctagacattatggaagtcaagagttggaagcaattcctttaggtgtacttgtaacagaaaatcactttatttcaataaatgctgtgaccaataccatagctaattattttttagaagttagaaaagagacccctgagtaa

SEQ ID NO: 69580 - DNA, 378 bp, Acinetobacter baumannii
atgatccttcggcataataatttatgcaaaagtattttgctgattttattgtcgggtggatgtttaaatattccaaatactgtgttcgcaagcgatttgcctccaccaccaagagacattaatgaaattaatcaactttttaaactgtacctcgatttaattgtgaaccagtattcggtccagcaagttgtgcctgttattgtgaaaaatgatgagtacttcatacaaaaagagaagctgattgatgaattagaaattaagatccctcaagatttattaacaaacactgacacatctttatctaatcaagatgttttgacattggggtttagtggtgacgcgagtgattggatatcaatcttcgaaccaatactttaa

SEQ ID NO: 69581 - DNA, 687 bp, Acinetobacter baumannii
atgccacttattaagtcttctactttccataaaactgataattttataaaacaaatttttccaaataaagaaatagccgtaagtccatttagtattttcactgaaaaggagtttactcaagtgaaaaatgtattcatatcatatagcagacgtgatgtagagtttaaagatgatctaagtttatacttaaaaacgactttcgaaggtagtggacacgaagtttgggattgtggagatttagatattggaaaatgggatgatcaaatccaattaaagttagaggagtcagatttggtgatctttatgttatctattaacttttttgcctctaagtatattatagaaaatgagctcatccctgttttaaaagctgctgaagagggtaaaaagaaaattatgtgcttaatagtaaaaagctttccatgggatacttttgcacaattagggaaaaaagctcaacttaaagaccccaatctaacaaatacagatcaatttgaaaatcaaatagtgaatgcaaagtctgaaattacaaactaccaatttctaccttatactcgcacaattactagctccataaattctgataattgcgagcagttaacgccattgaaccacctatcgcaacctgaacgtgaaaaaatatacggagatatagtaaagcgagtagctcaaattcttgggatctaa

SEQ ID NO: 69582 - DNA, 273 bp, Acinetobacter baumannii; identical to SEQ ID NO: 63221

SEQ ID NO: 69583 - DNA, 498 bp, Acinetobacter baumannii
atgataacttctcaaaaaggtgctggtttaatggaagtgcttgttgcactacttttattgagtgttgctgtacttggttttattgctttacaaatacgagcagttgcagcaagtactgaagcaggtcagaacattcaagcaaccaatattgcccgagatttggcagagcgtatacgtgtaaaccgaggtggtttgagtaaatatgctgagattggtgcaagtgacgtattgccaacttgttctacaggggagtgtgatgctgatcagatggcaaaatacgattatgcccaagtcaaacaacgtgctacagatttaggtatgagtcttgcaatattgaattgtaaaggtttttcatcacaacgaactcgtcaatgtatatatgtagcatggggtggtacaacagctacagatggtaatggtagtccgaattgtactaatggtaccgcctatgtacctgacgcaaaatgtatcattatggaggtttataactatgattaa

SEQ ID NO: 69584 - DNA, 357 bp, Acinetobacter baumannii
  misc_feature (265)..(274): n is a, c, g, or t
atgacgacaaaaaatcaaaaaatttctcgtcgccatatcagtggtgtatttcttttaaataaaccattagggctaagttctaacgctgctttgcaaaaagtgcgttggctttaccgtgcccaaaaggcgggtcatactggtgcattagatccattagcaaccggtttacttcctatttgtttaggagaggccactaaattctcacattacttgctggactcgacaaagcgttatcaaactactgttcgattaggccaaactacannnnnnnnnnaacaacaggcgatgttgaaggcgatattttacaagaacgtcctatcccggttcttagcaaagagcttattgagcaaactttag

SEQ ID NO: 69585 - DNA, 525 bp, Acinetobacter baumannii
atgtactcggcattaaaaaaagaaggtaagccgttatatgagctggccagaaagggtatagagattgagcgtgaggcacgcccggttacgatttatgctttagaactcattgaatttactgaaaatagtatcactttagatgtaacttgttctaaaggaacatatattcgtgtgttaggtgaagatattggtgaggcgcttggttgtggtggtcatttaaccatgcttcaccgtattcaaactggacattttgaactcatcccaagttataccattgaatatttggaaagcttaacggaagagcaaagagaagctttgctactgcccgtatatgctccaattgaccatttcttaaaaattcaggttcccgaaggacgggaaaaatatttttgtaacggtctagaaagcaatattgatcattctgcagaagcagaagtgttggttttttcgggtgaacgctgtctaggtttagctgaaattaccgataaaaaacggttggtacctaaacgtatcttaaatttgtag

SEQ ID NO: 69586 - DNA, 312 bp, Acinetobacter baumannii
atgttagttattagctcaaaaggtattattgaggcggtgtttgatacaaaagaattgcgtaaatttggagccaaacgttacagtaagaataatattttccctaataaaaatattatatctacagaagcattaaaaaaagaaatatttctgcatgagtgggtagacactaatcagaatattaaagccatcgaagaaactatagcgttaggcgcatatgacaaaatacttactattgtgacaaccactactttatatgacgaaattgatgagcatgaggaagttcaatgggaaccaccacgatttaaaaaataa

SEQ ID NO: 69587 - DNA, 219 bp, Acinetobacter baumannii
atgaaaaatatatttgcacctttactacttgtttctacggttattttttctgctcacacttatgcagaaccgactagcacctgtaaggaagtgaaattccaaaaggctgatcaggcttggagtggccactattatttacatggtgtaatggaagtcggttcagagcttttattcagccagacggtaagtttcaatggatgctcgctgtgggtgctttag

SEQ ID NO: 69588 - DNA, 336 bp, Acinetobacter baumannii
ttggcatatagaactagttcattaaactatatagctagaggactggagcttgattatcgtttatatacagatactccccttgaaaaaattgaaacaccagaagcagcattaattagagatatattggcattccgtttcggtaaaataactactatgcaagaaatctttgatatgcactttgcatattcaaacttatcaaaagggagtttattaaaaattaggaaaatccttctagaaattaaaaatttagaattaactcaagtaagaaacaagagcattgaaattttagctttgtcaggtgttgagtctgattgtcattcagagctgatgctctaa

SEQ ID NO: 69589 - DNA, 387 bp, Acinetobacter baumannii
ttgtcattcagagctgatgctctaacctcgacattaggtagtgaaaattatattaaaaattttatgcctattctaacaaatgaagtacagctaatgactttacataaatcaaaagggttagaatttcatactgtctttcatattgatttagatgattggtcatttccatatagagaatatacaggaagtttcgatgaccctcctgtatacccccaatataagcaagatttaaatttacattacgttggtattactcgtgctaaagaatattgtttacttgttcaaactactaaacggtttaacaaacaaggtgtagagaaaaatactcaaccatcagattttttgacgcttcctcatcttgaaaccttatataagaaatttaagtag

SEQ ID NO: 69590 - DNA, 933 bp, Acinetobacter baumannii
atgaataaacctactcctaaaacttatcgtacaaccaactggtcttcctataatcgcgctctcattaatcggggcaacatttccatttggtttgatccaaacactcagtggtatgcacaaccacaaaacaagcaaggtcgaaatcaaacttactccgatacggctattcaatgctgtttaatgatcaaatctttatttagactctctttacgcatggtcacaggttttgttcaaagtctgattaaactttgtggattaaattggaccgcaccagattacagtacgctttgtcgaagacaaaaacatattgatattgcgattagctatcaaaaaagtagtgatgggctacatctactcgtcgactcaactggcttaaagtttctaggtgaaggtgagtggaaacgtaagaaacatggacctgaatatcgtcgccaatggcgtaagcttcatattggcatcgatgctgaaaccttgcaaatacgtgcagtacagcttactacaaataatgtgagcgattcgcaagtactcggtgatttacttgctcaaattcccttagatgaacgaattgattcggtctataccgatggtgcttatgacacgaagcactgcagacaagtcattctagatcgagatgcacatgcgctcattccgccaagaaaaaatgcaaaaccatggaaagatcagaaattgagatctttagagcggaatgagttactgaaaacagttaaacgtttaggaagaacgctttggaaaaaatggtctggttatcatcgtcgaagtttagttgaaaccaagatgcattgcatcaaactattaggtgataaattaacagcaaggagtttttctagtcaggtgaatgagattcatgcacgcatagccgtattgaacaaatttacagaattaggtcgtcctcatacccaagttgtcacttga

SEQ ID NO: 69591 - DNA, 846 bp, Acinetobacter baumannii
atgacgattcaaacagtaaatttaggtacggcaccgactggcgcaggtggtgatacattccgttcaactggcgcaaaaattaatgaaaactttacgaactggacacatgcggcaagtcgatatgttgggactgctgctggtaatgcgatggaagttggtgcatttggggttggcttaacacccacaaatgccgttagttttaaaaatttaactactgaagaagctgggaaagttaaatcaggtttctattcagataatgatcatgtcggagaattcattgttattagtggaaattctggccaaaagttgcttttgggcggatctccttataataacggcatcccttgttatcaatctattgggttatttgaaccaactcgtaaagatttcgcaacagctccaattcatacctttaagacttcccagaacaccacaattgacgcaaatggttttattaaggcagcttctccaattgtaaagttatttgcttataaaattgaacctaatgatgaagctgctgagcagaacattacttttgaaaaactaggcattggtcatcacattattaaagggtcatctggttttgcaacggaaggttggtatattgaaacgccaaaagatgctaatgggaacattctttttgctgtgatttatcagcagttagaaaataaagatattgaaatcaaaacttttaaaaagaagtttgatgttgagtctgcttcaattattgctgatttggataatccagttgatatttcaacgggtcgctggatcgatattcgcttgcaagaaattcctaaaccagtacccgaaatgccagtggtgacagaaaatgaccctgaatag

SEQ ID NO: 69592 - DNA, 159 bp, Acinetobacter baumannii
atgcatgaaattatagcaatagttctgcaaaaagtagaggtaattatgaaagaacatggtttctggaaagtaacaggatctattttgataggaattttactctggcagttttcaaacatacttaatgctaccgcaaagttgattgaggtttttcgatga

SEQ ID NO: 69593 - DNA, 891 bp, Acinetobacter baumannii; identical to SEQ ID NO: 58744

SEQ ID NO: 69594 - DNA, 1008 bp, Acinetobacter baumannii; identical to SEQ ID NO: 56873

SEQ ID NO: 69595 - DNA, 501 bp, Acinetobacter baumannii; identical to SEQ ID NO: 56872

SEQ ID NO: 69596 - DNA, 933 bp, Acinetobacter baumannii; identical to SEQ ID NO: 69590

SEQ ID NO: 69597 - DNA, 333 bp, Acinetobacter baumannii
atgggcgatgctggatgggaagctgaatacgagttattaaaagattatcctaacttgaagatagatgtgttggtgctaggacatcatggaagtaagcacagttcggcttatgatttcttggcgaccttaaaacctaaactggccattgcatcggcaggttttgataaccgttatggccatcctagccaacaagttatagcacgtttaaaagctctgcatattccgctaaaaagcactgtggaacaaggaaccttaagttttgtgttggaaaaccacaaaatagttttacatgaccgacgtttggataggctctggttgagtagaggtttttaa

SEQ ID NO: 69598 - DNA, 327 bp, Acinetobacter baumannii
gtgggtggactagaagtccgcaacagtgagggtgaatggattcgtgcacctcacattccagatacttttatcgtaaatttaggtgatttagtccaattcatgactaatggactatacctgtcaaatatgcaccgagttttcaatagtaaagcaggagtctctcgttattcggttccatccttcttcgatctggattacgaatacaaaatcaaaaggctccaaaatttaagtgatgaatttaaggctgaacctaaagaaatgaccgtaggtgaatacttagcctatatgtatcagaaaacttacgctgcgaaaaaagaagccgtttaa

SEQ ID NO: 69599 - DNA, 1512 bp, Acinetobacter baumannii
atgagaaatctaaaatatttgatttttatatttattactatttgctctacttcttcttttgctgcccgtatttattatggtgcaggtcaaaagggtatcaaagaattttcttctgctgctgctttttgtgcatctgttcaacctgaaaaattgtctcttagttctattagtgaggctagcaatccaggtctttgtatttttaatggtgaatttgaatatagggtcaatttttggtgggaggatcaacctgatctttgcccaaaatcgggttggcctattcctatttattttgattctaattcacctattccattaagaacttgtaagcaaaatccagacggtacttattgtattactcagtggactggtgataagaatacacctattgttatttcaggtaataattatcagagcattacacatgcttctgttagtcaaatacctagtccatcgtgtactcctgaattttctaaatcatcatgtgatcctaaagatccctatggggggtgttatcagccacctgatgatggttgtaatcgtatggctgatggttctatttactgtccagagggtacacctccgccaccaattcaaacgggttgtagtaacaatgcaacttattgcgatatgcctccaactgggtgcggtccaaactatgtgccgggtaatttcaacggtaaacaaatctgtgtaagaaacagcaatccaccgcctacagatccaataacacaaccacaagaaccagatcctactgatccgcctgatcctaacgatcctccaccagcttcttctccaccgccagctttaccgcctgaaagcaatacgattttaagatctattcttgatgctattaatgcggtgaacaacaagctgacatggcttaaaaacgagttggttaattctcttaattacattgctaaaaagatagatgtaacgaattccaagcttgatacggttaattcatcaatcaaagagacaactgctgctgtaaatgcaagtggtgacaaaataaaggctgctgtagatgctaatgcaacaacggtaaaaacggctgtagaagcaaatacggctgctacaaatggcgttaaatctgcggttgaggctaataccacctctacagctaataagcttaatgatgttgtaaatgcgattaataacaagcctgttggtggtggtggtactgctgtcaatttagagcctacgaataatttattaaaaggcattcaggattggcttgcagtatcggatgacactaatcctgaagatggcgaaattaaggtagtcaaaaatgaaatagatactaattttgatggaaatctagttaatgctacgggtacttgtcctcagcctatgcagatttctttctcgattgttcagacttatacaatccaatttagttatgaaaccttttgtttaggtgcatctttggctcgaccgtggattatttttgtcggcatgttaacggctttctttattgttactggtcattatcgaggtggtagcaatgattag

SEQ ID NO: 69600 - DNA, 261 bp, Acinetobacter baumannii
atgcatggtgggcaagaaagtacgttattaacgatgttacctccattatttcatcatggtatgatgattttaggattaccaaactctattccggctttgtcgaatactaaaacaggtgggactccgtatggcgcaagccacgtgagtggtccaagacatgaccaaagtttaagccaagatgaaaaagttttatgtgaagcacaagggaagcgcttaggcgaaatcgtaaaaaaaacttcattcttaaatttatggcaataa

SEQ ID NO: 69601 - DNA, 897 bp, Acinetobacter baumannii
atgttgcctttcgcttcgggtattccaaatctagcgccagccttttctcaaattcatgacattccaagtacaaaccctgcatccagattgataggtattcagccaggtaatgttatggaggtgggtgcttatggcttgggccttacagcaactaatccaattagttttaaaaatttaactactgaagaagctgggaaagttaaatcaggtttctactcggatgctgagcatatcggagaatttattgttattagtggaaattctggccaaaagttgcttttgggcggatccccttataataatggagtgccaaattatcaattaataagcgcttctgatccgttaagaaaggattttgcaacagctgcagtccataccttccatacttctcaaaatactaccgtcgactctaatggctttattaaaaaagcctcaccaattgtaaagttatttgcttataaaattgagttgaatgatgacgcatctaagcagtcgcttgactatgaaaaagtaggcactggcgattacttgcttaaaggttcacttggtttcgctcaggaaggttggtatatcgaagtccctaaagatgccaatgggaacactgtggtagctgttgaatattcaactttagaaaatggtgatctttccatcaaaacttacaagcgtaagtttgatttcgaacttgcggcagttatagcagatcacgaaaatccgatggacattccagagggacgctggatcgatatccgcctgcatgaagagcctgaaccagagcctgagattattcaaaccgaaacacctgtggaattccaaccaacaaacttatctgaagctgtagctgctgcaatggcaggggtggagcctccggaaatctcagacacagacgaaacactttaa

SEQ ID NO: 69602 - DNA, 210 bp, Acinetobacter baumannii
atgattgaaagtaaaccagatatgtcaatttataatccattcaaactgtatgacgaagaagaagatgttaactgccaccatgaccaagtagaaacattgattcatagttttaaaggtgatcatttgtggaagtgctctaaatgcggcaagagattcacaaatcaagaaattgaggcccgcaaagaagagtacaaaaagaatcaaccttaa

SEQ ID NO: 69603 - DNA, 399 bp, Acinetobacter baumannii
atggcaatgactttagagcaaacaaggcaagctattatcgaccgtatgatgagttttgacggtattgcccaggacagaatccagtatcccaatgcaccaggcttttctgtaccaaaagaaggcttgtggtgtagtataaccattgcaggcggtgctagctttacttcaggtgtagcagataagccttgtaaccgtcgtaccggtaatattatggttcagtgttttgatcgacttcatgtgggagaaaaagcactaacgattctcggtgattctttattggctcattttgaacatttctcttttgatgatttagaatgtttgaatggtcaatcgattagaattggtaaagtcactgattttgtacagtacaatgtgactataggatttacggtgaattga

SEQ ID NO: 69604 - DNA, 231 bp, Acinetobacter baumannii
gtgaaaataccttattactctttgccaaatatcatcgcgggtaaaaaagtaattgaagagctgattcaggcagatgcaacacctgaaaatttagcggctgaaatagaaaaactaatgaatgttgaaaccgctcaaattcaagtaatgcaacatttaactatgcataaacagcttatttctggaaatacagaagatccggttcaagccattttgcaatgtttgaatagctaa

SEQ ID NO: 69605 - DNA, 243 bp, Acinetobacter baumannii
  misc_feature (228)..(237): n is a, c, g, or t
atgtcatatagtgaaagtaaagtttctccatatgtcggattaacctataattttacacctgaatatacgggttacatgagttatacctctattttccgtccacaaactggtattgataaagataccaatcaagctttaaaacctattgagggtaaaagctatgaaatgggtgtaaaaagctcatggctagatgaccgtttaacaggcacactttcagtatttaaaacnnnnnnnnnnatttaa

SEQ ID NO: 69606 - DNA, 648 bp, Acinetobacter baumannii
atgacctttattgtagcaattcaattaaacgacagtattatcattgcttcagataataagaatgcaaccattttagaagatggtacattaacgtttccaaaagaccatatttctaaattgtttccgtggaaaaatggaatagtaactggaaccggtgaatattacgtcattagtagggccgtaaaaatatttaataattttaaaaaattgcccccacaatattttgccgattgtttagaaatttccagaaaaattagagaatttgaaataggtaaaggctattatcaagtagataatacaaagcttatgtattcaacatatacggataatggcgcacaactttacagagttgaatcatttgatccaaatgaaaaataccaagtcacggcggctgaaaaaatggatataaccatatggctatttaatccaaaaatagaaactattgccttgaatttaaaagatttatacgatgatctaaaagatagatcatattttaaaaataatgaagaatgggttaattactatatcgagcgcttatcaccaatttttaagaaacaaagcatccaggatatttacatgagccaaagttttgacgtcttttttcaaacaaaagatcaatacatatacggccattttccaaacatttag

SEQ ID NO: 69607 - DNA, 201 bp, Acinetobacter baumannii
atggctggtggctcccagattattatcaataaaagtggtattacttttattactccatctaaatttgaagttaaagcgggtcagcatcttttcaaaccaggtactcaagtaagcatgcctcaaactgccctacctcagcccatttgtattgaatgcctcatgaaagcagcgaaagagggcgcaggaatagtaagacgatga

SEQ ID NO: 69608 - DNA, 498 bp, Acinetobacter baumannii
atgagctttaataaattgaatttagaaaactttattgcgaaccatcataaagatggccatctgtatttgttagtagacggcgctcagatcgaccattctgaagtatctaatcttgaatatacctatggcgaatgtatctatctttttaaaggcacttacgaagaagaagcatacgcctacggccctattttgtttgaattaaataaattggacctttttcaagttgaaaatcaaattgaactcatgaaagcaaaggattcaatgatcttaattaagagccaacttgatacaaaacaattgaaaaacaaattacttgaaaagctatatatagagcttgaggacggcggtattggggttcttagatattatgatccgcgcgttttaaatcgtctcacgcatattttcaccagtagccaaaagaagcaattactcgaaggttttgagtccatatcttttatgctcaacgaattaagctatgagttgaaatacaatgattaa

SEQ ID NO: 69609 - DNA, 342 bp, Acinetobacter baumannii
atgattaagttagataaaaatcaaattgatagccttgaaaaagtaaaagatagagaagaactttgtgaaaaaatctatcaatacctggttgagaaaaaggattcatttaaagcctatcaagttaattatgatcagctgaaaccagagatttacaagagttttgatttactggtatctcttctattaactgacaatgaagttatttgtcagttgattgtctggaacaccattatgagaaaaggtgttctcaatgatcctggtattcaatccttcataaaaggctctaatgcacgtggtaaggacctattagcaactttagaatattacgaattgagagattaa

SEQ ID NO: 69610 - DNA, 636 bp, Acinetobacter baumannii
atgtggatgtttcttttacgtggtgcagctgcggtaggtggtcgagctgctattcctgctgctggtgaagttgtagcaacccaaggtggtcgagtaattgccacagaagccgctaaaggtatggccacaattgtgttagctaaagaagtcgccaaagatataactcaacaacaacgttgtaataaatgtgaaccctatcaattaggtaataagcacgaaattgaacgttcaatgggtaatgaaactaatacacaataccagtttaaaatagctaacttatctagctttccactaacctttagagtatctgagccttttctaaaacctgggaataaaaagccaacaacaagggtacaagaatgggttgttggtggtgtatcttttgacggtttatggccgatggaatgtattttggtcgaagctaaaggaagatatgcccaatttctacaaggtaagcctgattttttgaaaaaaactatttttgataaaatgcgaaatgaagcacttagccaaaaaacagttaaagatagattcaaaagtgcaaagctttcttggtatttttatgaacaagaaacaaaaaaacattttgatcgcttgtcgcgaaacatcgtaacaacaatttttatgcctttatga

SEQ ID NO: 69611 - DNA, 687 bp, Acinetobacter baumannii
atgagagaattttttcttagtacgcggatttcaaaaatccttggtaacgctgaccatgagattgaagaacaaatagaaaaagttgaacagataattaccgaactttctgtaattgatcctatttttgagaattggtacataaacaatccagttggctctaaacctccttatgattatcccttcccttctgaaaaagcccataaataccttttaaaccttagaaaaaaagatataaatgctagtttcctgttgtggaatggatccttagagtctgaaaactttgctggttttatgttcgaccgaacaggattggtaatggactttaaaaaggttttaaacacagatcaaatgattcaactgtttaaagctattttgaaatatccgaagtgtgaatatgtttatattaatactgatttctttaatgagataaatgtttatcctcatagagctgaaacgacttctatttgttatgttcctgttgaagttgcagctaattacttaccgcatctttttaaaaagatcgaaattgaaaatgaatataacaaagggaccattcttgtttttgccgaaaattgggccgatgaaacagacgaattaaagaaaatagttcaagaaaactcgattgcactcattgagctgggtgttattcctgaagcgggtctaccagacggtttttttaatgagtaa

SEQ ID NO: 69612 - DNA, 489 bp, Acinetobacter baumannii
  misc_feature (82)..(91): n is a, c, g, or t
atgctgagttatctattcaaaaagctaaacaaaatatccctactgcatcgtatcaataatttaggcgttcaagattattgtnnnnnnnnnnagaaccaaaaaagctttaacgaagaagctatccgcagctttctgattgagaccggcattgctatttttgatacggcgtatcaaattaaacgcctaaagggcaatgcttcagataagtttcttgaaattgtcactccgacagacttagcggttttattgaaacagattcctcaatgccacactattatgactacgggcgataaagccacagataccttaatctcagttttacctgagaacacggaaaaacccttaattgggacatctacatcaacttattttgcagaccgcgatattaatttatatcgattaccgtcatcttctagagcatatccattagctctcgagaaaaaagcagaagcctatcagaaattctttaaggaaatcggtttcttgtaa

SEQ ID NO: 69613 - DNA, 534 bp, Acinetobacter baumannii
atgaagactctaaatttaacacaacagcaaatagaggcaatcgaatattcttctaatctagttattttagcatgtcctggtagtggaaaaactaccgtgatgaaagagaaaataagaaaaagtattcctaccttgttatctcatcaaggtgttattgctatgacttttacgaagaaagctagtgcagagttaaaaaaaagatgtaaaagtaatggctttattacaaagcagagtttttttgggactattgatggtttctgtttagaagaagttatttaccctttcttatctcatttgtggggtggttatcctaataaatgtaaaattattactgaactaacaggtcttcagaaaaatttttttaaacagccttatatagcgcctactttggagaatattataaatgatgaaataggcttcattactctatataaacacaattttttgtggattgattctttagcaggtttagcactatatattttagaaaactgcacggcagctgtccggtatattaaggctagcgcaacatga

SEQ ID NO: 69614 - DNA, 1698 bp, Acinetobacter baumannii
gtgaaaatctcaagtgtaagtttaaaaggttttcgtaattttaaagatagtattatcaaatttaatggtgatacattaatcattggagccaatgatgttggtaaaagtaatctacttcatgctttaagactcttattagataaaactttatctgactcagacattgaaccaacagagttagacttttatatctcaccttgtgaggctatgaatattctagaaataacaatttgctttgaagatatacaagaagatgctgttttatctattttaaaaggaaatgttagtagtgaagctaaaactttcttacgatatcaggctgttaaaaataatttaagttatcaaattttaataggtccttctttagaaaatcttgagctaataaacagccgtttttatttgaaatatgtcaatttaaaatatattcaatcccaaagggacttacagcgatttattcaaaaagaaaaacgtaagttacttaaactatctcaatcaaatttaaccgaaagtcaaagagaagaagacacggatttgttaaatgaaattggttttgacttaaaagaaataaatgaaaaaataacccaattatattatgtagatcatgcaactaaagaagtaaatgaagaactgaagaaattagcatatcatcattcggaatattcagttcaattggattctggagctattcaagttagtgactttatagacaatcttcaattgggtgcaaatgtacatggttcaaatattcttcttggaggggatggtagaaataatcaaattttattagctctctggaaagcaaaaagtattgcagaacatgatattaatcatgaagttgttttttatgctgtagaagaaccagaggctcatttacatccccatcaacaacgtaaattagctaactatttaatagaagaattaccaggtcaagctataatctcttcgcattcacctcaaatagcatcacattttttacccgattcaattattcgtttattagtaaaaaattatagtacagtggctgctagcggaggatgctcagactgtatttctgaatgttgggatgaaatgggataccgtataagtataattccagcagaaagttttttctctaatggtgttttcttagttgaaggtccttcagaagttcttttgtatactgctttagccaaagctttagaaatagatttagattactataatatttctatcttatctgttgatggtattgcttttgaagtatatacaaatattctaaatgctttagaaattccttgggtaatgcgaactgataatgatgtgtctaaagtaccaagaaagaacgaatggcaatatgcggggatcaatcgctgtttaagagcaataggattggcagaatggtcaaaaagtacaactgatattaagcacatagatgttacaaatgataagagatggaattctttttatgcttcaataagagataaaggagtatttatttcaaatgttgatttggaaacagatttaataaattcgttagaagcgaccatacttcctattttagataaagagaataagcaagacgcaataaaatttatgcaacaaaagaaagcaataagaatgtcttatcttttaaaacaaattaaaggaaagttaattgaccttgagaataatgaattagcagagcctttaaaatacttaaaatctttaataattggataa

SEQ ID NO: 69615 - DNA, 624 bp, Acinetobacter baumannii
atgaaccaaaacaatactgaagctgaagtaaatctatttcgatttactttccactttattactcaaaatacgaatagtttttttgttagcgtagaagggccagatgagaatgaaactcttataaacttcgtcaatgatatgtacagagttttatacgccagcaatgtcaaacaggatctcgatccagcacatcccaatcaaatcaaagccagcgctttacaacgcatgacaccaagtttacggacacaagttaatgctatgttaagcgattacactaaactcaagcctagtattcataaagcgattagtaagctcaattcgattgaagatgatgaatacttctttgtatttccctatgagtttacagaaaagatgcaagcacaaatgcttttgcaaacttttcttagagccaaaaattcattgaatagcgatgaagaagtaaatcaatacatgcaaactcatatggaggggtttaatagcttatttgatgatttattagagcaatacaacatagctgtgtttggtgaaacagaacgtaaaactgttataggccaaaaaccaacaaaagaacacggcgtttgtaggttttgtaaatcaccggttgatgaaaacacaaatctctga

SEQ ID NO: 69616 - DNA, 957 bp, Acinetobacter baumannii
ttgcaatatgtagcgattgttattgcgttcttacttcgtgttttactaactcttttgaagaagttattaaatcaagcagctaaagttacaacagagttagtaaagaagcatcttgttccattcttacatgatataggtgcaacgatcgctcaggaaatcatcgagtttgtattctcttttgcagcagaagttgcagctgatattcgaaaagaacagaagggatcaacaacacctcaacctgcgggttcagttaaacctacagcaccatctcaagcttcgaaagttggtgcatggtatgacgtatatactaaaaagaggattctgtttaaatcggtaatctgtaaggtttgctgttttagtaatcagattggtggagcaacgggtaaagcatctaaaaaagaatcattgacagaaaaagtgattaatttgtggggaggtttacggcatcttagacaaaaagctgtacaggtgatttttgcacttgtagatattgtgatggagcataaatgtccagttaaggctgaggtcgtctatgatgtaaagactaagcaaccccttatggtaaatggggctaatccccctcgacataagtttatggagactcctggctctggtcgctttggagcagatgtaattgttgtcaaagatataatgaaagccccaactattgataatattttgcattggattgagattaaatttctagacagtaatgatccgcccgatagagatcaaatgcgaaattattctgattttatgaggagtgatcgaaaattagcaatgattcgagtgtcagcagatcctaaaaatagtgactgtggatgtaaagcgaaagcattaccacaaagtactcaaaagccgagtagtaaaccacaaggcaaaaagactagtaagattaataaaatgcgtgaaatatgggatgtgattgtgaccaacgttgagaatctttggaaataa

SEQ ID NO: 69617 - DNA, 1074 bp, Acinetobacter baumannii
atgggtgaattatttgatgcagcaaaccaatggttagatcgaattgaacaaacgcaagattacacgttgccttatgtcgatgttgactcgaaaactgagcctgtacgttttaacctaatgatgtctttttggttctatgacggtgatcaactgccagtaagagaatatttttttggtaaaatacttcaatatataaaattaacaggcattgaatttcaaagagaggcttcagttaataagcaacgggaacgtaaatttagaaaagagggatttcctgagaactggatcgaagatatcaggaaaaaagatgcttggagttctttgagttactatttttccgatcagccaaaaatgagcttcgctccttgctatggggtagatgcagtttatagttcacagatggcaaataatgaacgatattctgtagtaaattttatatttccttttgattttacaaagagcagtaataatcgattagcttgtattgagttttttaaatcgattgtacgagaaataaaaatcgaacaagcctattgtggttatcgtatcgggcaacctttagattttacccaagctgtaccatggcaagcttttgaaacagcagcaaattatcgatttttgggtttagatattgaaaaaaatatgtcacaaagtagtcatgttactaatgatgaaccctcattagaaaaaggggttcgttcaacggcgtggttagtatatctaggtaaaccgtggcttgagaagttagaggaagtccatgcgattcaaagccaagacccgaatatcccattacgtttagaaccgattaatggcggagtattttttaaagcggatgagtctccacaacttgcacgcataggcctaccacgaccacaaggctatcaggcattaaataatattcttaaaccgattcgagagaagatgcttcctttgacccagtatgctgattcgttagcagattgggagccagtattttttcaacctgaacaatgtgattggtggcttgaacgatgggatcggaaagatgatgctgagctaataaagaaatatccaattcctgattatattcaataa

SEQ ID NO: 69618 - DNA, 354 bp, Acinetobacter baumannii
gtgcttagctgggtttctcaactattccttacttggttattagctttgggccaaggctatggttggtattcaatgtcaggtattttatttacacagctacattcagctgagttaggtgggattgccttgctcacagatctatttagagagatagttgcaattttactcatgtataccatgggttggcggtttccacgtccagcaatttcaagtgctggcgctacctcaatggatgtaacattagcaatggtaaaacagtcatgtggtacacattatgtaccacatgccatgatgagcggcttactcttaagtctactcgctccacttttaattactgtgtttttaaacttttaa

SEQ ID NO: 69619 - DNA, 465 bp, Acinetobacter baumannii
atgaaacaaatacttgaggatgcaattcctcatattagtgcttattgtcggaaatggcacacagtcaaaagtgaattaattgaattaattgaagaattagagaaaaagcgttcagttttaataaaagcagagcaggcttcacttgttatttcagaatgtagggagaagaaggaagaattatcggaaacgattacgctcaaaaatgaagaattaaataagcatcaagatttatatcgtcaaatacaggtagagttacaagaccaggctattttaatacaatctaaacagcaaatattagggcaaattcagatatcacatggacctcggttatgggatcgtctatgtgcattatttggttaccggactcaccgtacaaaagtctatgataagcgaattagtgaagcaactttatcattacaagaaactaccgctcgctatgaaaagctcatgatgagcttcttgtaa

SEQ ID NO: 69620 - DNA, 1275 bp, Acinetobacter baumannii
ttgatttccgatttacaggcggtacacgctttaggggtaagacatgtcattgggcctgatttttggaaattatcgtttgaagaattgcataggacttcagtaaatacttcagaaattatcgatgatattcgtgcccgtatttttattaaatcgatacagctacacagactaacgattttatctaatgccaaaagatttttaagtaatttgagaatggtcgggcaaatgctttcaggaaataccaaaggtctttcccttcatgatcgtcctgtaatttgggacagcctgttttttgtggttcctgttgtttccacaactttagcttcatttagtcggctttttgcaggcatgggacaagatagtttagggtggttattaattgatgaggcaggccaggctacacctcaatctgcagcaggtgcaatctggcgaagtaaaagggctattttaattggtgaccctttgcaggttgaaccggtatttacactaccagatagtgtagttgagattctacgcaaacaaaatgatgtggatttatcttggtctcctgtcttcgaatctgtacaaacaattgctgacagaataacgccatttggttcatggattgatgatggtagtggagataatcaatcaagaatctggactggtatgcccttaagaacacatcgtcgttgtgatgaccctatgttttctattgcaaacagtattgcttatgcgggtcaaatggttcaggggcgtgttgatcacgaaggaaagcctacaccagcaaatatagcttatgatattggtgtgagtacatggatgcatgtagattcaatagattttgctcatcctgttaattctgaagaacttgatgtattgattgattctttaagaaagcttgaagaaaagcgaaaaactacaattaatagttcaaaaattaaaatatatgtcatttcaccttttagaaaagttattcaagcatgtaaaagcagtattgaagaggcaggaataaaaggcattgagtgtggcactgtacatacttttcagggtaaagaggcggatatcgtatttttagtattaggtacagcgaaggatcgtaccggggaaggagctagagcttgggcttcctcaagtccaaatttattaaatgttgctgtgacacgagccaagagtcgtttgtatgtgatcggtaatgtggatacttggtctaaaatggactatttttcaacactcgttaatatacttccgatgaaaacggtaaatgtagtaaaccgatcaattgaattagaatag

SEQ ID NO: 69621 - DNA, 696 bp, Acinetobacter baumannii
atgagagattttttcttaagtacacgcctttcaaaaagacttggatctactgcaaatgaaattatagctcaattaaaaactttagaactgatggttaaagaaatttcgttgattgacccggtttttgccaactggtatgtaaataacgctgatgaagatactactgaggctcccttagactacccattcccttctgaaacggctcataaatatctttttaaccttagagattcagatcattttgaaagttttgggttatggaatgggttagaagaaagtggtctatttacgagtctaagatatgattcatttggctttatgatgatatttaaaaaagttttaaatactgatcaagttattcagttatttcaggtgatacttaaatatgttcattatgattatgtatacctaaatacctatttctttggtgatattaacgtctttccacatagacttgaggcgactactgtttgctacgtacctattaagaagattgcagaagattacttaccgcatctttataaaaaagttgaagtagagaaccaatacaacaaaggtactattctagtgtttgatgaaaaatgggcggatgaaacagacgaattgaagaaaatagttcaagagaattcgattgcacttgttaagttgggcgttattcctgaaacagaattgccagacggtttctttaatgagtaa

SEQ ID NO: 69622 - DNA, 369 bp, Acinetobacter baumannii
atgactttccgcaaagtatttagtgctgatcagatacttcaaatttttaatgtcattctgaaatacttcaaatttgattatgtttatctcaactctgacttttttgaagatataaacatttacccacataggctcccaacaacatcaatttgttatgttcctttcgatgttgcagctgactatctaccccacctttataagaaggttaatatagataaccaatacaacactggtaccattcttgtgtttgatgaaaaatgggcagacgaaacagacgaattaaagaaaatagttcaagagaactcgattgcactcattgagctgggtgttattccagaagctactattcctgattctttttttgaataa

SEQ ID NO: 69623 - DNA, 279 bp, Acinetobacter baumannii
atgtttgaagttattcaaaaatcagagctttcacctgatgataagacaaaatttgaaaataagctaagtgaggttgttgaaaaccaagctgaattatcctctaccctacctaattatattaatgatgacggggtacgtattagtcttgcggatgaaatgaagaagtatgcagaaagtctcaagaaggctctacaagttgttgtggactttgttaaatctaaagtgggtttatctgtagatggccctacagaacagtcctctagctcaccgtcaccttaa

SEQ ID NO: 69624 - DNA, 426 bp, Acinetobacter baumannii
atgcttctacctttatcagtatcaaatgtagttttaattccgacaatgcttaaacaatacgcatcggatggtattcgagattatttgtcttttgctaataaaattaaaaaaacgaacaaccccaagttattaattggcggtattgttcccaatatggttaatttaaaatcaaatattcaaaagaatgaactatctaagttgttggaagtggctgagcaaaccaatttgttctaccaagataaatctaatatggcatatataacggataagaatgttatagaagaagcagtcacttatggcactgcttgttggcatattaataaaacatcatcacgtgatgtcaaacgaacatttaccaatatattcaaacaagttggcactcaacttaaattatctgtgttcaatacatctggtaaaggagaataa

SEQ ID NO: 69625 - DNA, 912 bp, Acinetobacter baumannii; identical to SEQ ID NO: 57865

SEQ ID NO: 69626 - DNA, 981 bp, Acinetobacter baumannii
atgagtcgctatattattccagataaaattgaatcttatccttaccaaaatcatgaaaagaataaaaatattcctgtaacaaaatacgttgagtcaactgctgtaacgaaagttgttaaaggtgatgtttctaaaaataattttgaacttgctttaaatcgaaatcgaatttttcagtgcattgatccagggtgtaagccaggagagactaaagatcctttttctaaggcccaaattgaagctggcttacagtcgagattaaatgaaccgttaccaaatcaagaccagacatctttatgtggtcccgcagcctactttttttgtctaataaatttgagtccctctaaatataaattagctgtaaaacaactatgggaaactggtcaaactaaaattggtgaacttgatattaaaccttcacaggatggatgtagacgagttaaaaattttcataaacaactcgatggatatcctagaattcctccaattgattggattacgcttgcaagtttgcgtgaatcagaaaattttaaattaaagttaaatgatcccgaacaagaggtagcaggaattacacctccgatggagttggaacgatggtttagaaagtctggttttcacgtagtagcctcctacccaatcaaaatgggagggtatgatcgagattttatttcttctataaatagtaaatatgctggacctaattattatattgtcactttaatttccgcaagtctattagatagtggttcaagttcaggaactaatatatttccagaccattggattgtttggacagataaattaagagatttaaaaggccaacccatcaatgaatcgtcaaatacatatgatacaaaagtgacactcaaaatgtttacttggggagagaatagaacaagattgaaagaaggtttatctttgtatagctttgatagaaaggttttttttgcacttgtaataaaaaaggaaaaattctaa

SEQ ID NO: 69627 - DNA, 1026 bp, Acinetobacter baumannii
atgtcgtgtgaaatattggcttttattgttcataagttaattagaacaggagatgataaaaaattagaaaaagaagaagggaatgcacttctagaaattaatgattctattcaaaagctaatggatactttaaacaaacgttatgttgatcagggtggaagaacttttggtaatttttctgaagatcaagataattatcctatttcacgttacttagatgagacagatattatcaatgatcaatctggtttctatgatttatcaataagagtactagatcatttagttgcaaaagcaaaaaatacttctgcaactgaaggttgggttgttatgtgtttatataattataacaataaccttaactttgctgtcgctgtagtaaatgaaattacaggtgcttcaattgatgaaacatttcaggtcaaaccatctgtatatattgatctaactaaattacgtcatgctggtcgtataaatctaacgcaatggaaagatagtaaagataaatatgttagctttatcagagctgctagagaatcaacatactttaaagaatttcttggttgtgaatatacaaactcaaatgtagatgaaagtaataaacttatatctgctatcaatgcatttttggaagttgaaaattttaactatgaagcaagaaatgaaacaacttctaaagcatttgatttcttacagtcggcttcgaaagctaagactccaatttttctagaacatctcgctaatcatttaatgccagaagagcctgaaaagttgagaggttatttggtttctgatgattttaagataaatgatggtttcattcctgatggtaggacattaaaaaaactcgttgaaattcagtctaaaacaccttattggaacttaaagttatcaagagaagcttttaggcatggtgtcgactataatgttgcaagaggacaattaataattgaaattactgatcctttggaaaaggaaaaatttgcaaaagaggtgcagggtatagacgatcatgagccagattaa

SEQ ID NO: 69628 - DNA, 828 bp, Acinetobacter baumannii
atgctacaaagtaaaagacttttctactttcttggttgtatggtgtgtgtgtctggcataacgaatgctaaagttccacaaatgagctcccagcaacttggtttatatgctaatcagcttaatggttctcctagagccaattttgttaatagcggtactactagtaatcattcaattaatccgaaaactgcaaacacttctgtagttttaccacaaagaagaactggtaattatacaactataagttataccaattctccagctccagaagctaagcagctcgaaattgtacaacaaagccaaacatcgaatacaaattgggttcaagaatacgcatttagaggtaatgtcgctgcgcctgaagtactaaataattacagttatcaaaaaccaaaagttaatatcaattacgttcgtggacgtgaagctaacttaacatgtgtaatcgctgcggctcgatcagaaggtgtgcctctttatgtgctattgggaattcaaagtaaagaaagaggtagaaatggtgaagttaacgcgacaaatgatatgggtcatttccaagtaaataaacagcattttagaaatggaggaatgtttaacccgcaagacatggagagagctcgtacagatgggtgttataacgctgtattggccgctaaaatattacgtgatcggctgagtactaaagttgcatctgtagatttctggactcgcgccgcagcttatcattcatggactccttccgtgaacgcaagatatcgaccagatctaataagatattctatgcaatggaaacagtggttgacacaaaatggaattaatccgaactga

SEQ ID NO: 69629 - DNA, 150 bp, Acinetobacter baumannii
atgagtgttcgtgacgcaaaaagaagttatttagtaatttttgatgctcgaataaaacaagatggagtgaattctttgccaaaagagtatgatttagatgatggaaaaattgctttttgtataggtgtagatattaggagtatgaaatag

SEQ ID NO: 69630 - DNA, 579 bp, Acinetobacter baumannii
atggctttgtataaaaatcagaactattctgaagcaatacaatttagtttagatttagcaaggaaacatccaacggtttctcatggattttatattgctggattatctgcttataaaataagtgattacaatttagctgaacagatgtttgaaagtgctattaaactggatccaaacttggatcaaataagtgactatttggaaaatacaaaattagaaattcgtgagcagagaattctaggtgttcagcaaatttcaaattataaagcagatatatttccaagcacacatgatagatttttagattatttacaaggttttaaatctagatgtcaaaaaaatgcagatgcattttggaaatcatattcaaatcaagagtatgttcaaaatccagaaaatataggtcgagcattattggttcaagatttacaagcattagtaagtaatgcaaatatttataaagagacagttttagctggaggtcgaattgacttaatcattaatattttaggaagtgagtttatagttgagctaaaacatatgctgaaggtggttttgaacaacttaaatcatatatga

SEQ ID NO: 69631 - DNA, 264 bp, Acinetobacter baumannii
gtgtttgttgatacccattgccatttaacaatgttagatttaacgccttataacggtgatttagatctcgcacttgctgctgcgcgagcagagggtgtttctaagtttatggcaatttcagttgaccttgatgatcatattgctttagctgaaatcgcaaagcgtcatgaagatgtggggtatacggtaggcgtacatccgtgtgaggatgttgatactatggctcgaacaactactggttttttaacatttttagaggcttga

SEQ ID NO: 69632 - DNA, 948 bp, Acinetobacter baumannii
atgagccggcgttttcataaaatattagctgaatacgtttctccagaaaaccatgaaatatattcagttgatgaagcatttctggaacttacaagttatagggatatatatgatttgaatcaatgtgctaaagacattaaagataaactaatgaaatttttatctttgcccgtttgtgtggggattggacgcacgaaaacagaggctaagtgcatgaatcatatagcgaaaacctatccacatttgaacggtatttgtaatatttttgatattgctgaagtaaaagattctatttatcgtaatacggatgttggagaggtttggggggtgggccggcaacaaaaaaagaaacttcagcttatgaatattaatacgatctttgatatagagcatacgcctccaacaaaaaaacaaattgtctcatcacgaacgtttggccagagaataacaaaaattcatgatttgaaagaagcaattattaaaagaacacaagaagcgtttacacgtgcgagaaatgaacaagttcttgtggggtgccttattgtgtttgggtattcaaatccttttgataaaacaaagcctttttataaaaaggaacaaagcgcatcttttgctgtacctacggatgatttaaggttactggttcaaacagcaacaagattaatggatcaagtctataaggccggaattgaatttaaaaaagccggagtgattttgacttgtctcgaaccaaaacatacttacacctatgatctgttaactgaccatcaggatctggagaaaacagagcaacttatgaaggctattgaggatgtacaacagatctttggtaaaaacaaaattggatttgggggaagtatgtttaaaaaccggatttggaaccttacagcaaatcatcaaactagaaattattttagttttgatggaatgataaaaattatgaattaa

SEQ ID NO: 69633 - DNA, 168 bp, Acinetobacter baumannii
atggctaaagcgcctatcggaacaaaatgtaaaactggtgaacaatgtcctgaatcaggagtttggaaaccagagggctactcaacaacagctccaattgctcgaggaaatagatttcctccatatgcaggaaaagctgttatttgggttttaattcaatacgcgtaa

SEQ ID NO: 69634 - DNA, 300 bp, Acinetobacter baumannii
ttgaatgttaaagaatatggtgatgaccattgggctcttttatcatttaaagctctgcaacctacagatggatttaagttctatttaagatgcagtgcagatattatagtaaaagaatttagtgttttcgttgttggcgcaaaatatgatgtaacacagagtgaagatcgaaaagaaattactattagttgcaaccaatggattaatgaaggttctggtttatctatactaataggtatccctcactctttagatgacaactccaataaagaagtaaaaaaattgttgcgagcagcctag

SEQ ID NO: 69635 - DNA, 465 bp, Acinetobacter baumannii
atgttagtgaccacaacattgggcgtatattatttacctagactttcagaattatcaagacttgaggaaatcaaatcagaagtttacttaggatataaatatatatttcctttggctgctataggtagtctggctgtatattttcttagagattggattatagctattctatttactaaaacatttttacctatgcgtgatctgtttttttggcagatgataggtgactccttaaaaattggtagctggatacttgcatatttaatgttaagtaaggctatgaccaaattatttgtaacaactgaaatttcatttgcagtaacttcaatattgctaacttatctatgtactcatatgtttggatttaaaggggtttccatagctcacttaattaattatggcgtatattggatagttatgagtatttgtgtttttaaaagtttaaaagaaaaggatacagtatga

SEQ ID NO: 69636 - DNA, 417 bp, Acinetobacter baumannii
atgatgggtaattacatgaaaaagattattttaattataggatttataacttctaatctatgttatgcagaagactggagattggtagcggaatcaacagataatgtacgaacttatttagatattgaaacattaaattatcattcaaatgataattctgtaagcgtttggtctaaggtaaataatataaaagtacagttagataatgggatacttacggaatataagacactagattattatttttgcagttcaagaacatccactacggttaagggtatagcttatgataaaaaaggcaatatacttgaaactagtgatacgaaaattgggcctaacaatataattcctgggtcggttgaggatacagtttttaattatgtatgtgaaaattccaagttagaggttgtaaattaa

SEQ ID NO: 69637 - DNA, 444 bp, Acinetobacter baumannii
ttggatactgaaaatccatttgggttgtcaagaactcagcttgacgatttgattgcttcaggtttaattgaatatccaggttttgtaactgatgttgctaaacgtatacaagatagtgcagttttcgtcttaccttcttattatcgtgaaggtgtgccacgcagtacacaagaagcgatggctatagggcgccctgttattacaacagatgtgcccggttgtcgtgaaactgttgagaatggtgtgaatggttttccggttcctaagtgggatccagaagctttagcagagaaaatgtgttactttatagaaaatcctgagcaagtgaatataatgggtttgaagagctatgaaatagcacaagaaaaattcgacgctgaaaaagtaaatgccaaacttatagatatcatgggtttaaaagatctaaatgaaaagactagttga

SEQ ID NO: 69638 - DNA, 414 bp, Acinetobacter baumannii
ttgtttgcatttggaatagatgacaagaatcctgaaaatttcttgttattcgctcaagaaaatgacttttggtggttaagtgaaattggtattgagtattttacatttattgaaaaatacttgattatcaagtttttaccgctaaattatgtcaatttaaatttatccagtgagaataagatccggattccaagcttaactattagtattccgttaagcgacatgtactatgatcatcttcagcaatatattccagcattcaaaaatgcatatatcggtaagattggaccttctccggctggtattaataaatggaatatttctgagttcagtaatcttcctatacctgttcgaccacaattgactccaattaatcgtcaacacgctttatccaacaaaacttcattcctttaa

SEQ ID NO: 69639 - DNA, 366 bp, Acinetobacter baumannii
atgcgcagttcattattctcaattttatttgcttcatttctatatttaatcgtttcattattacttggtttaactatatctggctttgcccaaagtcagtttcaggcgagtcaaattgctttgttggcaagttttatgccagcgctgatgctttccggatttgtttttgatacacgcaatttgcctttggttgtgcaaattattagccagttacttccagcgacgcattttatggttttaattaaaactttatttatgggaggtgatgattggaagctatggtttaaagagtgcggtattttattgggatatatcgttgttttgatatgtgctgtgaacttttcactgaaaaaacggttgagataa

SEQ ID NO: 69640 - DNA, 1395 bp, Acinetobacter baumannii
atgagtcagtttgaacttccagagggatgggttacagctgagcttgataagttaacttcagatatttcctatggatatacggtatcctcaacagaccacgaaattggaccgaagcttctacgaattactgatatacaagataaccaagttaactggtcgacagtacctttttgtgaaattgatccagccaagtttgcaaaatatgagttgaaagagcatgacttagtatttgcaagaactggggctacagttggtaagagcttcttagtgcgaggtacagtacctccggcggtatatgcttcctacttgattcgtgtgagaagcctatctatagagtcggtgaagtatctatcgttctttttcaaatcacctaattattggcagcaaattacagaatttagtgcagggattggacagccgaatgttaatggtacaaagctaaaaagcttagtagtgccagttccgccattagcagaacaacaagtcattgcagataagcttgatactttactggctcaagttgaaagtattaaaactcgtttagagcgtatatttgagattcttaaacaattccgtcaatctgtgcttgctgctgctgtgactgggaagttgacagaggagtggcggaagttaaatgatgaaggaggcttttctgaaacaacatgggaagggattttaagagataaaaaaaattcatttaaacgaggcccatttggaagtgcgcttaagaaaagcatgtttgttgaaagtggatttaaggtatatgagcaatattgtccaattaatgatgattgtacatatgctagatattacattactccagagaagtttgaggaaatgaaagcatttgaggtgctcgatggtgatttccttataagttgttctggggtgagtttgggacgaatcactcaggttccatttggaagtgagcgaggcattatcaatcaagctttgcttcgagttagattgaataatcaactttataatgatgatttttttaaattggttttcagatctcccagctttcaaaaggatctatttgagaatagtacgggttcagcaattcctaacttgaagggtgtgaaagaactgaaagcaatggttattccgctgccttcattaaatgaacaggaaaaaatagttgagttggttaatcatcattttgaagcaataagtggtattgatgagtgtgttcgatcagctcttgatcgagtaaacagccttactcaatccatccttgctaaagcattccgcggtgaattaactgctgactggcgtgaagctaatccagagttaatcagtggtgaaaacagtgctgaagcattattaaagcgaatcaaagcagaacgtgaatcagctaaaccgactacaaagcgtggtagagctgaaacataa

SEQ ID NO: 69641 - DNA, 465 bp, Acinetobacter baumannii
atgctgaaaattaaaaagctcaagaaccattttatacgtaatattccgagagaacttgaggtaggtgttttatatatctcaatggaatacgcaacagcagtgcacagctgttgttgcggttgtggagaacaggttgttactccattttctccaacggattggaaaatgatttatgatggtgaaacagtttcattgactccttctgtagggaattggaatcttgcatgtcgttcacactatattattaagcataatattatttatgaggctggtaattggagtgaaggccgaatcaaagctgaaagaaaaagagataaattagctaagtctaatttctatcagtctaatattgaaaataatcttgtaattcctaatcatgagcaagagccaataattattaataaattatcatggagcaaaagattgtggaattatattcgtagtttgataaagtttctaaaatga

SEQ ID NO: 69642 - DNA, 1185 bp, Acinetobacter baumannii
atgtcacaaaaactattcagtcttaatgaagatttacgccagcttcgtgaagctggctaccatgtacaaattattggcggatttcttattatgaaagaagtgccttatgttaatgctcaaaaatgtattaaaaaaggtactctcgttacttcattagatcttgcaggggataatacacgcaaacctgaatgtcatgtgatgcattgggatggggaatatccttgtaagataaatggcgatcctttaaatgaaattcgtcatatgactcaacatatggattttgggcacggtattactacggaacatagtttttctagtaaaccagggccggaaggatatccagattacttcgccaaaatgtctacttatgcaacgatattgtctggtccggcagctgtattacagccagggttgagtccaaaaatatttcccgcatctgatgaaactgaaagtgataacgtatttaactatattgatactgcttctgatcgagcgggaataggtaaactttcagagaagttagagggagaggtagtttcaattatcggtactggaggaacaggtagttatattgttgatttaatttctaaaacgcctgtacgtgaaatacgcttattcgatgaggatgagtttttacagcataatgcattccgtgcaccaggggctccatcattggcagtacttagaaatgctcctttgaaagttgattatttgaaaggtatttatggtcaaatgcaccgtaatattgttgcatatcctacaagtttgaatgcaagtaatcttgaattattaaatggcactacgtttgcatttatctgtatcgactctggtgaagataaaaaaggagttatccagaaattagagtcattaaatgttccttttatcgatgttggaatggggttggagctagttaatgggagcctgggaggtatactacgggtaacaactagcactccagacataagagagcatatccattcaggtcgtgtttcttttggtggtggtggtgagaacgatttatatgcttctaatatacaagttgcagatttaaactcattgaatgcgactttagcagtcattaaatggaagaaaattaggggcttttatagtgatctagaaaaggaacatcattgcacgtacaccacggacggtaatatgttactgaatggggaccagatatgctga

SEQ ID NO: 69643 - DNA, 756 bp, Acinetobacter baumannii
atgaatcctattcaggaaaattttgatgatgtaggtgaagcgattcgagagaatcgcccgttaagaactgcacagttatttcgtattcaagtagctgttgataatgtagattttcaacaagtttatatttcagatccaatgcctacaggacgacagatattaacagctataggtcttgatgatcgtgaggaggtaactctttatgcgatcttaccaaatggtgactttgaagatattcggttaaatgaaacttatgatttacgtggacgagaaattgaacgttttattatctttaagacagatcgagaattcaaactaaagcttgatggacgagaacttaaatggggacaacccacaattgaagcacatagtttatatgtactgtctggtattgggcctgatcaagccattttttttgaagttagaggcgggactgatcgacttcttgaagctgatgaaattttagatctaactaattctggagttgagcattttattacggcaaagcggcctatcagagattatacaattgttgttaactctcgtgaagaaactgtcacaaatcctgtagtgacatttgaacagatcgtgcaactagcttttccaaacgcaccttgcgaatcaaatactatttactctatgacctatcggaatgctgcatctagaccacatgctggagagcttgctgaaggtggggttgttgaagttaaacataaggggacgattttcaatgtcacaaaaactattcagtcttaa

SEQ ID NO: 69644 - DNA, 3378 bp, Acinetobacter baumannii
atggatgctatcgaaattgctcgtcaacgtgctgataaacttcaccataaggctgtaagtagaggattggatccttggagttcatattcttttgcggttggtgaagctaaatttcgaaatgttgaggtagaaaagtgctcaaaagattctgatgaattaaatggtggacgtgctttttttgatagtacctatcgattaattactcatgaggattatggttccctttttgaacaagcatttcttatagcccatgaaattggacatattgagttaggtgatgatactcaagatgaatatgtaattagtatagatccttcctgtacttcagactcagacccatcagaaataaaccggattgttgattataaccatcgacaaagacgtgaagttcagatggatctttttgctcgagaattcttgttaccgcgttcagtagtcaaaaaattgcatctagaacataatatgacttgtagtgatattgctgacaaacttggtgctccttttgaagtcgttgcacagcaaatgtttgatgccatgttgttgcccaaggttgaaaatcaattaaatgaaattactcgggatctgccgcttaatgaaaagcaagaagaagcagtaaatcacctaggtactgcttttttacttcaagcagggccgggtacgggaaagacgcaaactttaattgcaagagttgaaaaattactaaatgaacagattgaccctaagcaaatattattactaactttctcaaataaagctgcttctgaaatatctgaacgtatcgcaagaaagaaaccccatgaagcagcagctctttgggtaggtacatttcatgggttcggacttgatttacttagaagatttcatgatttattagaattacctattgaaccgaaattattagatcgaacaggggctgtagagcttctagaagaagaattttcacgtcttaatttaaaacactatcggaatttatatgatcctactcaaaatattatagatattctaaatgccatttctcgagcaaaagatgaagtgacagatgcggtgcaatatcgagtttttgcagaggatatgtttactaaggctattaccgctgaagagtatgaaacagctgaacaagcattagaagtagctagagtttatgaagtttatgaaaatttaaaaaaacaaaaaggttgtttagattttggtgatttggtaatgcttccagttcaattgcttgaagctaatccagagctacgacaacaactacagaatcaatatctacatatattagtagacgaatatcaagatgttaaccgaagtagtataagattattaaaagctctgaaaccagagggaaataatctttgggttgttggcgatgcaaaacaatcaatttatcgatttcgtggagcatcatcatttaatatatcgcggttttgtgttgaggattttccaaatgctgtaacacaatctctcaaaataaattaccgctctagttcagagattgtaacggcattttcaaattttgcatcagttatgaaaactggcggtactggaagcggtcttattgcagatcgacctagttcaggaattacacccgaaataaaaacagtagaaagtggagatatgataatttcagcgatagctgaatcaattaatcaaatgtctgctttaggttttagctttcgagaacaagtagttttatgtcgcggaaatgaaaaacttgcggatttagcaaaaaatttagaggtcctaggaattcccgtcttgtttttgggaagtctgtttgaaagatcagaaattaaagatcttatatctttagtctcacttttaattgataaacgggcatctggaataattcgtttagcctgttggtcagaatttgatatgtcaatggaagatgtgaagcaaattttagatcatcttcaaacgaatgaagaagagttttgtacttgtgatatatcagcattagctttatctcctgaagggctaacttcttttaataaactaagaaatttattaagggactttaataaagattcacatccttggaatgttttagcgtctgtacttttagaccgttcgagaataatagctgaactggcaacatcagattcagttaggagaaaatctgaaggtattgccatctggaaatttatgaattttgctcgtcaacaattagaaggaaatacttttcctatagtaaaaatgatgagtcgaattcgccgtttaagaaagctcaatgaagatcgtgatcttagtcagcttccaacagtagctcaaaatatagatgcagttcaactaatgactatccatggctcaaaaggtttagagtttcctattgttcatttaagtggtgtcaacaatgacacattacctggtgcatttaagaagacaaaatgtcctccaccagaaggtatgattgatggcggtattggttcttcaaatgatctagctaaacaggcgcatgataatgaacaagaatgtcttttttatgtagctatgtctcgtgcaagagaaaggttatttttttatggtgcgagaactaaaggtattaaaaagactaaacggccactttctgtattcctagaaaagctaggacccatatctagtgtagagactgtaccaaaaataaaattaccaatagtactagaaaaagtcccaatagaatttaaaggtaatgtcagttttagtgctaatgcattagatttatatgatagatgtccaagacgttttttatatactcatattttatgtattggtggtcataggcaagaaactgccttcatgcagatgcatgaagtggttcgtaatgtatttcaaacattactgggtatcagtaatgatgatttaattgattggaaaccaattcttgaggctaattttgaaaagtttgggttaaataagcatggatatttaaatgattatcgtaaaattgctgaaattatgctcaatttttttcttgaatcaagagagggagcaataattgaaaattctgacaagttgatgttggataatgcggatataaatataacaattaatgtagatgaaattcttctacgtggtgataggcgtacattgcgctgcatttctacgggccatatgcctagttcaacaattaaaaatataaaatatgcagcattttctatagctgcaaaaaaagcttttccaaactcatccgcagaattagtttatttagcagataataaagtttatgccctagattttaaagaaaagtttttaaatgattgtgaaaataaaatactagaaattgtcaatcgaattcaaaaaggtgagtttaaattagctgattcagcttttaattgccctaactgccccgctttatttatttgcggtaatgtcccgaaagggagtttaaagaaagaattttaa

SEQ ID NO: 69645 - DNA, 567 bp, Acinetobacter baumannii
atgaaagatcaaaatacttctcgtgagaatgtgttgagagattttgcgattgagtttgagccaagtaaaaatatattacagaagtttctacgagagttccctgaatatactaatgaattagtagatctttcatttgagctttctcgtaaaattgatgagtatgaaccactcacagtagatgataaaaaaagtattgaaactgctatggagcgttttcgcaaagggcttaatcaacaatctgaacaaataaatataccaccacaaagttttttaaatgcggcgaaattgttaaatctcccaagacaagtattaatggcttttggtggaaggaaagtggagttggattctataccctcgcatttccttaataatcttgcattagctttagaagtaacgactaatcagttgagatcttttcttactctgccagcacaagtagccccaaatagtcgaagttataaatctaatgtgaagccaactgctccaagtaaagttgcttttgaaaagattttacatgatgctcttattcctgaagagcgaattcaagagattatgaatagagactaa

SEQ ID NO: 69646 - DNA, 777 bp, Acinetobacter baumannii
atggctagacctctcagaaaggttaatcgagaaggggttcaatatactcggcgtagtgttattgaagatgaaatcaaagaactggaaaaagcgagtaatgaagaaattatagctagagcaagcatttggccatatacaatagatgagtttgtttccagtgaaacattactctatttcttccgtaatactgacaattcttggcttcgtgaagaactacttataattctcttagaaagaatacatcgtctactccctaaacctaatagttcagatggtcaaacttcatcgttagtaaatatggaaattcgcgataaagttcgtgatgatttcattgatttattactagcagatcaaattagttatgaagagcgccttgattattttgaagttaatttcaatggtgcattggctagtgacaagcttgatgcacgaaagaaaattcagaatagagataatctaactcaaggattatacgatgaggatgaagaaatattaccggaagttgaaatttcgatagaatcttatgatccttttgatccaaatgaacttgataaagaatattaccgacgtagcttaaatgaggcgattacttttttatcaccacttcaacaacgtatcgttattatgtggtgtcacggtataccaattatttcaaaagacccaaatgaaatgacaattagtaaatcactaaagaaatcagataaaactattcgtacgcatcgtgattctgcattcgtaatattacgcaagcgaatggaaaatagagaggaattataa

SEQ ID NO: 69647 - DNA, 414 bp, Acinetobacter baumannii
atgtattatcagatagataatcttaatatttatggttgtaattataaattttataatgatgatttaatgccaattacagaaagttattttaaaaaaatattgaactttaatatatcaaaaggattttatgaaattggttgccgtaaaatatttccagcatggggagaatttagaaagctaagttttagtgctacaataaaatggcctgatcgattcttttatcaagattttagaaatgaagtattagtgttaccttacttatttaatcaaaatctaaaaattgaagatcgattcgacaatagtgaagagtttgtaacttgggtctttgagaatagaaaagataaaaatgtaacgttagatgaaataagagatttaaacaataaattgatcgagcacttaaaacaaataatataa

SEQ ID NO: 69648 - DNA, 171 bp, Acinetobacter baumannii
atgaatggattgaataagccgttgtatagaagaaggatttctgaaatctatgttcagttattatttgaatatctcgaaaaactaggacatgacccagaaaaggtgctgggtgaaccgtggcctaaagcagattcaaatcatttagaaggcgtagatatcgaccatatttag

SEQ ID NO: 69649 - DNA, 816 bp, Acinetobacter baumannii
gtggctaaagcttacgtcaataaagggattaagttaagagctcttgataagtctgaagaagcagtacaggtttatgatgatttcatttctcaatttaaagattctaaaaatgaagaaattcaagtacagatggctaaagcttacatcaataaaggttttagattaggaactcttgataagtctgaagaagcagtacaggtttatgatgatttcatttctcaatttaaagattctaaaaatgaagaaattcaagtacagatggctaaagcttacgtcaataaagggattaagttaggagttcttgataagtctgaagaagcagtacaggtttatgatgatttcatttctcagtttaaagactctaaaaatgaagaaattcaggtgagaatggctaaagcttacgtcaataaaggttttagattaggagttcttgataagtctgaagaagaattacagagttatgatgatttgatttctcagtttaaagactctaaaaatgaagaaattcaagtacagatggctaaagcttacgtcaataaaggttttagattaggagttcttgataggtctgaagaagcagtacaggtttatgatgatttgatttctcagtttaaagactctaaaaatgaagaaattcaagtacagatggctaaagcttacttcaataaaggtgttagattaggagctcttgataggtctgaagaagcagtacagatttatgatgatttgatttctcaatttaaagactctaaaaatgaagaaattcaagacgctattattagtgccacaaaaaagattgctagaaacaggcattaa

SEQ ID NO: 69650 - DNA, 828 bp, Acinetobacter baumannii; identical to SEQ ID NO: 56583

SEQ ID NO: 69651 - DNA, 984 bp, Acinetobacter baumannii
ttgaagtgtttaaatgatttcttaaatttagacggttttatttttgatgatgagtataattcgatttgccttgatcgagatcattttacaccaggttacttaactgctttagctggttttataaaagctcataatgttcctgaaagagaatttcatgcatctgatgagcaaatttcttacttaagaacgattggtttccatcgagaattatggcaaataggggataacattaaccgtgttaattgtggcagaacttattcacctttaacccctttaaaaagtcctggggaagtggatctggcaaatacaactataaataattgtattagggaacttgttaatcatgaaaaaagtgaaggtatcgcaagtcttcttcgtgtagttggcgagctccatgacaatgtttggtcgcatggaaagtctactggtttttcgatggcacagcgtacgaaagtccctaatactaatggtatggatcattatatagagttcgccttagcagataagggcttaggttttttagaagagctgaagagagcaagaatagaaattaaagatcatcaaagtgcaattgagtggtgtattcaagaaggtaattcttccaaacttaaaaataagagtgaagatgattggactcaaagattgccagatgatttgataggtggtgatccgatgatgggatttggtggagaagtacctgagaacaatcatcaaggtttaggattagcccatcttataaagttaattattgattacaaaggtgaattgcaactttgtactggaaatgcattattattaatagattcatcaggtaaaagatcttacaaaatattaaaaaatgaatggaaaggtgtggcaatttcttgtagattcaagatgtctgaattaagacaatcgattaaaaaaaatacacttgaagattccgctcggaaacatataataatggaacgattaagaggtgttaaaaatgatcaaagtatttag

SEQ ID NO: 69652 - DNA, 294 bp, Acinetobacter baumannii
atgatcaaagtatttagtttgccctatggtgatcttgcatcaagaactttggctgtgccttttcgtcaaatgcttgaaacagcttttattgaagataagtcttctataatcgaattagaccttaaggctgttcagtcaatttctgaatcttatgcagatgaattatttggaattttagtaaaagagtttggtgtagaaactgttttagatagaatgaaaataatcaatgcagatgactatgttttagaaagtattgcatcggtaatagatcgtcgtgccacaaatttttgttaa

SEQ ID NO: 69653 - DNA, 882 bp, Acinetobacter baumannii
atggttttagttttagtggacaataatactcttacagcatttgcaacagtcctattggcattaattggaattattcaaatactagttttgattggccaattatatttattgcgtagtcaaaaaagaaatcaagatatagaagttttagaagtataccggaaaagatggtttgattatcaagtaaaatttggttgtttagtatatttagggagagatttagatgaatattatcaaatacttgatgcggaagaaattattaaattaaattctaatcttctatcttcaaggagagaaaaacctactatatgggctagagatgctgtgagagatgtatcggctctaatgagtgatatctgtattagaattttacaaggaagtttaacaattcagtctgtttatccaattttaggtactactattcttagacatagtcgtcctttaagaatattgcttgaaagtgactattattatgatttcggaacagatgatgcgataataaataaaaatttattgtatagacataaacaagtacgagaagaagtacaaaattggtttgtatatcatattggaactcaaagacggtgtttaatcttaattgatttattatgggctgaagctgccagattacaggatttaccaccagatgatttaaaagccgcagctgatgctaagatcaattctgggaagaaaaatagaattagaatagaacaagaacatttcctattaaattctagtataagttatctgagagcaaagcgattatctaattatttaaaacattcagagtacaagaaatatttttggagtaaggggttatctaaaaagaaacttgaaaaacttgataaagaatggacagaaaaacttttagcaagatataactaa

SEQ ID NO: 69654 - DNA, 591 bp, Acinetobacter baumannii
ttgacatctgattgcgcatcgtggaataaagatcttttactaaaaaacttaaataacctaaaaaaatttactaaacataaaaaagtattagaggtacttccgtctttacaggaaacgttaagccaatacggtatagctttattttttataaaatctctttctaaaactccaatatgtgggctagcaaagtttactaataacaatagagctattatcgctataacacctaaatacaacaaagatcatatattctgggaaactctttttcatgagttaggacatttagttctacatgaagaggatatgattttttgtgatgaaagctatgaaaagaatgataaaaactcaatagaatgggaagcagaccagtttatgttacaggcgtttctttacccgattgacccaaataattttcatagatttataaatatagatttaatcaaaagagataaattagcaggatggaaagagatttgtcttaaggctagagagcttgatatttcaccaagccttcttacaggtttattaaaaaagatgggacacattccctataaatattataccgatagacattacactcttttagattaa

SEQ ID NO: 69655 - DNA, 888 bp, Acinetobacter baumannii
atgaattttcagcaaaaagatactagagcaaatgctattgcggctcaaattaatactttccaccaaaatgttacctcgcttcctgcttcagcttcttctatagaaattgatgtattaagcagacagttagtagatagtattaatcgagttgattatttccaaaaagttcaatctagaccaatttctttggttcgtacagatcccactcatattctctttgatcctatacgagctatcctttattacaagaatcatgatttggatgaagctttttggttagcttttttgatgatccattttggagaaaactatcattcaaaatggaagttgacaaaagctttctatggaaatttaggtcaatctccaaaattaacttgggcaaacgtttcaaataatccagcattagtagatagttgggtttctcaaatgagaaactctggtattaaattaaaattcggtaatcatagaaaatacgagtctttctcacatttgaaagatgtaatcactgtctatattgggttagtcaatcaaaatggaggacatgctcaattatttgcatcttatcccgatgaaaccccaaaagatcaatttaaacgcctttataaagaattaaaattttataaatttggaaggttagggatgtttgattacctttctttaatttataaaactcaattagccaatattgaagcagattcatgtcatatagccggttcaacaggacctaaattgggcgcacgaagactcttcggaaacctgtccaataaacagttagatgagctttcaattcaactagctgattacttgggtataggttaccaagagtttgaagatgctatctgtaactggcaaaagtcacctgacaaatacatctcctatacaggttaa

SEQ ID NO: 69656 - DNA, 1008 bp, Acinetobacter baumannii
atgcatataaccgcagagtcaattgatgacctattacatcaaacttatcaatacattttagttaatggggaaaaagtaaacccaactaaaggagtcaatcaagaagtacggaactgtgtactcactttattaaaccctagatcccgcattagtctctctgaagttagaagcaaagttataagttgtgtaggagaatttctttggtatctaacgggttccgattctattgaattcattgaatactacatctcaaaatatagagaacggatcaattttaatgaagccactattgatccggtacctggagcttatggacctagaatattcggaacgcctaaccaatttgaaaaaatttttgaattattaaaaaaatcagaatcaactcgtcgagctgtaatttctatttattcaaaaaatgatttggttggtgatgattctagagatattccttgcacttgcaccttacaattctttattcgtcaaaataggcttcatttgacttcttatatgcgttcaaatgatgcagcattgggcttggttcacgatatttttagtttcacccttcttcaagaattaatgtttgctaaattattattggttaatcctcaattacaattaggcgaatacactcatatcgtcggcagtttgcatatttacgatgcagatttatcaaaaatcaatcattacttagatagggaaggatggcattatcccgtttcaatgcctccaattaatccaaacttacttacagaaagtatagagaaactcttagaaattgaaaaaaaaataagagttgaaaaagcttgtgatattagtcaattagatttaatagatgacactgtctttaaagaaatggctgctatcttattcgcttacttttatataaaaccagctactcgtgatattaatggtttaaaagcattggaagctaaatgttcgagtcagcctatcaaggcatttctaaataaacgcattcaagaattacaagcgaatgaggggaataaatga

SEQ ID NO: 69657 - DNA, 306 bp, Acinetobacter baumannii
atgtcaatttatgtcgacaattccagagtgtcttataagggaaaaatttggtgtcacttaatggctgacagcttagaagagttgcataactttgcatctaatattggcataaaaaaatgctggtttcatagctctgcttcgtatcctcattacgatattacgatcgaaaaaaaacaaattgctttatctaacggtgcatttttggctgataggaagacaataattgaatgtggaaaaaaattaaaaatacagttagatatgcataaaaacagaaattataatagactacaaattgagctattttaa

SEQ ID NO: 69658 - DNA, 1164 bp, Acinetobacter baumannii
atgaacgatgttgctttaagtccagagtttcaaaatttaatgactcgcctggatcatttagatttaattgatccatttcacaatgattattacgcagaaatgcaagctatcaatttacagctctcatttctcaaaactcaatcagaacgacaagatttattatcaataaacactaatcaaattctaagcttatcagttgatacaccatatgatgaaatgaataccctcatggattcattatcccgaatgtatgccaaaaatgcacaatcagcagatgattgggaaacgattaattactcgaatatcaacaattatgatttcaaggcaatgcatatcaaaattaaagctcaagttgattttttagatatatattttgaaattaaaaaatctgctacacggcatgacatcaaaaaattcctaaccgaaaaaacagggataagacattatatttctgaatttaaaaatggcttcatcgttcgcttccatgatattaactctctcaatcaattacgacgccgtattcagcatttaaaccactttcaatgtaaagaagatagctttcgagtcacagaaattgaactcgcaattgatttctatcgattcaagcataaagcgctcgttacggcgcttttaaaatcaattcgacttcctagtactgcaacaaatttccgcgtctttaagaaccaattgggagtatttaaccctattcctacaatgcctttaaccttgatgagaaaaattcagaatggctataacattggaatcaatcataaaaatgcagatgaatactggcacctttatgtcaaaactacagatcataataaacagccattaccccaagaaaagtggagagttcgagcagaaaaaaatattaaacgtaatattcttagtaggatggataatcacttgaataacttgaaaagtatcttgcgagagagctttaaagatctcaagtttactcaattagaagccacggcgcctcaagatttaaaagaactgtacagagactcagtcctaccctttgggcttgagcaagaggtccattatggtagacaccgccacaaacgagttttagccgaatatatcaaatcaaacactgaattaaatcaggttgtatcaaacgccgtacataatttgattcgcaatttttctatcaacacctag

SEQ ID NO: 69659 - DNA, 255 bp, Acinetobacter baumannii
atggacgttaaatcaaaagtagcaactgaaattgcattaaaagcatttgaccaagtgaagtcatcggacaaatggaatgacctactgctagatgatatcgattgggcacagcttgctaagttactccctcaagatgatctcgatgaaatgcttaataagttaaacattcatcaagagtcctttgatcaattgattaaagaacttaatgataaagttgatcaagaacttgaaatgctcagtaaatgtgagagttga

SEQ ID NO: 69660 - DNA, 252 bp, Acinetobacter baumannii
atgaaagagagtacataccttaaccgcaaacaagcatccgaatatcttgcacagcatttgaaagaaaaaaatgctgtgcaatggcatcactggcttgttcgaaacattcggcaatcaaagcatgtttacagattgaactttaaagaaattggaagacaaatctgttactcagaaaatactttacttgcctttattaaatcttcaaccacaccctacaaccgaatgaacaaaggagttcaacatggacgttaa

SEQ ID NO: 69661 - DNA, 207 bp, Acinetobacter baumannii
atgatttcaagaaaccttcaatacgaacagttcgttcgaatgaaagacttagccaatcgtcccgacagtgtcggattgattggcgtctctcctcaaactatttggcgatggatcaaagagaatcgctttccagccccactgaagttaggctctatcgctttatggcgcatgtccgaaattcaggcatggatgaatgctcaaggataa

SEQ ID NO: 69662 - DNA, 687 bp, Acinetobacter baumannii
ttgcgtaacatcatttttgactacttaaccgttgagcaaagtatccaagttttaaatcaagattctgaattaccttgctcaattgaaagcttagctcacctcattgaacaagaaaaagtatctgttttatacaaatttgatggcttacttggtgatgaaaaaggcaatttaatcaaaccacttgatggtttcattaagcctatcaatgctaataaaattaatccctttgaggatgtaaaaaatttacttctttcaaaagtgctagaaattcagctaacaactactaaaattgatgatgaaatttatcagttctattatgtcaattcagattggacttatgaggatattttaacaatactccctgcagaaaaccgcaagcttgaatctattggtctcatagcaaaacctatcaccattcaacttaatgatttaagaatctctagtgcctcagtattagaacatttagataattttaaggaaaaaaaagaagaagttataaacgatggaatttacattgttatcggtgcattacttgatgagttacatagcagaattccaaactgcactcaggaaaaaataatgcagctcctccaagaaaaatcacaacctgaagcaccattatctaaaagtaaacttactaagattttcgctccagctaataaaaaatatgccgatttcaaaaaataa

SEQ ID NO: 69663 - DNA, 1197 bp, Acinetobacter baumannii
atgcttactgatgcccaaataagaaagatcaaacccctcgaaaagaagaaacgttactcggatgaaaaaggtctttatttagaagttacccctgcaggcggtaagttttggcggctaaaatatcgttttaatggtcgagaaagtactttaaccattggtagttatcctgaaatttcattggctcaggctcgccgtagtcgtgatgaggcacgtattcagttgtatcaaaacatggatcccaatgcggtaaagtatcaacgcttacagcaaattgaccaaagcaccctgtttaaatcacttgcactagaatggatggaagatcgtaaaaccgttattaaagaagcaacttatttacgcgacctttctgttttcgaaaaagatttattcccttttttaggcaatctgccaattgatcaaatcaaagggaaagatgtgcttgcttgtgctaagaaaattgaagaacgtggtgcgcaggaaatggctaagcgatcgatccctctagcaggccgtatttttcgttttgcgatacgtaaagggcttattgagaatgatcctacccctcacctgcaagaggctctaaaaccccgtaaagtaaaacatatagctcgcttagacatttcagaattccctgcatttttacttcgcatggatcactaccacggaaatattctagttaaaacagccctactagttatgacattaacgtttgtcagaaccgctgagcttatcaatatggaatggaatgaaattgactttgaaaatagattatggcgcattcctgcccataaaatgaaaatggccttacctcatatcgtgccgttatcaagacaagctatcgagcttattgaaaacctaaaaccattaacaggtaataagcaatttgttttctataatcacagcacggcgaaaccgttgagtaacaatgctttattaagtgccattcgaactatgggttatatggggaaaatgacaggtcatggctttagaggacttgcatctacaacacttcatgaacaaggctatatgcatgatgccattgaaattcagctagcacatactgtcggtaacgccgtatctcaagcttataaccatgctcaacatatggactatcgaatcaagatgatgcaggactggtctgattttattgatagtttgcgaaataatgttatcccttttcctaagtctaaatttgcataa

SEQ ID NO: 69664 - DNA, 663 bp, Acinetobacter baumannii
atggagaagtcaagatatctaattggacagcatgcgaaagagcacaaatggctaactgagcttgagcgaattttaaaccatattgatcaacaaactaaccagtgtggagatacattaattgagtgtagtaaatcatttatagaggcgattgcaaaaaatataattttcaaattaaagccagaggaaaatcaaaaagatattaatctttgggatttaggctcactttttaagcaagcaaaaaaagcaatgtatgagcattcatctatagaaaatgtaatgcctatgagtgatatagaaaagtatttttcggcactcaatcaatggatcagatttttgggtgaaatgagaaataatgtgggtgaaatatcacatgggaaaattttgccaaaatcttactcaatagatattgaattagcaaaaatcatttctgagataactgataggcttgcttatatccttcttttaatgctattggaaatcgatttatcgtatacacaattttataaatatgaagattatctagagtttaacgattatcttgatgaacaatatgagttacctaatggcttaatttatagtaaagctttgtttgagcaagattatgatgcttattcagaagagttagataattatcttgatgcacaaggtatggaagttgcttaa

SEQ ID NO: 69665 - DNA, 1191 bp, Acinetobacter baumannii
atggctacaccaaagttacgatttaaagagtttggtggggattgggaactcgatcttttaggtaatctcgttcagatcaaaagtggttactcaccaagtaaatatgaactggataaaagtggggaaatgccatttttaaaagtcgaagaactaaacaattgtgataaatatcaagaatattcaagattttatactgaaagaaattccgatgcggttcctagtaaaagtgtcgtttttcccaaaagaggagcagctatcctaaataataaagttcgtatactgcgagtagatgctttattagatagcaaccttatggcactgatcccacaacatagtttagatgccgaatatttatattatttaatcaataaaatcgaactttataagatcgctgacacttcaactattccccaaatcaacaataagcatattgaaccatatagtatctatttaccaagcaaagaagaacaaaccaaaatcgcctcttttctatcgaacgtggatgaaaagattagccaactcacgcaaaaacacgaactgctgagccagtataaacaaggcatgatgcaaaagctgtttagtcagcagattcgttttaaagcggatgatgggagtgagtttggggagtgggaggaaacgactctaggagaaattggtacattcaaatctggtcaaggcttcccagagcagtttcagggtggaaaagatggtatccctttcttcaaggtttcggatatgaatattcttggaaatgaaaaaataatgaaggttgccaataactatgtcaattcagaagcgattactaaaatgaaagctaaggtaatagataatgaagcaatcatttttgcgaaagttggtgctgccatttttttagaaagaaaacgcttagctaaaaatttcttaatagataacaatatgatggcttatttatcaaatcaaaaaacgaatattatgtttctaaaacaatttttggataatataaagttatccaaatttgttcaagttggagcactaccttcttataactctagtgatttagcaattatccctataagccttccttgcctagaagaacaaaccaaaatcgctaatttcttatctgccatcgaccaaaaacttgaagtcgtggcacagcaaatagaacaggccaaaacttggaaaaagggcttgttacagcagatgttcgtttag

SEQ ID NO: 69666 - DNA, 486 bp, Acinetobacter baumannii
atgagagaacgttacgcaagtggtattgatgataaaaccgctgaaaaaatggttgaattgttaaacgctaacttagccaatctgattgacctaagtatggacagcaagcagtgccattggaacttgcaaggtactggctttatcggtgtgcatcaattgttagatgagacttatgagcgtttgactgaagcatttgatacagttgccgaacgtatcgttattcttggcggtaaagccaacggtatctctaagcgtgtggtcgaagactctatcttagagacttatccaactgatatcacagaagttgatgagcacatacgcgagcttaccaatcgctataaaaccattgccgcttcactgcgtgaaggtattgataccgcgggtgatgcaggcgatcaagatacggcagatttattgaccgaagtaagccgtattgtcgataaagacgcttggttcatcggtgctaatgcgccaaagaaaaagtaa

SEQ ID NO: 69667 - DNA, 867 bp, Acinetobacter baumannii
atgatatatcgactatttgggctaggcaaagtcaccttaaccattgaccgcaccaactggaaatggggtaaaagtaacctcaacatctttatgttaggggtggtatataaagggatagccatccccttatactggcacatgctagataagcgaggtaatacaaaccatcttgaacgctgtgaacttattgagcggtttatcaaacaatttggcaaagataaccttgagatgatagtagcagacagagagtttgttggcgaaaaatggtttaactggctcaccaataatcacataccctttgccatacggattaagaagaacagtaaagttaagaatcatcatggcaagttggtacagattaaagagttattacgccatgttagccatcaagaaacatatcgacatggacgaatactgactgtcgatggttgtttggttcgagtatttgccaagcgtgataaagactatggtttagtgattgtggccaccaatcaactagaaacagtggatgcgatgacaagctatgctaagcgttgggagattgagactttatttgcttgtctaaagggccgtggctttaatcttgaagatacccacttaacccatcttgatcgggtcagtaaattagtcgcagtgaacgccttagcattttgttgggcttatcatgtcggtatttataaagacaaagataagccgttaaaacgcaagttgaagtcaaacgctcgacctcaagccagtttgtttgcgcttggtctggatgtgttgattgagggccttcacttggtgttctttaacaatgataagactgtatttcgacagttagttagctttttaacccctaaacctatgaaaatcgggtggggatga

SEQ ID NO: 69668 - DNA, 501 bp, Acinetobacter baumannii
atgaatacagaatcattccaacaatcaaaaaaagatgaacttattggacttgaagaacagcacgagatctcgtgtttagtccaaaaatttgctatggaaaaactagggtattcaaaggtgaaagtttcatcttttgagctaatgcaaaagaagcctcgatcagtagtgactattgcatttaataagagtcaaaatgatctctatttacgattcggaaagtatgatttggctgatcttaatgatcagaaaatcattgttgttgctcgcattggatttcgtaaaaagaaacatggttatggaacagctctactaaaggaactttgccattttggaacgcaatttggatatggatatttagaagtagaacgcccaaatccagattgccaagcttttatgaaaaaattaggttttaaggataagttctatcttcctattgatcagttgaaaagatccattcaagaatatgagctttcgagacaagctgtacccagtttcgtataa

SEQ ID NO: 69669 - DNA, 228 bp, Acinetobacter baumannii
atgagtattcaattagacccaaacaaattatatttagttttagatcccgatgacgtaaagcggtggtgcaaaggaatgtctacagaccctcagtttgcccatctttccgcttatattggggaacgtccagagcttttagcgggacggctttacatgaaattcatgttaaattcagatgaattaaaaccgattctcccgaaaatattaaagaagagttattacaaataa

SEQ ID NO: 69670 - DNA, 990 bp, Acinetobacter baumannii
atgaaagaaattgtattaagtgatttgatcaatcagcagaaagttggaccttatcaaaaatttattttggttacctgcttattactaatgattatggatgggtatgatattcagtccatggcttacgcagccccactgattatagaagaatggggtgttcaaaaatccatgttgggagtggtgtttagtgcaagcttgtttggtttgtttgttggatcatttttattaagttcactttctgatcgttttggtcgccgtccgatactactgatctcgacctttatattctccatattgatgctgttgacaccacatgtaggcaatattgagcaattgaccgtaatccgctttgttacaggaatttttttaggcggtatcatgccaaatgtgatggcttatagctccgaaattgttccatataaatctcgtatttttaccatgatggtcatttcttgtggctatacggtaggggcaatgttggggggcggaatatcagccttactagttccttggggaggatggcaggcgattttttatttcggcggtattatccctttaattattttctttatcacattctttaagttaccagaatctttatattttttaagtgaaaatagcaaaaatagctccaaaattttgttttggttgaagaagttttatccagcattaacattcaatacagagataaaaatcatcaataatactgaggttcaggttaaaaagtcaccgcttgagttatttaaaaatcagcgtgcgttttttacctattccatctggatcatcagtattttaaatatgatcagtttatattttctggcaaattggctaccgactttggccaaagagtcagggctttcattaaatcaggcattgttgatcggctccactctacaattaggcggtacgattggtagtgtggtgatgggccttaaaattgataagacaggattttataaagtattaattcctgttttttggttgcagtga

SEQ ID NO: 69671 - DNA, 330 bp, Acinetobacter baumannii
atgataatttcatttaaatcaaaagaattacgagataatgcaattaatgaatttttaggcatgcaaaatttaaaccctattacattagagctgttaaaaacaattttaacatcattaaacgcagcttcaagtttaaaggatctacctcatccgattaaaggtaaatttaattatattaatgaaaacatttgcttaggtggcattactaacttggatttacactttagaaatgctcatttagatgcaccaaagactagtgatggtataattgattgggatagggtatctcgtttgcaattaacttatataggggaaaaacatgctaattaa

SEQ ID NO: 69672 - DNA, 402 bp, Acinetobacter baumannii
ttgaaatatatcgaagttgttgcagctgtaattaaagatgatgataagtttttatgcgctcaacgtaaagacaataagtttgattacttagcattcaaatttgaatttcctggtggaaaagttgaatgtaatgagaccttagaagaatgcttaacccgagaaatagaagaagagttaaatacctctatacattctttaaattttcttttagatgtttatcatcattaccctgactttagtgttcatattactttttttgaatgtgctctaaatagaaagcagattactatgcttgaccataaacagattgtttggaaatctgctaaagaattaaaaagtttagattgggctgaagcggatatacccgcagttgaactactatgtaaaaaatacctcctttaa

SEQ ID NO: 69673 - DNA, 570 bp, Acinetobacter baumannii
atgacattagatttattggctacacatggtacatgtaattcatatgcaaatttaatatgtaaagaaaactttaaaatttgtgatggaagacatggtgcgggagtgtatttttggcatgcttctgccaattttgatgatgcaatagatttagctaaatcatatgccgaattcaacttaggaaacggtgcatatgatgatgttgatgaaaaagatccatgtgtcttagcgtgtaatatactattgaataaagttaattttttggacctagaatcaatcgattatttaagtattttacgagcttatttattacgatttgatgctaagttaaaggcaataaaagattttcgtgagatcaaagcagaattaacaaaaatatataatggtttttttcaggagcttgaagagttatccaatgaaagaatacttgtatatcacgttaaagcagcggtaccacaaaactacaaaaaacctaaatcacaagggttacaatgggctactcaatttgcaagtagttgtttagttgttagagaaaacagtgttattcctctaacatcaattaggagaatctag

SEQ ID NO: 69674 - DNA, 300 bp, Acinetobacter baumannii
atgtttgattcagcattagctagaaagtttcttgaaaaaattggaactatgtcatttgaagagcttgatgaaaaagcatcacgggctcctagcattggtatagaaggattagttgagaatttaccttctttagaagcgatgattgaagaagtttttgatgtattaccaaatcaagatgtaattcaattatttactattgataataatgcgaagaagacaactccagaacaagggtctcaagagaatttttcttttgagatcttgagtgataatgaacctgaatatcttgcagcagcttaa

SEQ ID NO: 69675 - DNA, 393 bp, Acinetobacter baumannii
atgaatataaaatttgttgaatacaaaataggagatttgaaattctctccttctcctgagcttttagaaaatttatcaaaccttgattcaataaatattgatgaccacctattctttaagcctatcttttttaaagattctcccaaaaattttgttgtaaaatttcatttagaagtcaaaacagaagaaactagtttttttgaactagattttttatctaagtttgtttgtgaacaagatatagatgacggttttaaagaatctaactttccgatcattaatgcgccagcaattgcatacccatttttaagagcatttgtaagtaatttctttgtaagtgctggttattaccctattcttttacccacttataattttactaagtttaagtaa

SEQ ID NO: 69676 - DNA, 594 bp, Acinetobacter baumannii
atgaacgattttttaacgataacaggttggattataggtgtagtatcaattggttacgcttatttttcaggtaaaaaaagtgatgaaaaattttctagtgtccttaacaaactagcttctcagcctatagaaattttagctattcttagctcaccaaatgaaaataaagtaatagagttatatgactttcagaatagagttaatgaaccctatgttttatctaagtttgatatagataacgatggagaggatgaaattttcatacaatcaggtgcaggaccatatagctgcaaattagaaatatataattatataaaagatccagatgaacccacacttcaattaatggatacagtagttgtgagtacgactgctgggtacatattcactgatatagataatgatgggatactagaaattataacaaatgataattcgattaaggctgataaaccctatgtcttaggttttagagatagagtgattttcaaatttgtagataaaaaaattaaagaaatatcacctttagaactgtatacagaagaagaaattacatcaagattagaggcgtttgaaaaagagaattttagttaa

SEQ ID NO: 69677 - DNA, 126 bp, Acinetobacter baumannii
atggttacaaaagtgaaatacaatgatgaagttaagctatttggatcgctgactgttgtagaagtaagcttaaattcaggacataaatataataacaacgctgagataacgattagtaataagtaa

SEQ ID NO: 69678 - DNA, 1779 bp, Acinetobacter baumannii
atgatgcgaactcattactgtggctctttaactgaagcccaaatcgaccagaccgttacattatgcggttgggtacatcgtcgccgtgaccatggcggtgttattttccttgatatgcgtgaccgtgatggtctcgttcaagtggttattgacccagatactccagaagcatttgcaactgcagataaagcacgttctgaatatgtattaaaaattacaggtcgtgttcgtcgccgttatgaaggtactgaaaacccaaatatggtgagtggtcaaatcgaagttttaggcaaagaaatcgaagttcttgctgcatctgaaactccaccattcccattaaatgacgacacaattaatgtgtctgaagaacaccgtttaaaatatcgtttcttggacatccgtcgtccagaaatgttagagcgtttacgcttccgttctaaagtaaccaacttgattcgtaactatttagacgatcatggtttcttagacgttgaaactccgattttaactcgtgcaacccctgaaggtgcgcgtgactatttagtaccaagccgagtacaaaatggtagcttctatgcacttccacaatcaccacaattattcaaacaattgttgatggttggtggtattgatcgctactaccaaatcgcgaaatgtttccgtgatgaagacttacgtgctgaccgtcagcctgaatttactcaaatcgacattgaaacatcgttcttaaacgacgatgacattatggatttgatggaaggcatgactattaaattatttaacgacttgcttggcgtaaaatttgaaaaattccgccgtatgccatacagcgaagcaatgcgtgattatgcatctgacaaaccagacttgcgtattccgttaaaactcgttgatgttgcagacttaatgcaagaagttgagttcaaagtatttgcaggtccagctaaagaccctaaaggccgtattgcagcacttcgtgtaccaggcgcaggttcattaacacgtagtcagattgacgaatacactaaatttgtcggtatctacggtgcaaaaggcttagcgtacattaaagtcaatgaaatcgaaaaaggaattgaaggccttcaatctcctatcgttaaattcatcgaaccaatcgtaatgcaattgcttgaacgtgttggtgctgaaaatggcgatatcgtattctttggtgcggacaaagctaaaattgtaaatgatgcaatgggtgcccttcgtgtcaagatcggtcatgacttgaaccttgcgacttgtgagtgggctccactttgggttgttgacttcccaatgtttgaagaaactgacgatggcaaatggacttctgtacaccatccattcacattacctaaatctagcgtagaagacgtgaagagcaatccaggcgaagcactttctgttgcttacgacatggtattgaacggtactgaagttggtggtggttcacttcgtatttacacattagaaatgcaaaaagcgatttttgaagcgcttggtatttccgatgaagaagcagaagaaaaattcagcttcttactcaatgcgcttcgttacggtgcacctcctcacggtggtttggcatttggtcttgaccgtttagtaatgcttatgactggcgcaacttcaattcgtgatgttattgcgttccctaaaacgaaaactgctgaatgtccacttactcaagcaccagctcctgttgaagcaaaccagcttcgtgacttgggcattcgcttacgtgaacaacaaaagaaagaagcttaa

SEQ ID NO: 69679 - DNA, 1464 bp, Acinetobacter baumannii
atgcgtatttttcagcgaattcatcaaaagttaaattggtcaggacgtcgttatatggcggtcatactttgcgttgttgctattgcatatcttgcatcggcaatttatcacacagtgaaaccattgccgcaaggaattaactttagtggcaagctcagacatgccgatgttaaatttttagccgataaaacgtatattgatgcgaatgggcaacaacaggttgatcagcacatctttgatgaaatcttgaaaatgattgatgaagcaaaaaccacgattgtggtggatatgttcttgtttaattcagaagtgggtgactcgaaactcaaacaaagaccattgatgcaagagctcactgatgcactaattagtaagaaaagacagaaccgccaaattcaggttgttatgattaccgacccgattaattcggtatatggtggactaagccctgaacactaccgtcaattacgccaagctggtgttgatgtcatcgaaacgaatctggcacctttacatgcttctaacccattctggtcagggttttggtacatctgttgccaaaatattggcaataatccagagaaaggctggttacccaacccatttggcgatgaaaaaattacgctacgtagttatttgaacttatttaactttaaagcaaaccatcgtaaaactgttgtcgttgataccgatgcgggttggaagtcattggtgacctcagcaaatccgcatgatggtagttcgcgccattctaatgtggcattggtggtaaatggagccacagctgctgatgtactccaaaccgaagctgctgttgcgcaaatgtcaggaagtagttcaccatcacttatattaggcgattttgaaaaagacgttagcaagcctcaagttcaagtgctaactgaaggggcaatctatgaagctgtattaaaattaattaatacggctaaacctaaagaacatcttgatttaagtatgttctatttgtctgaacgtaagattattaaagctctaaaaagtgcccaagaacgtggcgttattgttcgtgttttactcgatccaaataaagatgcgtttggtagacaaaagaatggtatcccaaaccgtcaagtagcttcagagttacatgctgctggcattccaattcgttggtgtgatactcatggcgagcagaaccatagcaaaatgatcttgaaatataatgctcaacaagctgagttaattgtaggatctgccaattttacagcccgtaatttaaaaaattataaccttgaaacggatatgttggttgtaggcaaagttcaagatcaagtctttaaagacgctcagaattacttcaatacctcttggtcaaacctacaagatagacagatgagcgtggactatgcgaagtatgccgatgagtctaaagtgaagtattggatttatcgttttatggaatggtcaggtttatcgactttttaa

SEQ ID NO: 69680 - DNA, 447 bp, Acinetobacter baumannii
gtgtctgaaatcagttttgaacgtcttcatcaatttttctgcaaagttccaagtgtacaagaagcccgtatcatggctcatggagcagatggcgaacacgcttggtggtttaagttcagtattgatgtagaacaccctctcgcatggcaaaccgttcaagaactagggcatgttttaaattacctgtcgacgaatgagcgtttacctactttattctttcctgtatctccaccaccttacatgaatggcgaagcaaaagattttttatcatgggttattcagtgtaatcaccctgagttttctccagatgtggtttgtgattggcttgaagcgcgtttgccgaatcctgtagatgatgagtcgcagtggaaaattaagacggatttgagtgaaatagagaagttagatgataaggctttggatcagttgattccgccagcgccttaa

SEQ ID NO: 69681 - DNA, 384 bp, Acinetobacter baumannii
atgaaaaagcctattgttctcgtactttcaacattaatgttgggtatgtcggcaactgcgatggccgattcaaatcatcgttgggataactatcacggtaaagaccataatcgctatgaacagcgtcatgattatcgttatgaccaccgcaatgatcatagagctcctgtttggtcacactctgagcgtggaaaccattatggccgatatgtagcctttaagcgcggtgatcgtattcctgtggaataccgtaatagccgttattatgtctcagactggcgtgcacatcgcttatatgcaccaccacgtggataccactgggtgaagactcctaaccaatacttcttggttgactcgaaacatcacatttatcgagttcgttaa

SEQ ID NO: 69682 - DNA, 483 bp, Acinetobacter baumannii
atgcctgatcccaaaaagtttgaaagaacccttgatcggtttggacattatgctgttgaggcttttcattatttagccttatttatcataggctgtatgattgcttggtctgctgctcataccgtttttgaaattctgaccgtcaaaaaatatgcatcaatcgatgacatcttattgttatttatttacctagaacttggggcaatggttggaatttactttaaaaccaatcatatgcctgtacgttttcttatttatgtcgccattacagccctaacacgtttacttatttctgatatccaacatgaccataaagccgaccttgatcaagtcattattactggctcaattcttattttatctctctctattttagttgtccgttttgcttcttggcactacccatctgttatgaaagaaaaacattcaaaaacacctacttctttaaaaacaccccaaccgcaagatgacgagttggcataa

SEQ ID NO: 69683 - DNA, 1782 bp, Acinetobacter baumannii
atgccaatttacaatgctcctttagctgatatgaaattcatcttaaatgatgtatttaaagcagaacaattttggcaggctaatgagaaactcgctcatgtagatgctgcaacagctgaagcaattttagaagaaatggctaaatttgctcagaacgtgactcatccattaaaccgtactggtgatgaagaaggcgctcgctacgaaaacggcgaagtctttactcctgctggctttaaagatgcatttcgtcaatatgcagaaggtggttggattggcttaggtgcagatgaagaatggggcggtcaaggcatgccaaaaatgcttaccgttcttgcggatgaaatgttattcgcgactaacccatctttcatgctttacccgcttctttcagtgggtgcaggtatggctttaagcagctacgcatctcaagagcaaaaagaaacgtatttacctaagatttattcaggtgaatggtcaggtaccatgtgtttgactgaaccacatgccggtactgacttaggtattatcaaaactaaagccgagcgcaatgaagatggtacttataacattacaggtactaaaatcttcatcactggcggtgacaacgatttagcagaaaacatcattcacttggtacttgctaaaactccagatgctcctgctggttcacgtggtatctcgctatttattgtaccgaaataccttgtaaacgaagacggttctttaggtgatcgtaaccatgttggcccaggttctattgaacataagatggggatcaaagcatctgcaacttgtgtgatgaactttgacggtgcgaaaggttacctcgttggtaaagaaaacgaaggccttgctgccatgtttgttatgatgaactacgaacgtttatcaatgggtattcaaggtttaggtgcttctgaatttgcttatcaaaatgctgctcaatacgcgactgaccgtttacaaggtcgtagtgcagctggtgttcaatcaccaagcaaacctgctgacagcattttagtccacggcgatgtacgtcgtatgttgttaaacgtacgtgcaaacaacgaagcttctcgtgcctttgcagtttatgtaggccagcagctcgatatcactaaattctcaactgatgcagcagccgtgaaaaaagccaatgaccgcgttgcgcttttaactccaattgcaaaagcttacctcacagatacagcattccaagcaactttagatgctcaaatggtatttggtggtcacggttatattcgtgaatggggtatggaacaatgtatccgtgatcttcgtattgctcaaatctacgaaggaactaacggcgttcaatctcaagatttaattggtcgtaaaaccattaaatgtggcggtgcattcattgctgaatacatcactgaaattcgtgactttgcaaatgacctagacactgacttgaacttcattaaagatgcaactttagatgctgcaactgaaattgaagcaatcactcagtttattattgagcaagctgctgaaaatgtagagttcccgaactctgctgctgttgattacttacatgcagtgggtctactcagcttctcttatatgtttgcaaaaattgctgccgctgctaaagataaatctggtgatttctaccaaaacaaacttgcattggctcaatactttgttgaacgtatcttgccagatattgatgcacggattgctaaaatcaaagctggttcagacttaattatgggctttagtgaagattactttaccaatcaagcttaa

SEQ ID NO: 69684 - DNA, 1803 bp, Acinetobacter baumannii
atgccacaatacaaagcgcccttacgtgatatgcaattcgttttgcatgaattattaaatgctgaagaacactatgcaaaattacctgactttcaaggtaacgtaagccgtgaattggttgatcaatatttagaagctgcggcagacttctgtgaaaatgaactttctcctttaaaccaagttggcgaccgtgaaggttgtacttggaatgatggtgttgtaactacaccaacaggctttaaagaagcttatcaaaaatacatcgaacttggcttcccgtctttatcagcagaagaacaatacggtggtcaaggcttacctaactctttaggtatcgcaatttcagaaatggtaggtagctctaactgggcatggggtatgtaccctggtttgtctcacggtgcagtacgtacattagaacatcacggttctgaagagcaaaaaaatacttacttaccaaaccttgtttcaggtgtttggacaggtacgatgtgtttaactgaatctcatgcaggttcagacttaggtattatccgtactaaagcagaaccaaatgcagatggtagctatgcaatctctggcgagaaaatctttatctctgctggtgaacacgacatggctgaaaacattatccatatcgttcttgctcgtctaccaggcgcaccaaaagggactaaagggatttcgttatttatcgttcctaagttcaacgtcaatgcagacggaactctaggcgaacgtaatgccgtacgttgtggttcaattgaacacaaaatgggtattcacggtaacgcgacttgtgtcattaactttgaccaagcaaaaggttatttaattggccctgaaaaccgtggtttgaactgtatgttcaccttcatgaacacagcacgtattggtactgcggttcaaggtttatctgcatctgagtcttctttccaaggtgctttaacttacgcgaaagaacgtttagctatgcgttcactttctggtcctaaagctccagaaaaagaagcagatccaattatcgttcaccctgccgttcgtaacatgcttttaactcaaaaagcatttgctgaaggtggtcgtgcacttgtgtacttacttgctcaatatgcagatatcgttgaaaaaggcgaaactgaagaagagcgtaagtttgctgacaacatcttatctttattgactccaattgcaaaagcattcttaactgaaacaggttctgaatctgctaagcacggtgttcaagtgttcggtggtcatggcttcatttctgagcatggcatggagcaaatcgtacgtgatacacgtattgcttgtttgtatgaaggtacaactgaaattcaagcactggacttgttaggccgtaaagttttacaaactcaaggtgctatgcttcgtgatttcactaagattgttcacaagtttgtagaagcaaataaagacaatgctgccatgaaagaatttgttgagccacttgctgcgctgaacaaagaatggggcgacctcactatgcaaatcggtatgcgtgcaatgcaaaatccggatgaagtgggtgcagcggctgtagattacctctacttctctggttacgttactttagcttatctatgggctcgtatggcgcttgtagcacaagagaaattagctgcgggtacaaccgatgttgatttctacaatgcgaaagtaactactgctcgcttctacttcaagaaaattttaccgcgtgtacgctctcatgtagacgttatcgcaggtggtttagacccattgatggcattagatgctgaacatttcgctttctaa

SEQ ID NO: 69685 - DNA, 381 bp, Acinetobacter baumannii
atgaaaatgacggctaaaattgcattattcagtgcagcaattgtaactatgggtagtttggctgcttgtcaatcaacaactcaaccacctaagccagaacatggcatgatgcaagatggcccacgtgatggtcaccaccatcgtatgaaacaccgtgaatttacccctgaacaaaaagcagcatgggaacaacaccgtgcagagcgtaaagctcattttgagcaaattcaaaaagcatgtgaaggtaaagctgttggacaaactgtcaatattcaagttggagataaaacacttgaaggtacatgtaacctccgctttgagccaaaacgtcctcaaccaccagtcaatgcccctgctccagtagcgactcaagcaaaataa

SEQ ID NO: 69686 - DNA, 1557 bp, Acinetobacter baumannii
atgcaaaaaaactttgccaaatatgtagccgatgttgaaatgcaaaagctagatcggcttattactaatctgggaaatgtatataccgtttatcatgattgggggaatgcgattcaggcgcaaatcttacaaattgaaggaacggcagcaccagatgattatgaccgtctttcccagtggtggttacgccgccaatatgatattgccattcagcagcattcttttgatgaacacactctcattaatatttctccagatgcgggaacggtaaataagaactctatttttagtgatgaagaactacgtacgcttgagcaaaacttaccttcggaatatcaaccgtttgaaggtttaagattcccgctaagtgcaaaccagtttcgtccaagcgatgataaaaacaaatcaaaaaaaggaagcctcaaagacattgagacgcaaaatggtaagaaacgttttattgctttaccagaccggctgggcttaagttctcgtttatctttatatgatgccaaacaccagttcgtagtcggtgaacctccatcttcggatcagatgtcttatcgcccgattatggttaatagtcaggtcgtgggttatttaggtctaaaaccagttttagataaagaagatgctttaagtatcaatttcttcagtaatcaaaagcgctatttacttttaatttatgccttaacattactgtcgagtttagttgcagcacttttaatggcaacttattttaaaaagccaattcagcgtctattaaatgcaacaaatgagttaacaaaaggtaattatcaacaccaagttgtgattaaacgaaatgatgagttaggtgatttatctactcaattaaatcatttagctgaaattttacatcagcatgaagaatcacgacgtcaatgggttgcagatacctctcatgaattgaaaactccattggctgttttgcaagcgcagattgaagcgatgcaagatggtatccgaaaggcaacacctgaacatcttgatgccatgatgcgacaagtttcgagtttaaagaaattgacacaagatctggcagacttggctcaggctgatgctcaacaacttaaatgttatttgagttcggttaatccttgggaagttatactgcaagaagtcgaaaatttcagacctaaactcgaacaagcagggttagaaattgaggtggaaggtgaaggcgcttctttattgttagaccgtgatcgatttaaacaaattattgttaacttgatcggtaatagtattcgctataccgaaacaggtggaaagattcatattcatacaaatcaaacgtctcaggagtggactttatatgttgatgacagtccatttggtttaagtgatgagcaattatcacgtttaggtgaacgtttttatcgtgtcgatgattcgcgtacgcgtagtacaggtggaacaggactaggcttagctttatcttgtaaaattgcgcaggcgcttggtggtacactcagttttgaacactcaccattaggtggtttacgttgtgtactgacctttaaaaagcagagttaa

SEQ ID NO: 69687 - DNA, 687 bp, Acinetobacter baumannii
atgaaacatattatgttggttgaggatgaagtcgagttggcgcatctggtgcgtgattatcttgaggctgctggattcgaagtaagcatgtttcatgatggtcaggatgcttacacgagctttcaacaacgtaaacctaatttaatgattctggacttaatggttccaagaatggatggtttaacgatttgccgtaaggtacgtgaacagtcagatttaccgattattatggtgacggcacgtaccgaagaaattgatcgtgtcttaggtctaaacatgggtgcagatgattatgtgtgcaaaccttttagtccaaaagaactggttgcgcgtgtgcaggccgttttacgtcgtttagaacgtaaggctgaaccagagcaaaatgattctttccgtattgataaagcacagcaaagaatttggtatcaacaaaaatctttaagtttaacgccaacagaatttcgcctacttgagttatttttagaacatgtggggcaagtttattcacgtgcacaattattagatcatattaatccggacagctttgatgttgccgaccgagttattgatagccatattaaaaacttgcgtcgaaaaatcacggaagtggccgaaactggtaaccgtcatgagtggattcaagctgtttatggagtaggttaccgcttcgaatatccagaagaataa

SEQ ID NO: 69688 - DNA, 1443 bp, Acinetobacter baumannii
atgcaatttaatccgctttattcatcgctcaatcctaagctttttcatatccagcaaccttctccgcttcgtggtgcaaaggctggacactttaatttagctttagccgaagagttacaatggacagatgaagaaaaacaggcttgggtagaaatttgcagtggtcagcgtaccttctcggaattcccgcctttggctatggtgtatgcaggccatcagtttgggcaatgggccggtcaactaggcgacggacgtggcttactcattgcgcagattcttaataaaaaaggccaaaccatagatttacatttaaaaggtgcaggccctacgccctattcgcgtatgggagatgggcgagcagttttacgctctgttattcgtgaatatttagcaggacatgctttaaatgctttaggggtggcttctagtcacgcagtaggttttacaagctccactcaaggtgtacagcgtgaaaagctagaacctggcgcaatgttacttagaacatctgaatgtcatatccgtttaggccattttgaatggatcaatcaatatgcacctgagctattggccgagttcactcaaaaatgcattgaatggcactatccagaatgccaacaaaaagagcagcctattttagcttttgctaaagctgtgattagaaatacagccattatgatcgccaaatggcagctggtcggttttgctcatggtgtgatgaataccgataacttaaatattacgggttctacactcgattttggtccatacggttttatggaacgtttccgaccaaattggattaacaaccattccgattaccaagggcgttacacctatcaaaaccaaccgagtattgcccactggaacttatggacttggttaaataatctcattccacttgccgaacctgagcataaagagcagttcaaagaagcgttggccgcttgcctagaagaatttgagccgacttttattgagcattacaccactgggttgtgtcaaaaaatggggcttcctcattttcataaagacagtactgaatgcggcttaagctttttgcgtattctgcaagcggagcagctcgattacacccaaagcttcattcgccttcaaaataaagaatacaaagccttacgtgatgactgccttgatattcgagaatttgatgcattccttacgcagtatcaaaacatccgtgaatatcaagatattgatgagcttgatgcaaacatgcagcaggtaaatccaatttatatcttacgtaaccatatggcacagcgagcgattgaagcagcggagcgagatgattttagtgaggttgatcgcttattcaagctactcaaccatccctatacaaagcaaccagatttggaaaaagcggaagatttaggtccgttaccaagcgatgtacctgatgtagcggtgagctgttcttcttaa

SEQ ID NO: 69689 - DNA, 1173 bp, Acinetobacter baumannii
atgacttccgccccactcaaggccccaattaactggaccgctagcattaccttaattggtttaccaattcttgctgcaatcataatcccgatttatgcgtattattatgattttagtgtaagcgcatgggtaagcttattttttcttttagctttaagtagcatggggattactgctggttaccatcgtctttgggcacatcgtgcttatgaagcgtcgttaccacttaaaattcttttaatgattggcggcacatttgctgtacaaaacagtattctgttttgggcatctggtcaccgtacccatcaccgtcatgtcgatgatgtagatgaagatccatattcaattgaacgtggcttttggtatgcccatatgggttggatgatccgcgatcattctccatctgaaccagattttaaaaatgcaccagacttactcaatgacaaactggtgatgttccaacataaatactacgccttgatggtcgtagcggttcacgttggtattttaggtttggttggctgggcaactggcgatttatggggtgttgtacttcttggtggtctattacgtttaatcattagccatcaagttacattcttcatcaactcactttgccacatgttcggtaaacgcccttataccgatgaaaactcagcacgcgataacttctggttagcgattgcaacttggggtgagggttaccacaactatcaccatattttccagtacgattatcgtaatggtgtgaaatggtggcaatatgatccaacaaaatggctaatctggacatgctctaagattggtttagcaaagaacctacgtcgtattccaagctttaatattaaaaaagcagaattggcaatgaagtttaaatatgctgaacaagacttggctatttatggtcatgatgtaaatgccgacattagtcaaatgaagcaacgtattgctcaagagtatgaagcatttacacatactttaaatgactgggcgaaactcaaagaacaagagttacaagcaaagaaagcagcaatggctgaaaagattcacaaaatggatcacaagttaaaagttgatttccaattgcttgaacatcgtttgagtcatcaccgtgagtgtttagaaactttaatgcgtaacattaaaaagaacacaaacgtcgtaccagactaa

SEQ ID NO: 69690 - DNA, 531 bp, Acinetobacter baumannii
atgaaaatacagcgattgagaaaaaagaatagcattgatattgcaaggaaattgccattgaaatgtcttttcatcgcaatcagccttgtattggcagcatgtcaaagcacgccgcaaccaaataatcgcaaaggccaagtaaaaccaacacatcgtgtacaaacgccagttgtgaaaaagaaagtgagtccagatggtgttcaagatatagattggcaaattacccagataaatggtcataaggcaaaattctttaaccagtggccgactctttcattgaactctacagtcaaaacagtaactggtcatacaggatgtaatcgtgtttttggacgatatacttttgatttcagccaaaagaaacttgatatggaagttaacgcaggtcattcgagttgtgatggcgcgttggctcaagaagcagaattggtcgattctttacaacgtattaaacgcttccaattggtaggtaataccttatatctacttgatcaaagcggtcagcgtttgattcaggccgagaaaaaataa

SEQ ID NO: 69691 - DNA, 720 bp, Acinetobacter baumannii
atgcgcattattggtcatcgtggtgcacgccgagaagctcctgaaaatacattaggtggttttcagcacattaaaaatttaggtattcgtggtgtcgaatttgatattcgtcagctgcaagatcaagagttggtcatcattcatgatgatagttttttgcgcacggcaggtgtcgaccagactgtagagcaatcaacattggctcaagcattaacatttgatcatcgtcaaaattggcctaactggccaacctctgaaccaacccctactcttacaggcgttttaaatttacttgataactttgaccatattgaagttgaagttaaagctgtaagagatatggcattagcagaaaagttaattcaaaagcttgagactgagttacaaggtttcgagaaagtcgtaaccatcacaagttttgatcttcaaattctaaccgctttacgtgatatcaactctcaatttaaacgcggattgttagttgaacttccggttggagcaacggcgattgaacttgctcatcaatatgggtgctgtcatattggctggcatgatcaacttgcaacagatgaaatgattcaattgtcgcatcaagctggtttgaacattagtgtctggacagtgaacgatgtagaaagagcaaaaagactacgggatttagatattcagggcttaattacagatattccaaccacaatgcttgaaactcttcaaatataa

SEQ ID NO: 69692 - DNA, 579 bp, Acinetobacter baumannii
atgggacaccgtttaagcaaaatctatacacgcacaggcgattcaggtaccacaggtttaggcgatggctctcgtgttgctaaagatgatctaagaattgcggcactgggtgatgtcgatgaactaaacgccattattggtgtgctccgtgcacaaattacagctagccaagtggctaataaagctgattgggacaaaagcttaagtctgattcaacattggctttttgacttaggcggcgaagtttgtattccaaattacaatttgcttcagcccgtttgtattgaatttcttgaaaaagaaattgaccgtatgaatgaagatttgcctatgctgaaagaatttattctaccttctggttctttatcttgcagttatgcccatcaagcccgtgtcgtttgccgccgtgcagaacgatcactcatgtcagtacaaactcgcgatcaaaatattcaagccactgcacttcaacttttaaatcgtctatctgactggttatttgttgcatcgcgtgctttacagcgtgctgaaggtggacaagaagtcctttggcaaaaaaatattaatgagatgatttaa

SEQ ID NO: 69693 - DNA, 1872 bp, Acinetobacter baumannii
atgtctaaatcttttcaacctactcgtctggtaggggctatcgctattgcgatggggtgttcacctgttatttttgctgaagatgcaacagatgcaactcagcttgacccaattgttatcactgcttcaaaaagtgctgaaaaagcaagtgaagttccagcgcgaattactgtgattgatcagaaaactattcaacaatcaccgcttgctgacttaggtcagctcttacagcgtgatgctggactacatgtcctacagcaaggtggaatgggacaaaactcatccttatttattcgagggacaaattcaacacatagcctttttttaaaagatggagccagcctcaatactgctttggatggtggagcaagcattccatatattgatttaagtgatgctgcgcaaattgaggttttaaaaggacctgcatccgttcaatacggtactgatgcaattggtggcgttattaatattcgtacaattcctccaactcaacaaaaattatttacaacgactgaagttggtgaaaacaaaacctataaatccttaattggtacagatattgtttctaatgaaggagtatatctccaagtaagaggccagcgacaagaaagtgatggtaccactgttacaaataaatcagatcaaaaagcaagctatgaccaaaaaggttatagtgctaaaattggttatgaattagatcaatatggtataaatacaagtataaacgaaaataaagggacaaacgtttactacggtggttcccaagattttttgaatcgtctaatcaataccaatgcctattatcaaatttcaaataatttaaaaatcaatgcaagatattctaattttaaagatgaactaacaggaaaaagctctctctattactttgatacagatcgcaatgaaggtgatttaaatctcaaatgggattttaacaaaaatcaaaatctattaataggcgcatctattaacaatgccgatgttaaaagtcttgcaatcaaaggacaaaagcaaagtctcgactcaaatggatattatatccagcaccaatttaacagctcaaatggcattcatactcaagcaggcttaagagtagaagaaaatgaacaatttggaacacatacagtaggacaacttgcaggtcgtattcaacttaccccactcactagtatttatacaaatgttggcacagcatttaaggctccaacaggtaatcaattatattacttgtcagaatcagagtggaagggaacaacttatattacaacaggtaatccaaatttaaagcctgaagaaagcatatcttatgaggttggaatagatcaaaaattagcttatggaatttcaacttacgcttcggtctatcacacaaaagtaaaaaatctaatacaatatatctcagcctttgactcagtaaataatatatcagcatcaacttatacaaatgtaaataaagcaaaaatgactggtggtgaaattggtctaaaatggaaaaacaatgatttatttttcactacagaatatggttacgtaaaaacagaaaatgacgaaactggttatgaactgatccgtagaccacgtcaaaatctcacattaactgcaggcttagaaaatgaaatttatggtttaagcgtttctttagttgccaagtctcactctaaaatatctgaatctagttcatcagcaatgattccaggatatgcgactattgatttacatgcgtattggaatgcaactccaaatatcaaattatttacaaatgttgtaaatgttggcgatgtaaaatataaaacatcttattactcagcagatgagttttacatcaatggtggccgccttgcatcagctggtgtgaccttaagctactaa

SEQ ID NO: 69694 - DNA, 660 bp, Acinetobacter baumannii
atgagccaatcaaaccaaaaacgtacacgagcaaaaatctgtggaattactcgcaagcaagatgttcaggcagtagttgcagcgggagcagatgcgataggctttgttttttttccgccgagtccaagaaatgtaacagttgaacaggcagaagaattagcaaaactcgttccgccttatgtacaaatggtgggtttgtttgtaaacgcgagtgttactgaaattcaggatgtacttgattgtgttcccctagatgtattacaactacatggcgatgaaactccagaacaatgtcaggaaatagcgtttcattgtaaacgtcgctggtataaagcgattcaggttaaacctgatctggatgtagttgctgaaattcaaaaatatcaggcagctggtgccagtgctgtattgctcgatgcgtggcatcctgagcttaaagggggcacaggacatcagtttgactggtctaaattcccgaaacttgatattccattaatcttggcaggtggtttaacccctgacaatgtcattgacgctattcatactaccggtgcttttgcagtagatgtgagcggaggcgtagagtccgcaaaaggtataaaagaccaacaactcattgaacgatttatgcaaggagtccaacgtggatcagcaaaataa

SEQ ID NO: 69695 - DNA, 1230 bp, Acinetobacter baumannii
gtggatcagcaaaataatgtgattgactatacccaattcccagatgcaaatgggcatttcggtatccatggcggacgttttgtgtcagaaactttaatggcggcattagaagatttggaaaatctctattcccgcatgaaaaatgatgaacagtttttggcagaattcgaccgtgacctcgcctactatgtaggtcgtcctagtccactttattatgctgagcgatggtcaaaagagttaggtggtgcacaaatttaccttaaacgtgaagacttgaaccatacaggctcacacaaggtaaacaacacgattggtcaggcgttattggcaaagctttctggtaaaaaacgtattattgccgaaactggtgcaggccagcatggtgtagcaacagcaaccattgcagcacgtttaggtcttgaatgtgttgtttatatgggcgctgaagacgttaagcgtcaagccatgaacgtttaccgtatgcgtttgttgggtgctacagttgttcctgtacaaagcggctctaaaacgctgaaagacgccatgaacgaagcgatgcgtgattgggtaaccaatgttgatacgacttactatgtgattggtacggttgcaggcccgcatccatatcctcaattggttcgtgacttccagtcgattattggtcgtgaagcacgtaaacagattttggaacaagcaggtcgtttaccagatgcattagttgcctgtgtaggtggcggttcaaatgcaatgggcttgttctatccgtttttaaacgatgccaatgtgaaaatgtatggtgttgaagcagctggttttggtattgaaactggtaaacactctgcgccgttaaatgcaggccatgtgggtgtattacatggtaaccgtacttatttaatgagtgatgaacagggccagattattgagacacacagtatctcggcgggccttgattatccgggtgttggtcctgaacatagcttcttgaaagatatgaagcgcgtagaatacgtgccaattaatgatacagaggctcttcaaggtttccgtgatttaaccaaaatcgaagggattattcctgcacttgaaagctcacatgctatggcgtacgtatctaagcttgcaccaacgatgtctaaagatcagattattattgcgactgtttcaggccgtggcgataaagatttaatgacagttgcacgcattgatggcgtagaaatggtcgagatgtaa

SEQ ID NO: 69696 - DNA, 513 bp, Acinetobacter baumannii
atgccaagcttgtttatggtgatgttgggcgggcgtcatgcacgtgcaaatacagaagttcatgatgtggtcatggttgtaggaaatactttggaagaagtttatcctcaacttaaacaagcttggtttggtgaggctcaaggattacatattgatgcttgggctaagctctcaggagttagttctcaaggacagaactatcaaattcattttacagatgctgctccacaaccagatgatttaaagttatatttaattaatctaggtggatataatgcacgtgaattcggtgaacttcatcgttatgagtttgtggtggcacccaacacggtagttgccaaacaattaggtaaacaatttatagatcggcagtggcaaaaagcacatacagaccgggtcattgatattgatgactgtttagcgatagattgcgtggcaggccgttatattcatttaataaaaggcgattttgctgcaacaatttgggaaaatacatatttgactgtgggatag

SEQ ID NO: 69697 - DNA, 996 bp, Acinetobacter baumannii
atggatttaattcaagaaaatggacagcctcgttatgggcgttttgaatctgtaccgtccaccattcatgtccaacgttatatttataaaactccttatggcaaagtcctaaaaggctggcgcaaacaattaaaatataagaaatttaaattttgtggcattcaacataaacattatagtattggtctggcaattgcagatattggttgggttgggcatggctttttctatatttatgattatgaaacgggacaagtcattgaatggaatgccattcaacctttaggtcataaaactcatcttgatgagcagccattgtttaatcaaagctatttctctaaatcgccttatcaaatagatattcagcatgccaatggtgtgcgatatattcgggtgactaaatatggtgaaatttgcctgagcgcccgtattttctgcgccggaacagatattttaagcttgtgtacaccaacaggtatcaatggttggacctatacccaaaagcagaccactttggctgtagagggaatgttcattaataagcaaaatcaagttgtacaatttgatgaaaagacatttgcttcacttgatgatacttgcggatttttacgtcctgaaacagcttggttctggctctcatgtaacttctgggatgaacaggggcgtcgtattgggttaaatctggcctctggtgttaatgaaagctttggtaatgaaaactgcctatggattaacggagttttatttccgctcacagacgttttatttgaaaaagtaaatgatgaactttggcaaattagttctctagatcaaaaacttaatctacaagtgcatattgggtggtgccgatatgaaaatataaacttaagaatgattggcagtcagttcaatcaatggcaagctaaaattagcggcacgattgagcatgagacaaccgatataatcaattgcaaagaacaatacggtttactagagcaacattatgcaaaatggtaa

SEQ ID NO: 69698 - DNA, 876 bp, Acinetobacter baumannii
atgaacgcacatgtttcttatcaggtcgaaccagtagttcgtaaagatctcgattttcatttaaacgaagcacctcgcttttggtttaacaatgacccttttttaactcgtatgtttgatgcactcagcttaacctttccagatggagagcgttacttcattgaatgtgtgcgcatgttccgcgacaaaattgatgaccctgaactacaaaaacgagttgcggattttattaaacaagaagctcaacacggtattgcacatgacaaaatgaatcagctcatgaaagagcaaggcatgcctgttgaccagttcacaaccacccttaaaaagattttccgctttgaactaacaaaacgttcaccacaatataatattgccatgaccgctgccgctgaacatttaacagcgttaatggcagaaaccttttatagccataaaaaaactttagaaaacgctcatccttatgttcgagcactgtttgcttggcatgccattgaagaaatggagcaccgcgatgtagcttttgatgtgatgagacaggtgggagaagttccagagtcaacacgtcgctttgtgcttgttttaacaaccgtactcatgttcggttttacgctttatcgtaccaatatcatgttgaaatgtgatggctttagtccaagagaaagactcttgatgaaccttaaaggtttaccttggttctttggcaaaaatggcacattaacagctatgaaaaaacaatatatggattggtttaaaaaagattttcatccaagccagcatcctgttattcgtcagtatcccgtttggattgaaacactcgaaaagacaaatgaccctattgcagcgggtgaagcattttggcaagcaggtttataa

SEQ ID NO: 69699 - DNA, 1050 bp, Acinetobacter baumannii
atgcaagaatttactatctcaaatggttacttctacctttggaatacgtatttaaaagaaaagggaatagattggcagacacttaatttaagtgaaattcaaacacgtcaagtccaaaatattttatccgcttctatagatgctcaatcttctttagacctttttattgaacttttagagataactgaaacgcgattacatgtgactaatttggctttagagatggcagcctgtattacccctgccaactttggggtcttgggttatatggcgtccagaagtgataccttaggtcaagtggtggagtatattgcaaagtttcatcgtttggtcattgatggtgcacaggttgtccctatacaaattgaacaggatgcctccaaaattcgcctatattggcctttggtcgacgacagtaatattctactaagtgagctgaccttggctgcaatggtacagcttgctaaacagattgcccctttacatgagtttcttttacagcatgtagagttcgtacaccgagcgcgtggggcagtggttcactatcaacgtttctttcagtgcaaattgtcatttgagcgcccttactatgcattaacttttgcaagtgaaagtttaaatgttcgccctcaacatgcagacccaactttagtgcaacttttggtgaaacaagctgaagaagctttagttcagcggaaaatacatgccgatttagttcagcaaatacattggttcatacaggaatactttaagcataagcagcaagcacccaaaatagaagatattgccatcgagctgaatgtttctgttagaagcttgcagcgccaattacaggcattaaacacttcatttaaattaattttagatgctgagcgtatgaaacgctgcgagatattgttaagtcaaaatgaaagtctgactgcaattgccgaccagttaggttattcggatcagtctgcactggcaagagcatataaaaatttaacagggcaaacattattaactcgaaaaaagcaattacagctcatccagaaaaatgcaacgaaatag

SEQ ID NO: 69700 - DNA, 804 bp, Acinetobacter baumannii
atgtcacgtcttgccacccgttttgaaaagctgcagtcccaacaacgtaaagcgcttgtatcttatgtcatggcgggtgatccacagccacaagtaacggtgccgttacttcataaaatggttgcggcaggagtagacgtcattgagcttggtttaccattttcagacccgatggctgatggtccggtaattgcacttgctgctgaacgcgcacttgcggctgggacgaacaccttagatgcgctgaacatggtaaaagagtttcgtgagcaggatcaggaaacacctgtagttttaatgggttatcttaatcctgttgaagtgattggttacgagaagtttgtttcttatgcgaaacaatgtggtgtagatggcttattacttgtggacttaccaccggaagagtcaaaagaatttggtgcaatcttgaaacaacatgatatggaccagattttcttacttgcaccaacttcaactgatcaacgtattcaacacgtagcgaatcaggcaagcgggtttatctactatgtttcactcaaaggtgtaacaggtgcagcgactttggatacttctgaagcggctgcacgtattgaaaaaatcaaaggtatgactaacgttccagttggcgttggtttcggaattagtgatgctgcttcagcgaaagcgatgggtagtgttgcagatgccgtgattgtaggtagtgctttcgttaaatcttttgcaacgttggcagctgatgaagctgttgaacagacggtgaataaagtcaaggagcttcgagcagcgctcgatgagttagtatga

SEQ ID NO: 69701 - DNA, 897 bp, Acinetobacter baumannii
atgaatcaagaagtgaaatcagggaaagttcttagcccttcgacgccatggacacagcgtccagttccaggtattgaagttgcagatgagcaacagactctcaaagcaacatttactgagccaactattgagtgccctgaatgtcatgctttagtgacacgtacagcaatatcttttaatgcgtatgtatgtccacagtgtgacgaacacttacgaatgaaagctcgcgatcgcttaaactggttcttcgacaatgttgtggctgaattaggtcaagagtttagcgcgaaagacccattaaagtttgttgatagcaaaccgtatccagatcgtatgcgtgaagcgcaaactaaaactggtgaaacggaagctttaatcgccatgcaaggtaacttaaatggcgtagatatgattgcatgtgcttttgagtttgactttatgggcggctcaatgggtactgtagtaggtgaccgttttgttaaggcagctgaacttgcaattgaaaaacgtcagccattaatctgctttgcagcttctggtggtgcacgtatgcaagaaggtatgttgtcacttatgcaaatggcacgtacttctgctgcaattcaaaaattaaaagatgcaggcttaccttatatcgtggtgttaacacatccggtatatggcggtgtaacagcttctttagcaatgttgggtgatatccatattgcagaacctaaagcaatgattggctttgccggtaagcgtgtgattgaacaaactgtacgtgaaacactagaagaaccgttccaacgtgcagaatatctgcttgatcatggtgtggtcgatcagattgttcatcgtcatgctttacgtgatactgtatctcgtcttgtatcaaaattgatgaacttaccttga

SEQ ID NO: 69702 - DNA, 1287 bp, Acinetobacter baumannii
ttgaaacaacaagctccactttcaacagactctttagatacatggctcaattattggagccatgttcacgttacagggatcgatcttggtctggaacgtgttattcccgtagcagaaaaattaggcgtgactaaacccaacgctaaagtttttaccgttgctggaacaaacgggaaaggttcaaccacaacaacgcttgcgtctatattaaaagcacaagggtacaaagttgggttgtatcaatcaccgcatatctatcgttttaacgagcgagtcaaattaggtagagttgaagttgatgaccaaagcctgattgatgcttttgtacaagttgatcaggctcgtcgcgagtgtgatttaagcctatctttttttgaagcaaccactttggctgcttttgttatttttaaacagcaacaatgcgatgtatgggttcttgaagtcggtttaggtgggcgtcttgatgttgtcaacgtaattgaccctaatatcgccgtgattaccaatattggcctcgaccatacagattggttaggcgataccatcgaaaaaattgcttttgaaaaagcaggtattatccgacctcatattcctgttatttttgcaggtgagcaatctttgcctcaagcgattcaagataaggcaaatagctcacaagccacgctatacgcgattaatagagattatttttataaactcgccgatgatggaaaacattggtattttgcaagtgaaggaaccactttaaggttgccgcttggtacacttgcaatcgagaatattgcaggagcagttgcggccgtattaaatagcggacttgaaatctcgcaactagcgctagaggagggcattacaaatgcccgcttggctggacgcttcgaagtgcgcgaagttaatggaaaaaccattatttttgatgccggacacaatcctcatggtgttgaatttttgttaaagcaattgcgaaatttcttagaatacaataaacagtacacagaagttgtcgcagtattttcaatgctggcagataaagatataaaatcagtagtcgatttgttgaaacctactgttttacattggaaaattgctgagttgaatgtgccgcgtgctgcaccgattcagcaattgaatgacgccctacaaggccagacaatacaacaatttggcaatatcaaagaggcttttaaatcagcgcttgagcaaacaaataacaatcagctgattttagcctgtggttcgtttcatactttagaagcgatttgggagtatttggaagaatgtcaatga

SEQ ID NO: 69703 - DNA, 1071 bp, Acinetobacter baumannii
atgtcaatgaataacaaacaacgctggatgggtggcgttgttttattaggtggtggtgttttattggcagcattacttctaaaaggaaatgaagaaataaaacaggtagatgttcaaccccaaacttcaacatcaccgaaattacaagctaaaccaaagcaatcagcacaagaagggcagatggtacagctacagccacttgcagttgatgttgaaacagaaaaacgtcttcttgaagaacagcgccgttctcgtgaaaaagctgtagcagaacaagaggctcgtgctgccgaattcttggcaatgcaacaacaggcagaagcggatgcagctcgtaaagctgctgctgaatatgccgcgattaatgcccgccgagctgctgcacaagaaagttccgataatattcctcctgaagtcgcgggtagtgagaataaggcaaaaggacagcaaactgatacaaaaaagtcagtagatccggctaaagcggatgcagataaaaaagctgctgaagcgaaacgcttagctgaggcggataagaaagcggctgaggcaaaacgtcaggcagaagcggataagaaagcagctgaggctaaacgccaagcagaagcagataagaaagcagctgaggcaaaacgtcaggcagaagcggataagaaagcagcagaggcgaagcgccaagcagaagcggacaaaaaggctgctgaagctaaacgtcaagcagaagcagacaagaaagcagctgaagcgaaacgtaaggcagaggccgagaaaaaagctgaagcagagaaagcacgtgagttgcttgaaaatggtgataaaaaatggatggtacaagttgcattggctgctaaccaagcaaatgcagatgctgtagtctctaaattacgtgcaaaaggctataaggttacgacgagcccaaccagtaaaggtatccgtattatggttggtcctgcaaaagatagagatacggcagatactacacgtaagaaaattacttctgacgccagtttaaatatgaagtcagcttgggtgattgactgggtgcctttagatcagcgtaagtcagattaa

SEQ ID NO: 69704 - DNA, 579 bp, Acinetobacter baumannii
atgaaaaatttttcacttattgcatttgcggtctgtttaagtcttcaaggatgtatgcaacacgaaagtattgcccatgagcacagacctcacgattggggaaccttagtttctcaaactcataatttttatcaaattagcaatgatgttttccggagtgaacagcccgatgcagcaatgattcccgaattaaaacaccatcaaatcgggactattattaacttaagagccaaagcatcagatgatttagtctttaaaaatgaagactttaatcttgttcatattccgattaatacatgggcaattgatcgacaagatttattagaagttatgcagcaaatccaacttgccaagcaaaataatcaacgtgttttactacattgctatcatggttcagaccgtacaggagccagcgtcgccatgtatcgaattatttttgaaaactgggcaattgatgatgcagtgaaagaaatgaaacaagggggttatggttatcatattatttggaagaatattgaccgtttatttacccctgaaaatgtaaaatggattcaacagcaactgtcgaatccatcttaa

SEQ ID NO: 69705 - DNA, 813 bp, Acinetobacter baumannii
atgattcataaaattcatcatttaaaatgcggcagtatgtgccctgtatgtgcacctttatttgggcagaaaggctggaaagctgaaattgtttgtcattgtcttttgatagaaactgatcgaggccttgtactgattgataccggatttggcctacaagattatctacacatgcaacagcgccttggttctttagtcaaacggttggggaaaattgaaccgaatcttgagttcagtgctatccaacaaattcagaaactgggtttccatcctaaagatgtacagcacatttttgtgtctcacctcgactttgaccatgcaggcggaatttcagacttcccccacgccactgtccatgtgctagccactgaatacaatgctgcacaactgcctaattttaaaggcaagcttcgttatagaactaatcaatataaacaacatcggtactggaactttgttgagtatcaacaaggtgaaaaatggtttaaccttgaaaaagtaaaaggtttccccctatttcaagatgaaattttaatggtgccattattgggccattctgctggacattgtggtattgcgataaaacaacaaaatcaatggttattattttgtggagatgcttactactcacacctagagctaaatccagcaaataaattaagatctcttagccttctagaaaagacatttgcagaagacaatgaaaagcgtcttattaacctaaaaaaattacagcatctggctcaacatgagccaacgattgagatcatttgtgcacacgatccccatgagcttcggcggtaccaaacatga

SEQ ID NO: 69706 - DNA, 642 bp, Acinetobacter baumannii
atgacattacgattaggcgacacagcccctgattttcaacaagaatcaagcgaaggcactattaatttttatgattttctaggtgatagttggggcattttattttcacacccagccgactatacgccagtatgtacaactgaattgggttatacagcaaaactaaaagatgaatttgaaaaacgtaatgttaaagcaattgctttatctgtagatgatgttgagtcgcacaaaggctggattaatgacattaatgaaactcaaaatactacagtcaattttccaattattgctgacaaagaccgcaaagtatctgagctatacggttttattcatccgaatgccagtgaaacccttactgtccgttctttagtgattattgacccaaataaaaaagttcgtctaatcatcacctaccctgcttcgactggtcgtaactttaatgaagtcttacgtgttgttgactcattacaattaaccgataagcataaagtggctacaccagcgaactggcaacaaggtgaagatgtggtcattgttccttctttaaaagatgaagaggaaattaaacaacgtttccctaaaggttatactgcggtgaaaccttatttacgcctcacaccacagcctgagcaagattaa

SEQ ID NO: 69707 - DNA, 2724 bp, Acinetobacter baumannii
atgttggcaagtctgatcggaggtatcttcggtacaaaaaatgagcgtgaactcaaacgcatgcgcaaaattgttgagcaaatcaatgcgctcgagccgacgatatcagctttaagcgatgcagacttatctgcaaaaactccagaattcaaacaacgttataacaatggcgaaagtttagataagttactccctgaggcgtttgcagtttgtcgtgaggcagcaaaacgtgtaatgggcatgcgccactacgatgtccagttaattggtggtattaccttacatgaaggcaaaattgccgaaatgcgtaccggtgaaggtaaaacccttatgggtactttagcgtgttacttaaatgcattaagtggtgaaggcgtccatgtcattactgtaaacgattatttggcacaacgtgatgctgagttaaaccgccctttatttgaatttttaggtctaagcattggtacaatttactcaatgcaagaaccagcagaaaaagcagctgcctatctagctgatattacctatggtaccaataacgaatttggttttgactacttgcgtgacaacatggtgttttctttagcagaaaagaaacaacgtggtttgcactatgccattatcgatgaagtcgactcaatcttgattgatgaggcgcgtacgccgttaattatttctggtcaaagtgaagattcttcacacctctatactgcaatcaatacgattccaccaaaattacgcccgcaaaaagaagaaaaagttgccgatggcggacatttctggattgatgaaaagcagcgttcagttgaaatgactgaaattggttatgagactgtagaacaagaacttattcaaatgggtttgttagccgaaggcgaaagcttatattcagctacaaatctaaacctcgttcaccatgtttctgcggctattcgtgcgcacttcctattccaacgcgacgttcactatattattcatgacggtgaagtcattattgttgatgagcatactggccgtaccatgccgggccgtcgttggtcagaaggcttacaccaagcagttgaagcgaaagaaggtttggctattcaacctgaaaaccagactttagcaacaactactttccagaactatttccgtctttataaaaagctttcaggtatgacaggtactgccgatactgaagctgcggaaatgaaagaaatttatggtctggacgtcgttattattccgacacaccgacctatgattcgtaatgaccagaacgatttaatctacttaaaccgtaatggtaaatataacgcgattattcaagaaattatgaatattcgtcagcagggtgttgcaccgattcttattggtacggcaacgattgaagccagtgaaattctatcgtctaaattgaagcaagctggtattcatcatgaagttttgaacgcaaaacaacatgagcgtgaagcagacattattgctcaggcaggtagcccgaatgcagtaacaatcgcaacaaacatggccggtcgtggtacagatattatcctagggggtaactggaaagcgaaacttgccaaacttgaaaatcctacccctgaagatgaagcgcgtctaaaagcgcaatgggaacaggaccatgaagatgtattgcaagcaggtggcttgcacattattggttctgaacgccatgaatcacgccgtattgacaaccagttacgtggtcgtgcgggccgtcagggtgaccctggtgtttctcgtttctatttatctcttgaagatgacctcatgcgtattttcgcaggcgaccgtgttgttgccatgatgcgtgcaatgggacttaaagaagatgaagcgattgaacacaagatggtaagccgttctatcgaaaatgcacagcgtaaagttgaagcacgtaactttgatattcgtaaaaacttacttaaatatgatgatgtgaataatgaacaacgtaagatcatttattcacaacgcgacgaaatcttagctgaaaatactttacaagaatacgttgaagaaatgcatcgtgaagtaatgcaggcgatgattgctaactttattccaccagagtcaatccatgaccaatgggatgtggaaggcttagaaaatgctttacgtattgatttaggtattgagctaccagttcaagaatggttagaacaagatcgacgtcttgatgaggaaggcttggttgaacgcatcagtgatgaagtaattgcgcgttatcgtcagcgccgtgcacaaatgggtgatgaatcggcagcaatgcttgagcgtcatttcgttttaaattctcttgatcgccattggaaagatcatttggctgcaatggattatttacgtcaaggtatccacttacgtggctatgcgcaaaaaaatcctgagcaggaatataaaaaagaagcatttaacttgttcgtgaacatgctgggtgtaattaaaactgatgttgtaactgatctgtctcgcgtacatatcccaacaccagaagagcttgcagaaatggaagctcaacagcagcaacaagcagaagcaatgaagctttcttttgaacatgatgatgtggatggattaacaggtgaagtgaccgcttctcaagaagcacttaatgagtcggctactgaacaacaaacgttccctgtacctgaaagtcgtaatgctccatgtccatgtggttctggtttgaaatataaacagtgtcacggcaaaatttaa

SEQ ID NO: 69708 - DNA, 444 bp, Acinetobacter baumannii
atgaaaaaagtattacaacctttatttttaactgttcttgctgtgccaagttttgttttcgcagcagaaacagcttcagcccctcaaactacaacggttgataaagtacttgcggcaaaaggcccaacttcggctcaggctgtagtgaaacaagaaaatacgacggtgattagccctcgtacaggtattcgttacacattgggtaatacgggtaatcgcccaatcattttacaaactgctgcgatcgctccagcaaactctgcaaatattaaccgtattgttgcaagtaacccagctctatctccaaagagtcaagaaaaagcaaaagttgcattaattggtgaagctgctgttgctggtgcggcagcagttgcagcgaataatgtaactgccccagctgtaccaaacagtgttacacctgcaaatcctgcatcattgaactaa

SEQ ID NO: 69709 - DNA, 1311 bp, Acinetobacter baumannii
atggagtcaacctctgcgactgctgctcctgtagtagccaccaattcgaaaacacgggttttgtttgcaagtttagtcggtacaaccattgagttcttcgacttttatatctatgcaactgctgccgttatcatttttccacatctatttttccctgccagtagtggtagtgccgcagtcttacaatcacttgcaacttttgcaatcgcctttattgcccgtcctatcggtgcagcactatttgggcatttaggagatcgtataggtcgtaaagcaacattggtggcagcattgctcactatgggtatctcaaccgtatgtattggcttattaccaacctatgctcagattggaattgtcgcaccgttattgctcgccttatgccgtttaggacaaggattaggcttaggtggtgaatggagtggtgctgttttacttgctacagaaaatgcacctgaaggcaaacgtgcatggtatggcatgttccctcaacttggcgcacctatcggttttattttagcaactggttcatttttacttctaagcgctgctattcctgagcaagcattcatgcaatggggctggcgtattccttttattgcaagtgctgtcttggttattgttggcttatacattcgtttaaaacttcatgagacccctgctttccaaaaggttttagataagcaaaaagaagttaatattccatttaaagaagtggtgaccaaacacacgggcaaacttattctcggtacaattgcagcaatctgtaccttcgttgtgttttatttaactacagtattcgcacttaactggggaacaaccaaactaggctatgcgcgtggtgagttcttagaacttcaactatttgcaaccctttgctttgcagcctttatccctctttctgccatttttgcagaaaaatttggccgtaaagctacttctattggtgtatgtattgctgctgcaattttcggactgtttttctctagtatgttagagtctggaaatacactcattgtgtttttgttcttgtgtactggcttagcaattatgggcttgacctatggtccaattggtactgtcctttcagagattttcccaacctcagtacgttataccggttcagctttaacgtttaacttggctggtatttttggtgcttcttttgcaccacttattgcaactaaacttgctgaaacatatggtttatatgcggtaggttattatcttacagcagcatcacttttatcattaatcgcgtttttattaatacgcgaaacaaaaaatgtagatgtaaataatcagatttaa

SEQ ID NO: 69710 - DNA, 630 bp, Acinetobacter baumannii
gtgttagaaacctacgacccaaaagaagaactttttaatgcctatagccatggcgctggtgtggttatggcagtaattgcctctgtctttttaattataaaaggatcttatctttccactgcccagtggataggtttatgggtatatgcttttagcttaattctcgtgtttactagctcgactctctatcattttgcacaaacacaaaatttacgttactggtataaaaaactcgatcacacggctatttattatttaattgctggaacatataccccgttcttaagcattgctatacctacacaaaaagctcatattttacttattgcgctctggagcattgctgcaattggtacacttttcaagttagtttttattcaccgttttcagaaaatttcgctacttgcttatgttcttatgggttggcttgccgtttttgtaatggatgatatgcgaacctatttaagcaaagatactttgatgttattgattactggaggtttagcttacaccgttggagcattgttttacgcgttaaaaaaggtaagatatacccatgcgatatggcatatttttgtgcttttaggtgcaggtgcacactttcttgctatctattggtacgttgtttag

SEQ ID NO: 69711 - DNA, 420 bp, Acinetobacter baumannii; identical to SEQ ID NO: 66212

SEQ ID NO: 69712 - DNA, 861 bp, Acinetobacter baumannii
atgacagatttttctcgcaatgcactggttgtagaaggtggaggcatgcgtggtgcctttaccagtggtgtacttgatgcttttctacaacaacggttcaacccttttgatttatatgtgggcgtatcttctggttcgaccaatgtagctaactacctggcaggccaacagggtcgcacgttaaccttctatattgatcattcactacgtcctgaatttatcgattacaaacgcttctttaaaggtggtgatttactcgatttaaaatggatgtgggaaattggcgagcaagagcacccgcttgaccagcaacgtctttttgcgagcaaccctgatttttatatggtactcacccatgctaaaacagggcaagccgaatatctccgtgccggcaaagacaacctgttaaatgcacttcgtgcgtctagctcaattccggttttaacccgtcatccggtcgatattatgggtgaaccctattttgatggtggcgttgcagatgccctacctgtccgctggacagcccagcaaagtggtgtcaaaaagctattagttttacgcactcgtccgaaaaactactttaaagcaagtagtcgaggcgaccaattccttgcgaaatatgcttttaaacaccattacggttttgcaaatagtttgcgtaaccgctgtgcccgttataatgcttcagttgaatttgttcgtagcagtaaccctgaacagcaaattttagaggtatgtccaccgcctcttaaaaatatggcagggcgtttaacgacaaatccgaaaaagcttcgttacagttatgaagttggtttgcaaacaggcttacaagccatcgaaaactggaatgcgatgaagtaa

SEQ ID NO: 69713 - DNA, 255 bp, Acinetobacter baumannii
atgtccgataaaaattcttccgaatcagcaattttaggctggaaatttgttctaatcgtcggtgttttaagtgcgatcttccttggctttttctatttagcaatgagtaatgagcctgactatatgccaggtgcacagcgcaaagctcaacagcatgaaatgcagcaaaaagctgagaaatcaacagatcagcaaactcagcatgacaatatgcctgaaatggacatgcaagaacatcagcattcacatcagtaa

SEQ ID NO: 69714 - DNA, 2136 bp, Acinetobacter baumannii
atgagtgcaattcaatacgaaaaaaatgccgacaatattgtcattttgacacttgattcaactggtcagtctgcaaataccatgaatgccgagtttcgtgactcgcttgatgaggtcacccagaaacttaaagcagaaacagaactttcaggtgttatttttcgctcagcaaaaaaaactttctttgctggtggtgatttagatgaactgattcaagttcaacctgagcatgcaactgactttttcaatatggttgagaagttaaaaggtcatctaagaacgattgagacactagggattcccgtggttgcagcattgaatggcacggcactgggcggaggatgggaaatcgcattaagttgccatcaccgtattgcaatcaatgacccgaaaagtaaatttggcctaccagaagttaccttaggtttactaccgggcggcggtggtattgtacgtatggttcgtctgcttggtcttcaaaatgcgttcccatttttaatggaaggcaaacagttcggtgtcgataaagcaaaatctttaggcttaattcatgacacagctgaaaatgaacaagaacttttagataaagcgattgcttggatcaaagccaatccaaaatctcaacagccttttgatgtgaagggttataaaattccaggtggcgatccaaaaactccggcagttgcacaagttcttgccattgcaccagccatgttaaaagacaaaaccaagggctgctatcctgctcctgaagcgattatggctgccgcagttgaaggtgctcaagttgatgtcgataccgccttgcgcatcgagtctcgctactttactcaactagcaacaggccaaatttctaaaaatatgattggtactttctggcacggcctaaatgcaattaagtcgggtgctagccgtcctgctgatattgcaaaatggcaagccactaaagtgggcgtgttgggtgcgggcatgatgggtgccggtattgcctacgccactgcaattaaaggcattcctgttatccttaaagatgtatctgttgaaaatgctgaaaaaggcaaagcttattctcagaaattgctagataaacgcgtttcacaaggccgcatgacggcagaaaaacgtgatcagattttatcgctcattacggccacagcttctgctgaagatttacaaggttgtgacctgattattgaagccgtatttgaaaaccaagagctcaaagcgaaagtcactcaagaagctgaacaatacttagcgcctaatggtgtaatggcatcaaatacatccaccctaccgattacaggtttagcgcaagcaagtaaggatgataaagcatttattggcctgcatttctttagccctgtcgacaaaatgcagttggttgagattattaaaggtaaaaacacctccgcagagacacttgctaaagcctacgactttgtacagcaaattggaaaaacaccaatcgttgtcaatgatagccgtggcttctttaccagtcgtgtgtttggtacttttattcaagaaggtatgcgcttacttgcagaaggcgtccatccagcgcgtattgaaatggcagcactgaaagctggcatgccggtgggaccacttgcgattcaagatgaagtgtctttaactttaaccgagcatgttgcaagtgaaacgcgtaaggcactacaagctgaaggcaaagagttaccgaaaacaccggtagatgaagtgattcataccatgattcatgaattaaaccgtaaaggtaaagctgctggcgcaggtttttatgattatcctgaaaatggtaaaaagcacctatgggaaggcttaaaccgttggcaaaaagatcatgatatctccgagcaagatatgattgaccgtattttgtttgtacaagccttagataccctacgttgttacgaagaaggggtattagagtcagtgattgatgccaatgtcggttctatttttggaattggttatgccccgtggacgggaggagcgattcaattcttaaatcaatatggtattgataaagcaaaaaaacgtgccgaagagttggctgccaaatatggtgagcgcttcacgcccccaacattgctaaaaactaaagccgagcagaagcaaaatattcaataa

SEQ ID NO: 69715 - DNA, 1206 bp, Acinetobacter baumannii
atgagcgaggcttatattattgacgccattcgcacaccacgcggaaaaggaaaaaaagacggctctctttacgaagtaaaaccaatcacattactcaccactctattaaacgaattacagcaacgccatcaactcgatacatctaaagtagatgatattgttctgggctgcgtgacaccaattggtgatcagggcggtgatattgccaaaacagcagcgattgcagcgggctggaatgatgatgttgcaggtgtgcaaattaaccgcttttgtgcttcaggtttagaagcggtcaacatggcagccatgaaagttcgttctggttgggaagatttagtggttgctggtggcgttgaatcaatgtcacgtatcccaatgggttctgatggcggaccgtgggcgttagatccggaaaccaaccttaaatcatcttttgttccacaaggtgtcggtgctgacctcattgcaaccttagatggctatagccgagaagatgttgataactttgccgtaaagtcacaacaaaaagcagcggcagctcaagcaaatggttatttcgatcaatcagttgtgcctgtcaaagatcactcaggtgttgtgattttagaaaaagatgaatttattaaaggcaataccacacttgaagggttagcaaagctcaacccaagttttgaaatgatggggcaaatgggctttgatgctgttgccctgcaaaaatatccagaagcacaaaaagtaaatcatgttcatcatgctggtaactcatcaggtattgtcgatggagcagctcttgttttactggcttcagaaaaagcagtgaaagaacaaaacttaaaaccacgcgctaaagttttggctactgcattagtcggtactgatccaaccattatgctgactggtcctgcgcctgctgcacgcaaagccttggaaaaagctggtttaacaattgatgatattgacctatttgaagttaacgaagcatttgcagctgtcgtgatgcgttttataaatgaacttaatgtacctgctgaaaaagtcaacgtaaatggcggtgcgattgctttaggccacccattaggggcaaccggtgccatgattttgggtacattacttgatgagcttgaacgtcaaaataaaaaacgcggtttagcaacgctctgtgtcggcggtggtatgggtattgccaccattattgaacgtgtataa

SEQ ID NO: 69716 - DNA, 1011 bp, Acinetobacter baumannii
atgagtcgcgatacgattagcatccacttcgtgaatgcggctttgacaggcgtaaagcgccttggcatggatgtcgagacgttactttcacatgtgggtatcgaagcggaactattacgtcaacctaaagctcgaatctcaccagaacaatatacccgttttataaaaatgttatggatggtcacacaagacgaacacgtcggtttcgatgtacaaccgcgtcgtttgggcacttttgccattatgtgtcagttgattattcatgcaaaaaccttgggccaagcccttgaactttcatctcaattttacaaattatttggtgatgaatggtcagtaacactggagcgtgacaaacacgaagcacgtttagtacctctcattccaaaaacattagatccggatcatttcattactgaaagtatgctcatgatctggcatggattggcatcatggctgattgaacgtcgcttaccattagaacgtgttcattttagctatccacgtcctgcacatgcagatgaatatgacgcgttattctttgcgccggttatgcaattcgacgcaccgcgtaccgaaataacctttgcggctgattatcttgacttaccaattcgccaagatgaaaaaacattagaagaattcttaaaagcagcccctgctcagcttttagtaaaattcaaaaataccaattcgttgacttcacgtattcgtgaagtactcaaaagccaaattggtgaagaaatgccaacgctcaatgacgttgcatcaatgttgtatttatctccgcaaactttacgccgccgcctagctgccgaaggtaaaagctatcagggcgtgaaagacgctttacgccgagatgctgcgattcacttattactcaatcctgagttaacacttgaagatgttgctcagcaagttggttttagtgaaaccagtacattccaccgcgcatttaaaaaatggactggtgttactcccggtctatatcgccagctccatggttaccattaa

SEQ ID NO: 69717 - DNA, 1119 bp, Acinetobacter baumannii
atgacgactgcattaaatggacttaaagttctcgatttctcgacgctcttacctggacctttcgccacaatgtatttagccgatatgggggcagaagtcatccatattgaatctccatcacgtccagatctcattcggattatgccgccctatgcaaatgggcaggcgactgcacatagttatctaaaccgaaataagcagtcgatcgttctcgacttaaaagatgctgcaagtattgatctgattaaagccaagatttctgagtttgatattgtgattgagcagtttcggccagatgtcatgcgccgtttagggctggactatgccacccttgcagaaattaacccgcgtttaatttattgttcaattacaggttatggccaaactggaagttataaagatcgggctgggcacgacattaattatttagctttagctggtattgctgggtatagtggccgacaagatagcggtccgccaccgcttggtattcaggttgccgatattgctggtggttcattacatgcagtcattgcgatcttggctgcagtagttgaacgcagccgtagtggtataggtcaatatattgatatttccatgacggactgtgttgcaagtctaaatagtatggcagcttcagccacgcttgccgcacaagttgaacaggctcccgagcaggggatgctcaatggggggattttctatgactattatatgacgcaagatggccgttatctttctatcggtagccttgaaccacaatttatggcaggtttgtctgcagcactagatttacctgtgttattacaaaaaggtgcatcattagatgtgcaagaccgacaggaagttaagcaagccattcaagaaaaaattaaagccaaaacatttaaagaatggcatgaaatttttgcaaatctcgatgtttgtgtagaaccagttttgagtttaagtgaggctttaaattcaccgttagcacaacaacgtggatggattgtgaatgttcctttgcaaaataatacgccagatacagaaccgcaaattgcatgcccaattaagttttcacgttcgcaaatgagatattcctttgtaggtcaaaaacttggcgaagggcagtggtga

SEQ ID NO: 69718 - DNA, 1254 bp, Acinetobacter baumannii
atgaaaacgcataaatctttgatggtttcctgtttatccgttttatcaattactctttttgttcagcatgcacaagctgctgctgcatttgacccaaatggttcttggatgttgggtgattggaacgggcaacgtacagcgttgcaagcacaaggttatgatttttcttttggatataccggtgaatatgccggtattttagattccaaacaaacatctacacacggtagtgcttatacagggcaacttgctttaggttctcatttggacctaggtaaaattttagggtggcaagatacagaagctcaaatcacattaacttatcgtgatgggcaatcgctttctgaacattctccagcattggctgggcaccaaagttctgttcaagaagtgtggggccgtgaacaaacttggcgtttaacagatttatggatcaagaaaaaattccttgatcagaagttagatgttaaagtgggccgttttggtgagggtgaagactttaatagttttgactgtgatttccagaacttggcactttgtggttcacaagtgggtaactgggtaggcgatcagtggtataactggccagttagccaatgggcaatgcgtgtcaaatataacttgcaacctgatttatatacacaagtgggtgtatatgaatataaccctgaaaacttggaacgtggcaaaggcttcaacctaagtacagatggttctcacggtgcaattattccagcagaagtagtttggtcacctaaattgggtgtgcaaagcatgcctggtgaataccgtttaggttattactatagtactgccgatgccaaagaaattgcagattcaactaaaacatctcataagcaaggtgtttgggtaactgcaaaacagaaattattccagccagctgatcaaactgaccgtggtttaacagggtttgtgaacctaactttccacgactcagataccaacaaagttgataacatgcaaaatataggcttagtctataaaggtttgctcaatcaacgtcctcaagatgagttggcacttggtgttgctcgtatccatatcaatgatgattggagcgatgttcaagccaaagaatacgacaccgaatataataccgagctttactatggtattcatgccactaactggctaactattcgtccaaatgtgcaatatgttcgtcatgttggtgcattaaaaaatggtgataacacttgggtaggcggtattaagttctcaactgcattctaa

SEQ ID NO: 69719 - DNA, 2406 bp, Acinetobacter baumannii
atgaatcaaccttcttcaagatcaggtttaacgacttttaccgtaattattattgggttattggcgttattcctgctaattggaggtatttggctcgctacactaggcggttcaatttactatattgtagctggagtcttacttctcattgttgcatggcaactctacaagcgcgcttctgctgctttgtgggtttatgccgcattaatgctaggtactattatctggagtgtctgggaagttggaacagacttttgggcgcttgcaccacgtttagatattttaggtattcttggtttatggttattggttccggctgtaactcgtggaatcaacaaccttggatcaagtaaagttgccttatcttcaactttagcaattgcaatcgtgttgatggtttattctatcttcaatgatccgcaagaaattaatggtgaaatcaagacacctcaaccagaaactgctcaagccgttccgggcgttgcagagagcgactggcctgcttatggtcgtactcaagctggtgaacgttattctccattaaaacagattaatgaccagaacgtaaaagatctgaaagttgcctggacattccgtactggtgatttcaaaacagataatgactctggcgaaacaaccaatcaggttacaccaattaaaattggtaataacatgtttatctgtacggctcaccagcagttaattgcgattgacccagctacaggtaaagaaaaatggcgttttgatccgaagcttaaaacggataaatcgttccagcatttaacttgtcgtggtgtaatgtattacgatgcaaacaacacaactgaatttgcgacaagcttacaaactaaaaagtcgacttcaactcaatgtccacgtaaagtctttgttccagtcaatgacggacgtttagttgctgtaaatgctgacacaggtaaagcatgtactgactttggtcaaaatggcgaagtgaatttacaagaattcatgccatatgcttatccaggtggttataacccaacatctccaggtgttgttactggttcaacagtggttattgccggttcggttaccgacaactattcaaataaagagccatcaggtgttatccgtggatatgacgtaaacactggtaagcttctttgggtatttgatactggtgcagcagatccaaatgcaatgccaggtgaaggtacaacctttgttcataactcaccaaatgcttgggcacctttagcatacgatgccaaacttgatatcgtttatgttccaacaggtgtaggtactccagatatctggggtggtgaccgtaccgagttgaaagaacgttatgcgaactctatgttagcgattaacgcttcaacaggtaaattgatttggaacttccagacaacccatcacgatttatgggatatggacgtaccgtcacaaccatctttggcagatattaaagacaaatctggtaaaactgttccagcaatttatgtcttgaccaaaacaggtaatgcctttgttcttgatcgtcgtaatggtcagccaattgttcctgtaactgagaaaccagttccacaaacagttaaacgcggaccacagactaaaggtgagcattattcaaaaactcagccattctctgatttgaacttggcaccacaagataaattaactgataaagatatgtggggtgccactatgcttgatcagcttatgtgtcgtgtgtctttcaaacgcctcaattacgatggtatttatacgccaccatctgaaaacggtactttagttttccctggtaacttgggtgtgtttgaatggggcggtatgtcagttaaccctgaccgtcaagttgctgtaatgaacccgattggtttgccattcgtgagtcgtttaattcctgctgatccaaaccgtgcgcaaactgcaaaaggtgctggaactgagcagggtgtacagccaatgtatggcgtaccttatggtgttgaaatcagcgcattcttatctccacttggtttaccttgtaaacaacctgcttggggatatgttgctggcgtagatttgaaaactcatgaagtcgtttggaaaaaacgtattggtacaattcgtgacagtttaccgaacttgttccagttaccagctgtaaaaattggtgttcctggtttaggtggttctatttctaccgcaggtaatgtcatgtttgttggtgcaactcaagataactacatccgtgcgtttaacgtaacgaatggtgagaaactttgggaagcgcgtttaccagcaggtggacaagcaacaccaatgacttatgaaattaatggtaaacaatatgttgtaattatggccggtggtcatggttcatttggtacaaaaatgggcgactatttagtggcttatgcattaccagataacaaataa

SEQ ID NO: 69720 - DNA, 1644 bp, Acinetobacter baumannii
atgtatttatataccgatttcgatcagcagctgattaatcaacgagttgctcagttccgcgatcagacagagcgctatttagcgggcaaactttctgaagatgaataccgcccattacgtttgcaaaatggtttatatgtgcaacgttatgcaccaatgctacgtattgctgtgccgtatggcttaatgaactcaaaacaattacgtaaaattgctgaagtatcaactcaatatgaccgtggctatgcacacgtatctacgcgtcaaaatattcagctaaactggcctgcacttgaagatgtgccagaaattttagctgaactcgcaactgtacaaatgcatgccattcaaaccagtggtaactgtattcgtaacacgactactgaccagtatgcaggtgtagttgctggtgaaattgctgatccacgcccaacttgtgaattgattcgtcagtggagtacattccacccggaatttgcattcttaccacgtaaatttaaaattgccgtttctgcacttgaagaaaaagaccgtgcagcaacagcattccatgatattggtgtgtatatcgtgcgtaatgaagcaggcgagatgggctacaaaatcatggtgggtggtggtttaggccgtactccgattattggtagtgtcattcgtgagtttttaccacgtgaagatttaattgcttatttagaagcagttttacgtgtttataacttacatggccgtcgtgataacaaatataaagcgcgtatcaaaatcttggttaaagcattaacgcctgaagtatttgcacagaaagttgaagctgaatttgaacacacacgtgaaacattaaaaattcagccagaaatcttgaaaaaattagacgaagagttcactccgtttgattatcaagatttagaagatgaagactttacagctttatttgctgagcatccaaaattcaaacaatggttcaatatcaatacgcatgcacataaagtaaagggctatcgtattgttacgatttctttaaaacgtgcaggcatcgcaccgggcgatatgaccactgaagaaatgaacttcattgcagatctcgctgataaatatacgtttggtgaacttcgtacgactcacgaacaaaacattgctttagcagatgtacctcaaaaagatttgtttgatgtatggcaagcgcttgaacagcacaacatggctcgtgcgcatatcggctttattaccgatattattagctgcccgggtggtgatttctgttcacttgcaaatgcgaaatcaattcctattgctgaagcgattacacgccgttttgaagatttagataaagtttatgatcttggtcatttagacttaaatatttctggctgtatgaatgcttgtggtcaccaccacgtgggtaacatcggtattttaggtgtagataaaaaaggtgctgagttctatcaaattacattaggtggtaattcagaccatgatgcttcaattggtgacatcttaggaccatcatttgcagcagaagccgtgcctgatgtcattgaagaagtattaaatacgtatcttgatttacgtactgaaggtgagcgtttcgttgatacatatcgccgtgtaggaattcaaccatttaaggagcgtgcatatgcttaa

SEQ ID NO: 69721 - DNA, 486 bp, Acinetobacter baumannii
atgcttaatacagctctacctgtgctttataaagatggcacgattgcagataatacttatcaaatcattgctgaagatggtgtgattcctcaaggtgacgttgttttaacaacagcacagctcgatcaactggctaacgttcaaggtaaaaaagctttgtatgtgactgtgaacgattcaccagaagatcatacattcccacttagtgaacttgatgcaatttttattgagtttgcaggtttcggagatgggcgaggttattcattcgctgcattattacgtcgccaaggtttccaaggtgaactacgtgcaacaggtgatgtatttaaggatgtcttaaattatttaaaacgttcaggttttgatagttttgtcatcaaagaaggtaaagatgtgcaagaagctgctgctggtttgcaagactttacccatccttatcaagcctcaacagctgtgccaaaagcaagttatcaaactggtgcttaa

SEQ ID NO: 69722 - DNA, 354 bp, Acinetobacter baumannii
atgttcgctttaatttcaaaaataaatcctggtgcttggtggttaatattcgctattgtgacggatgtactttcaaccttttattcggctaaaggcaatggattagttaataaaactgctcaggggattgctctagttttgtatattatctcttttgtatgtgctgctattgctttgaaatatatgcaagctggaattttatatgtgttgtggtctggggtgggggtattggcgaccgcttttctcgcaaagatttttcttgggcagaacattgatgtcgcaggatggattgggattggttttattacagtcggcttaatgattattgcgcaatactctaatatcgatgtttaa

SEQ ID NO: 69723 - DNA, 444 bp, Acinetobacter baumannii
atgcaactcaatcactatctcaattttcaaggccaggcagagcaagcttttaatttttataaatcagtattcggcggtgaatttgccatgctgagccgctatagcgatatgccgcctcatgacggtgtcacgttatcggaagctcaaaaaaatttagtgcttcatgtttccctgccgattaacgaatacactgtactcatggcatcagatgtcatcgatcaattctgtacaccaaatagtgtatttactcagggcaataatcattacattgcaattaaccttgaaaaagatgagcaagaaaaggcaaagcaactttttgatgccttatctgtaaatggcaaaattgaaatgccattagaaaaaacgttctggggcgctttatacggtgcttttactgatcaatttggtgtcaagtggatggttaactgccagttagatacttaa

SEQ ID NO: 69724 - DNA, 1176 bp, Acinetobacter baumannii
atgactgacatcgtaattgttaatggtgctcgtactgctatgggtggttttcaaggatcactatcaggactaactgctcctgaactaggagcagtaacaattaaagaagcaatcgcacgagcaggtttacagcctacagatgtcgaagaagtcattatgggttgcgtattaccagcgggtttaaagcaaggccctgctcgtcaagccatgcgtaaagcaggtttacctgattcaacaggagctgtgacaattaataaactttgtggttcaggcatgaaggcggtaatgcaagcggctgatatgattaaagcaggaagtgctgaaattgtagttgccggtggtatggagtcgatgaccaatgcgccttatgtcttacccaaagcacgtgcgggataccgtatgggccacggtgaaattaaagaccatatgttctttgatggcttagaagatgctgaaactggtcgtttaatgggttcatttgctcaagatatggcaaatacacgtggttatactcgtgagcaaatggatgactttgcaattcgttctttaaaacgtgctcaaactgcgattactgaaggctatttcaaagatgaaattgtacctgttactgtttctacccgtaaaggtgatgtcattgtcgatcaggatgaacaacctttaaatgccaagattgataaaatcccatcacttaaaccagcttttgcaaaagacggtacaattactgctgcaaacgcgagttctatttctgatggtgcttctgcactagttttaacatcgagtgaagttgcagcacagcgcggcttacagccacttgcaaaaatcatagccactgcgtcaaattctcaacatccttcagaatttacaattgctcctgttggcgctattgaaaaagtacttaaaaaagcaggttggaatgctcaggacgttgacctttgggaaattaatgaagcatttgcgatggttacaatgtgtccaattgatgatttcaaacttgatccagaaaaagtcaatattcatggtggagcatgtgcacttggtcaccctgtaggatcgacaggttctcgtattattcttacgcttattcatgcgcttaaacgtactggtggtaaaaagggtgtcgctgctctttgcatcggcggtggagaagcaacagctgttgccatcgaaattctttaa

SEQ ID NO: 69725 - DNA, 516 bp, Acinetobacter baumannii
atgtttaaatctcctggttttactatagttgagctcactataacactcgtaattcttgtgattatgtcagttatagccattcctttataccatcaatttatggcatctgtagaactaaaaaatacgccgcgtatactcacaattcatatacaaaaagccaaatatgacgcaattattaggcataagaatgttgttctttgtccaagttctgatcaattggtctgcaatacgaattgggataaccgcgtaatcagctttgtagataataaccgtaatctacagcatgatttaaatgaagaattattgacctctatagatcttaaccatcactacggttctatgaaattacaacgttttggaaaaaaacaaaatagtattatttttcaaggtaattctggactacccatcgagtcgaatggcagttttatctattgttcttatgaccagcttaaaaactttaaattaattcttagcaaaatgggccatgtgcgcttagaagagcttaaaaattgttag

SEQ ID NO: 69726 - DNA, 1071 bp, Acinetobacter baumannii
atgaaattgagtcgtattgcacttgctactatgcttgttgctgctccattagctgctgctaatgctggcgtaacagttactccattattgcttggttacactttccaagacagccaacacaacaatggcggtaaagatggtaacttaactaacggtcctgagttacaagacgatttattcgttggcgcagctcttggtatcgagttaactccatggttaggtttcgaagctgaatataaccaagttaaaggcgacgtagacggcgcttctgctggtgctgaatataaacaaaaacaaatcaacggtaacttctatgttacttctgatttaattactaaaaactacgacagcaaaatcaagccgtacgtattattaggtgctggtcactataaatacgactttgatggcgtaaaccgtggtacacgtggtaactcagaagaaggtactttaggtaacgctggtgttggtgctttctggcgcttaaacgacgctttatctcttcgtactgaagctcgtgctacttataatgctgatgaagagttctggaactatacagctcttgctggcttaaacgtagttcttggtggtcacttgaagcctgctgctcctgtagtagaagttgctccagttgaaccaactccagttgctccacaaccacaagagttaactgaagaccttaacatggaacttcgtgtgttctttgatactaacaaatcaaacatcaaagaccaatacaagccagaaattgctaaagttgctgaaaaattatctgaataccctaacgctactgcacgtatcgaaggtcacacagataacactggtccacgtaagttgaacgaacgtttatctttagctcgtgctaactctgttaaatcagctcttgtaaacgaatacaacgttgatgcttctcgtttgtctactcaaggtttcgcttgggatcaaccgattgctgacaacaaaactaaagaaggtcgtgctatgaaccgtcgtgtattcgcgacaatcactggtagccgtactgtagtagttcaacctggtcaagaagcggcagctcctgcagcagctcaataa

SEQ ID NO: 69727 - DNA, 159 bp, Acinetobacter baumannii; identical to SEQ ID NO: 42394

SEQ ID NO: 69728 - DNA, 1206 bp, Acinetobacter baumannii
atgggcacacaaaagatattaaacgaagaggcacaatatggtgtccccgttaaaattttcactcaagacatagatagtgaaagtattgaacaactcaagaagatggcacaactgcaatttatatattctcatattgctgttatgcctgatgtgcatgttggaaaaggtgcaactgtaggcagcgtcattcctactaaacatgccattattcctgctgcagtgggtgtagatattggctgcggaatgaatgctattcgtttgagcctgaaagcttcacaacttccagataacttaagtcgcttgcgggacgccattgaacggaaagtgccggttggatttgctttgcataaacaagtcaaagcgaaagcttctagcattattccacttgaaaaacgcttagaacctattattaaaaagcatccgggtcttgtccgaatgcttcgtcagtttgaggcaacatggcaaaaacagttgggcactttaggcggcggtaatcactttatagagttatgtattgatgaaaatcaagatgtatgggtgatgctccattcgggcaaccgaggtcttggtaacgtcataggtacttattttattgagttagccaagaaagaggcacaacatcgctttgggcacgtgcctgataaagatttaagttattttgctgaaggctcgcaaagctttaatgattatgtagaagcagtagagtgggctcaagaatatgcttttgaaaatcgtaaagaaatgatgcgattaatattagaagcaattcgccctcttctaccttcttttcaaatgacgaaagaagcaatcaattgtcaccataactatgtgagtcaagaaacacactttggtgaaaacctttttgttacaagaaaaggggcaattagagcaggtttagatgagttaggaattattccaggctctatgggagcacgctcgtatattgttaaaggtaaagcaaaccctgaatctttttgttcttgttctcatggagctggccgcaaaatgagccgaagcaaagcaaaagttctttttaatcagcaggacttgattgaacaaacacaagggattgaatgccgtaaagacagtggtgtagtcgatgaaattccaagtgcctataaagatattgatgaggttatagccaatcaggcagatctcattgaagtcgttcatactcttaaacaagttttatgtattaaaggttaa

SEQ ID NO: 69729 - DNA, 1461 bp, Acinetobacter baumannii
atgagcgaaacacatgctcctgaaaaactccagcgtaagcttggggctcgtcatctgaatatgatcgccattggtggttccattggtacaggtcttttccttgcttctgggtcaaccattgcaaacgcaggtccaggtggggcgttactcgcctactccctcattggtattatgatttactttttaatgaccagtttaggtgaacttgcgacacacacaccaacatccggtgctttctttacctatggaagccgctatgtcgaagaaggttttggtttcgctttaggttggaactactggtacaactgggcaattacggttgcgtttgaactcgttgccgtacagtttattatgaaattctggttcccagatgttcccggattctattggagcgccctctttctcgtcattatctttatgattaatgcgatgaccgtaaaaggatttggtgaaagtgaattctggttctccatggttaaagtaattgccattgttgcctttattattattggtatcgccatgattattaagattatgttgacaccaggagtagcaacttttggcaactggacttataaagaggcaccattcgtaggtggtttacaagccatgattggggtagccatgattgccgggttctcatttcagggaaccgagatggtaggtgttgcagcgggtgaatcaaaagatccgaagaagacgattccgcttgcaattaaacagattttctggcgaattttattattctatatcttgtgtattttcattatcggcaccctaattgcctatgatgatccaaacttattacaagcagcagcaacagaaaatattgctctttctcctttcaccttactttatgaaaaagtaggttttgcttttgctgcaagcttaatgaatgcagttattttgactgctattttgtcagcaggtaactcgggcatgtactcttctacccgtatgttatttgatatggcacaacaaggccgtgcaccaaaatggtttgcaaaactcgataatcgtggtgttccaatgaatgcgttatatgcaactacattcattgctgcattctgtttcttaacgacttttatcggtgaaaagcaagtctttaactggctcctcaatatgtcaggaatgtgtggtttcattgtctggttaggtattgcaatttcgcattatcgtttccgtaaaggctatattgctcaaggttataaattagaagatcttgcataccgcgctaagtttttcccattcgcaccttggtttgcctttatcctctgttctgtcattattttaggacaaaactaccaagcggttttaggcggtaaaattgactggattggcttactttctacttatatcagcttacctttattcttagtaatctggcttggatataaatggaaaaataaaactaaattaatcccttacgatcaaatggatgtaaaaccagagcaagattaa

SEQ ID NO: 69730 - DNA, 1014 bp, Acinetobacter baumannii
atggaccctagaagtgaagtgatattaagacaacaagactatttaaaaggtagggtcttgttaattaatgcaccgaatgacgccctagtcagtcaattaccaactgagattgatgcatcagtctggacatggaattatgctgactatcagggttttgtaaatgcaggcgcaacagctcatttctcggttgagtttccatcacaagaatttgatcaggctataatttttgttccaaaatcaaaagagcttttaaactatatattgcatgtagtgatgagccatctgaaaattgaccaatcagtttttttagtaggtgaaaaaaaaggtggtgttgaaagagctgccaaacaactacaaaactttggcaaaatacttaaacttgatagtgcccgacattgtcagttatggcatttaaaaattgagaaaattgaaaagatcaaacctcttgaaagctggttaaaaacctatactgttcaagtaaatgagcaagaacttaccatttgtgccttacccggcgttttcagccaaactcatctagatgtcggaactgctgttttactcccttatctaaatcaggtgaaatcaggtagaattgccgacttcgggtgtggagctggaattatcagttgttatttggcaaaagcaaattcaagtaatattatccatgccctagatattgatgccttcgctttacagtcaacggaaatgacttttagtcgaaatggaataggttcagaccagttgagattgcagcctgttacaggaattgcagacgccccaacagaacttgatgccattgtcagtaatcctcccttccatcagggtattcataccaactatgatgcaagtgaaggactctgccagaacgctaaaaaacatttaaaggcatcaggtgagctatggattgtagcgaaccgttttttaaactatccgatcttaattgagaagcactttggtcagtgtgagattaaaactgatcttcaaggctttaaggtgttatatgcctgtgcataa

SEQ ID NO: 69731 - DNA, 1359 bp, Acinetobacter baumannii
atgtccaatcaaccatcacaagaccgtcttgacctcgtttatgggctagatgaccgaccaaaaccgttcgtggcttttttggcagcctttcaacatttgcttgcaattattgtcccgattgttactcccgggcttctaatttgcttagcactaggcgttccacgaaatgaaaccaatatgattttatcaatgtctttggtcatttcaggaatcgcgactttcttacaatgtaaaaaagttggtccgtttggtgcaggcttacttattgttcaaggtacaagttttaactttattggcccgattatcggtattggcagtgcaatggttgctgcaggtacaccagtcaatcaagttatggctgctatttttggtgttgtaattgcaggttcatttattgaaatgggcgtatcacaaattctcccatgggtaaaaaagctaattactccccttgtgacaggtattgtggtactcctgattggtctaacgctcattaaagaaggtttgattagtatgggcggtggttatcaagccatgcaggaccatacttttgccagtgctgataaccttataatgtcgtgtacggttcttgctattattattgtcctaaaccgtattcgtattgtctggattaaaagttcagctattttaattgctttagtgattggctacattcttgccggctttatgggatatctagacttctctggtctaaaagatgcgcccgtgattcaaattccgacaccgatgcattttggcttaagcttctcatggggcttatttattccaatggcatttatttatttggttacgtctttagaagcaattggtgacgtaacggcaaccagtaaactatcaaaccaacctgtagatggtcctcagtggatgcaacgtattaagggtggtgtgttagtaaatggtgcaaattcactacttgctggcctattcaatactttcccaagctccgtgtttgcccaaaataatggtgttatccaattaactggcgtagcaagtcgttatgtaggaatctggattgctgctttactcattttattaggtctattccctgctgtagctggggtaatacaagctgttccacaagccgtattaggtggagcagttatggtaatgttcggcgctgttgctgcctcaggtattaatattctttcatcaattcatttagaccgccgtgctcttttaattattgcgatttcacttgcattaggcttgggtgttgctcaggtgccacaaattttggagcatctgccagaattatttaaaaatatttttagttccggcgtagcaacaggcggtattgcagcattaattttaaatgttgtactcccagaaacacataaataa

SEQ ID NO: 69732 - DNA, 1836 bp, Acinetobacter baumannii
atgtcagatatcaaaaatctccgtaatatcgcaattattgcgcacgtcgaccacgggaaaaccacacttgtcgataaactacttcagcaatcaggtgctctcggtgaccgagcaggcgagattgagcgtgtcatggactcgaatgcgcttgaaagtgaacgtggtattaccatcttagcgaaaaacaccgctattacttggttagacaaacgtacagatacaacttaccgtatcaacatcgtggataccccgggacacgccgacttcggtggtgaagtagaacgtgtaatgtcgatggttgactgcgtactacttcttgttgactcacaagaaggcccaatgccacaaactcgctttgtgactcaaaaagcctttgctcgtggtttaaaaccaatcgtgattatcaacaaagttgacaagccaagtgctcgtccagactgggtaatcgatcaagtgtttgatttatttgataaccttggtgcaactgatgagcaacttgatttcccaatcgtttatgcatcaggtttacgtggtgtagcgggtcctgctcctgaagagcttgcggaagacatgactccgttgttcgaaacgattgtagacatcgttgagccaccagctgttgatgttgatggtccattccaaatgcagatttcatcacttgactataacagcttcgtaggtgttatcggtgttggccgtattcaacgtggttctgtaaaactaaatactcctgttactgtaattgacaaagaaggcaatacacgtaacggtcgtatcttaaaaatcatgggttaccatggtttagagcgtattgatgttgattctgcatctgcgggcgatatcgtatgtattactggtattgatgcacttaacatttctgacacgatttgtgatccgaaaaacgttgaagcattaccacctttatctgtagatgaacctacagtgtctatgactttccaagtaaacaactctccgtttgctggtaaagaaggtaaattcgtaacttcacgtaatattcgtgagcgtcttgaccgcgaattaattcacaacgtagctttacgtgttgaagatactgacagtccagaccgtttcaaagtatctggccgtggtgaacttcacctttcagttttaattgaaaacatgcgtcgtgaaggcttcgaattaggtgtatcacgtccgcaagtaatcattaaagaaattgatggtgaaaaacaagaaccttacgaaaacgtaacgtttgacgttgaagagcagcaccaaggcgctgtaatggaacaaatgggtcaccgtaaaggcgaaatgaccaatatggaagttgacggtaaaggccgtatccgtattgaagcaactgttccttcacgtggtttaattggtttccgttctgaattcttaaccatgacctctggtactggtattatgacttcaagcttctctcactatggtcctcttaaacaaggtactgttgcgaagcgtcaaaacggtgtgttgatttctatggttcaaggtacatgcttgggctatgcgttattcagcttacaagaccgcggtcgtttattcgctaaaccacagttagaagtttacgaaggtatgatcgtaggtattaactctcgttcagacgatatggttgtaaacccaactaaagcgaaacagttaactaacgttcgtgcgtctggtactgatgatgctttaactttaacacctgcaattgaattcacgcttgaacaagctcttgaatttattgaagatgacgagttagtagaagttactccaaaatcaattcgtatccgtaagcgttacttgactgaaaacgaacgtaaacgtaaccgtgataaataa

SEQ ID NO: 69733 - DNA, 432 bp, Acinetobacter baumannii
atgagtattattcaagaatttaaagaatttgccattaaaggcaatatgatggatttagccattggtgtaattattggtggtgcttttggcaaaatcgtagactcgttagtaaaagatatcatcatgccgcttatcactgtaattactggtggtggtgttgatttctcacagaaatttatcgtgttaggtgcaaaccctaataacttacaatctctagatgccttacaaaaagcaggtatcaatgtattaacttatggtaacttcctgaccattttaattaacttcctgattttggcttgggttgtgttctttatggtgaaattattaaacaaacttcgccgtgataagaatgagccagaagctccagctgcaactccagaagatatccaattattacgtgaaattcgtgatgaattgaaaaaacaagcttaa

SEQ ID NO: 69734 - DNA, 354 bp, Acinetobacter baumannii
atgaatcagctttttgtatatggaactttatgccctaataaagcaaatgctcatattttagagcagattggtggtaactggacaaaagcgagtgtacgaggagtgattcatattttagattggggaccagacaaaggtttaaaggctttagagttagatccagaagcagatagggtagaaggctatttgtttagcacagaaaagttagcagaaaactggcaaatgttagatgattttgaaggctttcaataccaacgtgtgacagcagatataaaattagaatcgggtgagtatgttaaagcctggacatatcaaatcaatatgcaggctaaagcttctcacaattacaagtaa

SEQ ID NO: 69735 - DNA, 291 bp, Acinetobacter baumannii
atgcaaacagcaattgtccgacatattttagtcaaagataaagacttagctgaacagctgaaaaagaagctacaaagtggtgctgactttgccaaacttgccaaacaatactccacctgtaattcggcaaaacgtggtggtgaacttggtgaagtcaaaaaagggcaattggtgcctgtcattgacaaagtagtttttacggctgctgaacgtgtattacaaggtccaatcaaaagccagtttggctatcatctcttagaagttaaattcagaatgactggcttacgttga

SEQ ID NO: 69736 - DNA, 567 bp, Acinetobacter baumannii
atgtcagatattttaccattaagctggtttcaacgagaaacttcggaagtagcttatgatttaatcggctgcgtattatgtaagcgacagcctgatggacaagttatccgctgtacaattagtgaaacagaagcttatttgggcgttcgcgataaagcctgccatagctacaatgacaaacgtaccgcacgaacagaggtgatgtatcgccatggtggtaccatttatgtctatttaatttatggcatgtatgaaatgctcaacattattactcaaacagaaggtgtacctgaaggagtgatgattcgatcagcatttttaaatagtgcttcaactaaaaaagaatataagcttttggctggacccggcaaactgacgcgttatttaggcattgatcggactttaaaaggccagactttgggtgaagaatctggactatggattgaagcagccactacacagccagaagtggttttaacgccacgtattggaattgattatgccgaggaggcaaaagactggcctgaacggtattgctggaaagatcatccatcattaagtcgataa

SEQ ID NO: 69737 - DNA, 2214 bp, Acinetobacter baumannii
atgtccttattacgtttagaccgacttcattactgtattttgatgagtatgggctgtatttctagcccacttgtttgggccgaagacttaaattcagacgttgccaaattgccaactttacatgtggaagcgacacgtactgacaccggttatttacaaacaccagcttcggttttccgaatcgaggcacctcaagtggatagttcttcacaagtaaatttaactgaagttgtgaagggcataccgagtttacagattcgtaaccgtgaaaattatgcgcaagatctacagctatctatgcgtggttttggtgcacgttctacgtttggtgtccgtggtattcgtctttatgtggatggtatccctgcaacaatgccagatgggcagggccaaacatctaatatcgacttaagcagccttgatcatgttgaagttctaacaggacctttttcttcactttatggaaattcatcaggcgggacaattttaacttctactaaagaagggcaagggaaggactcaattgaactcagttattcggggggtagccatgataaaagccgagcaggacttgtgctgcaaggtggggcaaaaggggcgaatgaaccaagttatattattagctcatcatactttgataccgacggttaccgcgaacatagcggtgcagaaaaagtgttaaataatgcaaagctcagctggaatcttgatgatggtagtaaaatcaactgggtaaccaattatgtaaaaatccatgccgatgatccaatggggttagagcgtaaggattggcaagcaaacccaaaacagattgctccttatgtaaaaaaatgggggtttaacgcgcgcaaagatattgaacaaactcaaacaggtataacttggtttaaaccaatcaatgatcagcacgaactgtacgccatggcatatttaggcaatcgccaagttactcaatatcaatctatcccacaaggtcaggtagtagtggaaaatggtaagccagtttatacaggtcaaaagagccctaagcatgctggcggagtcattgattttgaacgtaattattatggtgctgatttccgttggacaggtaaagaactactaccaaataccactgtaagcatcggggttgcattcgatgcaatggatgaggaacgtaaaggctttgaaaattttaatgcggatggtatttatggcgtcaaaggtaatttacgccgtgatgaagacaatactttatggaatatcgatccatatttacaagcttcatggcagttcttacctacgtggcgtttagacacgggtgtgcgttatagcaatgtccattacaagtcaaaagatcattttacttcagggcctgatgagtatgggactgttaacggtgatgatagtggcaaaacggattacgagaaagttttaccttctgctgctttaagttggcaaattttacctgaactcatggcctatgtaagttatgccaaaggttttgaaacaccaacttttactgaaatggcttatcacactgatatttcaaagtcaggttttaactttggtttaaaaccatctacaagcgatacctatgaaacaggcttaaagtcacaaaatcttttaggtgattttactttggcagttttccaaacaaagactaagaatgatattgtttcagcgggaaacttaggggggcgttcaacctttcgtaatgcagataaaaccttacgtgaaggtgtagagtttgcatggaataaaaagttgtggcgagatttaactgcgactgcaagttatacatatttagatgcgacttttgatgcgaacgttcctgaaaaacttgatcaagacaacaaagttctcgcttcagcaattccaacaggaaatgccataccaggtattgccaaaaaccaagcttatgcctctttggcatggcagccatcgcacggtctatatggtggtgtagatgtacagtatatggataaagtatacgtgaatgataccaacagtgacgcagcgccaagctacagtgtaacctcagctaatgtgggttatgcatgggtaatgggtgactggaaagtgaatagctttgcccgtgttgataacttatttgatagaaactatgcaggttcagtgatcgtaaatgattcaactcaaccagttggacgctactttgaacctgctgatggacgtaactggagtgcaggtttacgtgtaattaaacaattctag

SEQ ID NO: 69738 - DNA, 1110 bp, Acinetobacter baumannii
atggcaaaattatttgaaacggttaatttcgattcactacaactggtcaatagaattgtaattgccccaatgtgccaatattcggcaacagatgaaggcgaaattacctattggcatgaacagcaatgggcaaattacgcgttgtctggagctgggctatgtattgtggaagctacggctgtacaggcggaaggtcgaattagttatgcagatcttggcctttggaatgatcagcaacgtgaccagatcaaaactttattgggaaaagttaaaacactttctcctatgccatttggaattcagttagctcatgctggacgtaaggcatctactgaaaagccttggttgggtaaaggccaaattgcaaaagatcagccacatggttggcaaacagttgctccaagtacaagtactttttcggttcatgatgcagcgccacatgctttaaccattgccgagattaaacaaattcaacaagactttgcagctgcggccaaacgtgcagttgaagcgggctttgagttaattgaggtacatgctgctcatggttacttgctacaccaattcttatcgccaattgcaaatcaacgtactgatgaatatggtggctctttagaaaaccgtatgcgtatgacgctagaggttcttcaggcaattaaacttgctgttcccgaaggttatccggtaggggtacgtttatctgcaacagattggatggatggcaatgagcagtgggatattgagtctacggttggtttatcaaaagccttagagcagttaggcgcggcctatattcatgtctctagtggcggtttacatgagcatcaaaatattactattggagcaggttaccaagttcctttcgcggaacaggttaaaaaacatgtagctattcctgtgattgcggtaggacttataactgacccacaacatgctgaacaaattttagaaaaccagcaagctgatgccattggtcttgctcgtgcaatgttatatgacccacgttggccatggcatgctgctgctacattgggtgcacaagtcaaaattgctcctcaatatttgcgttgccaaccacatggcttaaaacagctttttgattctttttag

SEQ ID NO: 69739 - DNA, 924 bp, Acinetobacter baumannii
gtggtttttcaggtaattctaccaattttgattttattattgatggggtactgtagtgtcctcattaaactggtaacacctgaacaaattaaggctctgagtgcatttgttattaaaatttctttacctgcttttttaatccaatctttagccaataagaacttacaagatatttggcaccctgcttattttattgcttatggtggcggctctttaatcttgttttttttggcttttatcatttaccgcaagtattttaaaaatagcctgacacatagtgccgtcatatcgatgggcgcttctatgtcaaatacaggtttcatgggtacagcgattctaaccatgctaatggggagtcatgctgcaatctatatatctttaaccttaattatcgaaaatttattaatagttgctttaatgctcattttggcagaagcgggtttgcatcaacagcaacggcttttgcctttactgaaaaaaacattcattaatttacttaaaaaccctgtaattattgcaattttagttgggctgagctgcattttgctagatattcatctgccttcaaaacttggacaagccttagaacttttaggaagaacagcttcgcctttagcattatttgctattggtggcagcttggttggtattggtattaccgccgtgaatttccaaagtatattgttggctggatttaatgtcatccttatgcctgttgtgattttggggctgttccttttactgccaaacgtgagccaagagatgttatatgctggcactttacttgctgcgctgccaatgccgatcgcttttggtatttttggtcaagcctacggtttaaatgaaagagcattaacccccttaatgattagtaccattattggctttatgggtgtgagtgggcttattgccttgtggtggtaa

SEQ ID NO: 69740 - DNA, 258 bp, Acinetobacter baumannii
atgaaacgccaaggcattgaagctttacaaacaattgcccaaaagggttatgcgcctgcatctatggctttagcaaccatgatggcgaatggcaatatcattcctcagaacttgcctcaagcaaaacagatctttactgagcttgctaaacaaaatgttcctaatgctagagaatctttagcttcggtcgaaaaaattattgctgagaagaataaacaagctgccgccgctcctacgcagccagctcctaaaaaatag

SEQ ID NO: 69741 - DNA, 543 bp, Acinetobacter baumannii
atgaagaaattacttatcgccagtctaattgccatttcaagttcatcaatctttgcagcagacactacgacatctgcagctaaaaacgatgtatttaaacaggctgagcagctatacgcagcaaaaaattatcctgctgcttttcaagaagtccaacgtcttgcacaaacaggaaatgctcaagccatctataacttaggctatatgacacaaatgggccaaggcactgccaaagataatgccaaagctctgaaatattatgaagatgcctcaaataaaggttatgctcaggcgagttacacgcttgcacaaatttatgagactggtgaattaggtgttgccaaagatagcaataaattcagtcaatatattcaaaaggcagcagctcaaggttctgatgatgcaactgtcaaaatagcaaccattttatttgcacagaaaaaacctcaatctcatcaaattgctttacaaaagctagcgcctttgattagaaaaggaaactaccctgctatacaggtcaaagcgctttatgatattagctag

SEQ ID NO: 69742 - DNA, 711 bp, Acinetobacter baumannii
atgaaaactaaacttgctacactcatgttgagtttggcttttttcggttctgctcatgctgatgttaaaacacttgaacaaaatctgaagacaaattatccagacctccctgtaaaaggtgtctatcagtcacctgtcgctggaatttatgaagtctatacaagtggccgtattgtttataccaatcaagatgcaaaatacttttttgtaggcaatttagttgatatcaaacaacaaaaaaatatgacagaagagcgaattgccgaattgggtaaaattgatgttaaaagtctcccattaaatcaggcaattaaatacgtcaaaggtaaaggagagcgtactctttatattttcagtgaccctgattgcccttactgtcagcgtctagaacaaaatatggttggagtggataacgtaacggtatatatattcttatatccactgaccagcttacatccaaatgctgaaaaggtttctaatcaaatctggtgctctaaaaacccttcggaagcttggacaaattatatgcttaaccgtaaattgccagcggctggcaaaagctgtacaagtccaattcagaaaaatattgctttaggccagaaattaaatatagatggcacaccaactctgttcttacaagatggtcaaagaatctctggcgtaccaagtgatgcaaaacagattgaagcattattacagtcagtaaaataa

SEQ ID NO: 69743 - DNA, 723 bp, Acinetobacter baumannii
atgagtctgctcgctttctcctcatatgcattaaacggtgtagatgcacaaaagtttttacaaggccaagtgactgtagatactgaacgtttagctgaaaatgaaacacgctatacagccatttgtgatcttaaaggccgcatccattttggcttgtggctaaaaaagaataatgcagaaagttttgaaattattgtcactcaagatcaagctgaagaattcgcgaagcacattaaaaaatatggtgctttttcaaaaatgaccttaagtgaacaaggtgctgtattcccaaaagttgtgaatggccatactgagttcagctctacagaaactgatatttccgaatggcaaaaacaagccatcatgacaggtcaagcatggattgctcaagcgactgaacatgagtttcagccacaagaattacgtttacatcaacgcgaaggcgtcaattacgataaaggctgttacctaggtcaagaaattgtggcgcgcctttggtttaaagcaaaaccaaaacactggttgcatttagttcaaggtacaggtgatgcacctgctccagcaactcaactgcacaatgatgtagaagtggttaatagtacccaaattactgacggttatattgccttagttgttgcgaaacctgccgcccttcaagagttagggcttcaagttttagatttaccagaagctttaagtggtgatgttgctagaccacaataa

SEQ ID NO: 69744 - DNA, 450 bp, Acinetobacter baumannii
atggcaacaggtacagtaaaattacatcgagtgtttaaggcaccagctgaacgagtttatcgtgcttttcttgacccagatgctttagttaaatggatggcacctcacggttttaccgcgaagattcatagttttgatgcaaaagtagggggctcatacaaaatgagctttaccaatttctcaaccgggtcaacacattcatttggaggtacttatgttgagctcgttcccaatgaattaattcgttataacgaccaatttgacgacgcaaatttaccaggcacgatgcaggtcaccattacattaaaaacagtattggtcggcacagaaatacacattacccaagaaggaatacctgaagttattcctgtggaagcatgctatttaggctggcaagagtctttatctttattgaagttgttagtagaggccgacattccagatcaataa

SEQ ID NO: 69745 - DNA, 342 bp, Acinetobacter baumannii
atggcaggatggtacgaaattacacaagcgaatgatggacaatatcgctttgtacttaaggctggtaatggcgaaattattttaaatagtgagctatataaagcgaaagcatcagcagtcaatggtattgagtcagttcaaaaaaatagtagtgacgatgcgcgatatgatcgtttaactgcaaaaaatgggaaaccttacttcaatttaaaagctgcaaatcatcaaattattggttcgagccagttttatgccagtgaagcttcacgagataaaggcattgaatcggttaaaaacaatggatcttccataaccattaaagacttaacagttcaggcgtaa

SEQ ID NO: 69746 - DNA, 1716 bp, Acinetobacter baumannii
atgcgcgcaagccgctttttatttgcaacgttgagagaaaccccaaacgatgctgaagtgatttcacatcagctcatgttacgtgcggggatgattcgtaaattggcatctggtttatatacatggctgccgatgggaacacgtgtgcttaaaaaagttgatgccattgttcgtgaagaaatgaaccgttcaggtgctatggaagtgttcatgcccgtaactcaacccgcaagcttgtgggaagaatcgggtcgttatgaacaatatggtcctgaattattacgtttcaaagatcgtcacgacaatccgtttgtgcttggtcctacacatgaagaagtgattaccgatttagcacgtaacgagctaaaaagttataaacagcttcctgtaaatttctatcaaattcaaaccaaattccgtgatgagatccgtccacgttttggtgtaatgcgttcacgcgagttcatcatgaaagatgcttattccttccatgcaactcaagaatcattacaagaaacttatgatgtgatgtatgacacctatagccgtattttcactcgtttaggtttagatttccgcccagtacaagcagatacaggttcaattggtggttcagcttcacatgaattccacgtattagctgcaagtggtgaagatgacattgcattttcaactgagtctgattatgcagcaaacgttgaaatggctgaagctgttttagtgggtgagcgtgcagcgcctacacaagaatttaaattggttgaaacaccaaatcaaaaaacaattgctgatgtttgccagttcttaaatgctgaccctaaacaatctgtaaaagccttattggttcaaggcgttgctgatgagaaaggcaatgtacctgtcgttgccctattcttacgtggtgaccacgaactgaatgaaattaaagccgagaagcatcctttagtggccgctcctctcgcgtttgccacagaagaacaacttcaagcatttggcttaactgctggcttcactggtccacaaggtttagttgaaaaaggcatcactgtaattgttgaccgtgctgcatctgttctttctgacttcgttgctggtgcaaatgaggcagacaaacatgctgtaggcgtaaactgggaacgtgatgcacagattactgaaattttcgatttacgtaatgtggttgaaggtgacccatctccagatggtaaaggtacactacaaattaaacgcggtattgaagtgggccatattttccaacttggtactaaatactctgaagctttaggatgtaaagttctcggtgaagatggcaaaccatttacagtaacaatgggctgttatggtattggtgtgacacgcgtagttgcagctgcaattgaacaaaactacgatgacaaaggaattatttggccacaagcaattgctccttttgaaatcgcaattgttccaatgaatgcacacaagtcaccacgtactcttgaagcagcagaagcgctttatgcagaacttcaagcccaaggctttgacgtattacttgatgaccgtaacgaacgtccgggtgttaaattctctgacctagaattaatgggtattccacatcgtattgtgattggtgaaaaaggtcttgatgcaggcacttttgaatataaaggtcgccgtgatgctgaagcgagcaatttaactaaagaagaacttttagctaaattagcgcgttaa

SEQ ID NO: 69747 - DNA, 3099 bp, Acinetobacter baumannii
atgtggtttacccgaattagtgtgaagtaccccgtttttaccatcatgatgatgctcagtctaatggtactcgggttagcatcttggaaacgtatgaccgttgaagagtttccaaatattgatttcccattcgtagtcgtcactacgcaatatgcgggtgcttcacccgaagcagttgaatcggatattaccaaaaaactcgaagatcaaatcaataccatttcgggtattaaacaaattacttcacgctcaagtgaagggctttcgatggtgattgcagagtttaatcttgatacgtcttcggcaattgcagcacaagatgttcgcgacaaaattgctccagttattgcccaattccgcgatgaaatagatacgccgattgtacaacgctacgatccatcatctagccccattatgtcagtcgtgtttgaatcgaacagcatgagcttggctcaattaagctcctatgtagacaaaaaaattgtgcctcagcttaaaactgtttctggtgtgggtaatgtcaatttactaggtgatgctaaacgtcaaattcggattaaggttcatcctgaacaattacaaagctatggtattggtattgatcaggtcattaacaccctaaaaaatgaaaatatagaagtacctgcaggaaccttacaacaaaagaattctgaactggttgttcagattcaatcaaaagtcatccatcctcttggatttggtgatttagttattgctaataaaaatggttcccctatttttctaaaacaagtagcaaccgttgaagatactcaagcagaactgcaatcaagtgctttttataatggaagaacagcggtttctgtcgatattttaaaaagttccgatgctaatgtaattcaggttgttgacaagacctatcagaccttagagaagctaaaagctcaaatgcctgcgggtttgaattataaagttgtcgccgacagctctaaaggtattcgtgcttcaattaaagacgttgttcgcaccattattgaaggagcggtcttagcggttttaattgttttactctttttgggttccttccgatctactgttattacaggtttaaccttaccgattaccttacttggcacactaacattcatctgggcatttgggtttagcattaacatgatgacactgctggccctgtcactgagtattggtttgttaattgatgatgcgattgtggttcgggaaaacattgttagacatacagagctcggcaaagaccatgtcaccgcggctttagagggtactaaagaaattgggttagcagtacttgcaaccacactcaccattgtggcggtatttttaccagttgcctttatgggaggcttaattgggcgttttttctatcagtttggtgtaactgtaagtacggctgttctcatttccatgttcatcagctttacactcgacccaatgctttccgcacactggaaagatcctgtaaagaaaaaagagagtcgactgcaacgtttctttaattatatttctaatttattagatggcctaacgcacatctatgaaaagcttttaaagcttgccttacgctttcgtttcatcacggtcattattgcaattgtttcattagttgtggcattaggcttatcaaaaatgatcggaaccgaatttgtacctacaccagataaaggtgaaattcgtattcagtttgaaacccctgttgattcttctttagaatatacccaagcaaaattacatcaggttgatcagattattaggcaattccctgatgtcgtttcgacttatggagtggttaacagtgaagtcgactccggtaaaaaccatgcaggtttagggatcactctaaaaccaaaacaagaacgtagcgcagacctgacaacactcaacaatgagttccgtgatcgtttacaaagtgtagctggcatccgagtgacttcagtcgctgctgctcaagactcagtgtctggtggtcaaaagccaatcatgatttctattaaaggatctgatctaaatgaactacaaaaaatctcggatcgtttcatggctgaaatggaaaaaattgatggtgtggtcgatttagaaagctctttaaaagaacctaaaccgactttaggtgtacatattaaccgtgtactggccagtgatttaggtttatctgtttctcaaattgcgaatgcgattcgaccactcattgcaggtgacaatgtcacaacatgggaagatcgtgacggcgaaacctatgatgtgaatatccgtttaaatgaaaataaacgtgtgcttccccaagatgtacagaacctatatctcaactcgaataaaaccaatgcaaatgggcaaaatattttagttccattaagcgccgttgccacaacccaagaaaaacttggagcttcacaaattaaccgacgtgaccttgaacgtgaagttttaattgaagcaaacacttcaggacgtccaagtggggatatcggtcaagatatcgataaaatgcaaaaagcattcaaattgccagctggttatacctttgatactcaaggggcaaatgccgatatggctgaatctgcgggttatgcgttaacggcaattaccctttcgattgtatttatttatattgtgttgggttctcagtttaatagttttattcaccctgctgcgattatggcttctttaccattgtccctgattggtgtcttcctggccttattcttatttaggagtaccctaaatctattttcaattattggcattattatgctgatggggctggtaaccaaaaacgcgattttgcttatcgactttattaaaaaagcgatggaagatgggataagtcgttatgatgctattttacaagcaggcaaaacccgtttacgcccaatcttgatgacaacaagtgcgatggtgatgggtatggttccattagctctaggtttaggtgaaggtggtgaacgaagtgcaccaatggctcatgctgtaattgggggtgtcattacctctaccttattgactcttgtggttgtccccgtcattttcacttatctggatgacttgaaaaactttatgctgcgtcaaacccgacgattcatgtcataa

SEQ ID NO: 69748 - DNA, 1119 bp, Acinetobacter baumannii
atgcgcacaacgcatcttaccccttctactttttttaaattaagcttgatcagtctgagtttaatcttagctgcatgtaaccagcaagaagtaccaaaaacaacagcatctgaacctaaaaaaattgaactcattcctcaagatttaattcctgtaaaagaaggctcactcgccgctcaaaccgcttttacaggaactattcgtgcagtactacaaagttctattcaagcccaagttagtgcaacagcgactgccgttacagccaatgtaggtcaaaaggtacaaaaaggccaagttttagttagattaaataatcaagacaatgctgcacgcttagctcaggcacaggctaatcttgcttctgctcaggcacaagcagaacttgcccgtaatttgatgaatcgaaaacaaagattgctcaatcaaggctttattgcccgtgtagagtttgagcaaagtcaggtggattataaaggtcaacttgaaagtgttagagctcaacaagccaatgtggatattgctaaaaaagctgatcgagacggtattattaccagccccatttcaggtgtgattacgaaacgacaagttgaaccgggacaaaccgtttcggttggacaaacattatttgaaatcgttaatccggatcaattagaaatacaagcgaaactacctattgaacaacaatctgccttaaaagtaggtagctctatccagtatcagattcagggtaactcgaaacaattacatgccatactgactcgtatctcacctgtagcagatcaagatagccgacaaattgaattctttgcgagccctaaagaagcgattgattcattaagtattggagcgttcattaacggtattattttgcataatgatagcaatcagggacaaaccattcctttagatagtattcaaaatctgcaacatgatccttttgtatgggtaatacgcaatcaaacaattcagaaagtcaaaattcgagtggttgaacaacgatacaacgaaaatatcgctttagttcagggtttacaaagtacagatcaggtaagtcgtatccagtttgaagattctgatatcaataaaaaagtgacgcttacaaccgaaaaaaataaataa

SEQ ID NO: 69749 - DNA, 639 bp, Acinetobacter baumannii
atgaataagcggatgaaatatgccttttataggaactgcttgtctgtatctataggcattgcctcttgcggagcactgtgtttctcttccccaacgttggctgccaatgcagctcctaaagctgtctggtatcgttattatgatcagcatggtattgcgaatattagtacatccgtaacgccggctcatattcgctatggatatgaagcactcgaccagaatatgcaggtcattaaaagaaatcatccttataattctgaagccgatttaaatcagtcctcacagcgtgcattatcagctcgatatagagaagaagataacaaattaaaaagagcatatagcaatagtaaaactgcgacgattaaaagagaccaagcattattggcaattaaaaaacaaataaattatcagcaggaccaactgagccaattacaacaagacaaaattttatttaagcggcaagaaatggaatattttcgtaagggtgaacaagttcccgaaagacataaaaccttgattgaaaacaatcttatgaatattaataaggttaaacaaacacttgaaatactttcgaaaacctataatcgcactaataaagattatgaaaatattatcgaacgtttaaaaaagcttgaataa

SEQ ID NO: 69750 - DNA, 384 bp, Acinetobacter baumannii
atggaagatgcattccaaaatctgaaagtaatggttattgatgactcaaaaactatacgccgtaccgcagaaactctattgcaacgcgaaggttgcgaagtgattactgctgtcgatggatttgaagctttatctaaaattgctgaagcgaatccgaatattgtttttgtagatatcatgatgcctcgtttagacggttatcaaacttgtgctttgattaagaactctcaaaattatcagaacattcccgttatcatgctctctagtaaagatggtttatttgatcaggcaaaagggcgtgtggtaggttcagatgaatacttgacgaaaccttttagcaaagatgaattgctaaatgcgattcgtaatcatgtaagttcataa

SEQ ID NO: 69751 - DNA, 363 bp, Acinetobacter baumannii; identical to SEQ ID NO: 42360

SEQ ID NO: 69752 - DNA, 537 bp, Acinetobacter baumannii; identical to SEQ ID NO: 42359

SEQ ID NO: 69753 - DNA, 2079 bp, Acinetobacter baumannii
atgggctttaaacttaaaaagaaaagtggcaatcgcggtgctaccggaaaatcgagtgtcaattttattgcaaaaatccagtcaaaaattgagcagtttgccagtttatttggggaaagtgaaaagtccaagcctatcctttatgtagcgctgttatgtttaatatgtgcattaatttcattagcttatctattttataatgtacctcgtcataatcagttaattcgtagtcttggtgagttacgtctgttatctcaaaccatttctaaacaagcaactgaagcaacagagtcgggttctcaagaggcgatcacaaagctacagcaatctaaaaaagactttgatgagaacttacttgaaattgaaaatattcacggtaagtcgaccgatgaatatcaaaaagttgagaaaatatggggtgaggtttcaaaaaatattgatttgatttcatcacatcaacgagttcttaaccagttatatgataccaacatctcgattagtgaaacggttccagagattcaggcagaatataacttgatggtcgaccaaatggctcgccaaggtttgcctagtagtcaggtaattattgctaaaaaccaggtgtttattgcagagcgtattttacgttcgattaactcggtgttaagtggtacggacggaaatgtatcaactagtgactttagtgtcgatattgagacttttggtacctatttaaatgctgaactgaatggtaatgccgagttaggtgttgatcgtattgctgatccggctttacgtgaatctttagaaagtattaagtctgaatatgacaaagtcttaaaatctgctgctgcaacggtattaaaaaatggtagccagattgtcaatgttcgtcaggcttcttctcagattttctctaaatcggatgtaatgttggaaagtctaggacatttatctgatgttgcaagaaagaactggctcaccttatttttaggtgctgttcttattctttcattaggcggactaattttctctgtattcaagttaattacactacgtagtgtgatggataagcaacgtgttgctcgattacaggaagaatatgaccgtaaccagaatgcgattttacgtttacttgatgaaattgccgatttggcggatggtgacttacgttcatatgcaactgtatctgaagactttacgggtgccattgccgactcgattaacttcgcaattgaccaacttcgagatttggtttcacgaattcatgaaacctctcaggaagttgcacgctacacacaagatacgcaaagtattactaaccagttagcagaggcatcagaacatcaggcgcaagaaattgcaggtgcttctactgccatgaatgaaatggcacagtcaattgaccaagtatctgccaacgcttctgaatctgcggaagtagcacagcgttcagtacaaattgcatcaaatggtgcacaagtggtaaatcgttcaattgaaggtatggatactattcgtgagcagattcaggaaacttctaaacgtattaagcgcttaggtgaatcttctcaagaaattggtaacatcgtatcgctcattaacgatattgcagaccaaacgaacatccttgcattaaatgcagcaattcaagcatctatggcaggtgaggctggtcgtggtttcgccgtggttgccgacgaagtacaacgtcttgctgagcgttcagcatctgcaaccaaacagatcgaaacactggttaaaacaattcagaccgataccaacgaagccgttatttcaatggaacaaacaacgacggaagttgtacgtggtgcaaatttggcaaaagatgcgggtattgcactggatgaaatccaaaaagtatcgggtgacttggcaaaattgattgcgagcatttccgacgcagcaaaacttcagtcagcatctgcgagtcacattgcaaccaccatgacggttgtacaagaaattacttcgcaaacaacaacggcaacgtttgatactgctcgctccgtatcagagttggcgaatatggcagagtcattacgtgagtcagtaacggactttaaattacctgactaa

SEQ ID NO: 69754 - DNA, 1092 bp, Acinetobacter baumannii
atgaaagaaatattaaaaactttaactgaagcaatgacgctacctgaagatagctattctgaacaagatactgagtttcttgagatcttcattgaagaaattgaagagatttttgttgatttgcaacctttgataaataaatggatgcagtctgagaatattgctacgctcactgaaattcgtcgtcatttccataccttaaaaggttccggaagaatgattggcgctaaatcttcagctgagcttgcgtggacagttgaagatacactcaaccgggtaatcaaccaaagcttacaattaacgccaactattcagagctatgtgcagttagtatttaagttctatttccttaaattagtagataattttaagcaaaaacgagcacataccttagatttcagacctcttattttattaggccaacaactacaacaacagcaaagtttagagccagctttagaagagcttttacaactttcaaatacgcttatggccgaaacagtgactggtcttgagctagattatattgaacaagattcattagccgagccaatcattcaaactacacatactgaaattgaaataaatctagatgaaaccttgaccttatttatggaagaggcagaagaacatttagccacgatccatcaattcttagatcaagagttacatcagtacgacagttataacgctttaatccgcgctttacatactttgcgtggtagctctgcaatggcacaggtcgaaacaattttcgaggccagtaccaaagttgagcatttatttaaaatactgctgcaagaagagttatcttctcactcggaagaaattttattattacaagaatatcgtgagtttgttcgagatagcttggaactactatctagatatagttcaagtgaacagctcgaagcgagattgcagcaatttaatcaatcttgggatgcatatgttgagcaacatggtgaccgaacagatccgttaatgccttctcatggcttggtatcgcaattattacaattagatgtttctgaattattggatgcagaattagattttgagaagggaattcgtaatgagtttcctgattag

SEQ ID NO: 69755 - DNA, 267 bp, Acinetobacter baumannii
gtgaagctaccggtctactcagtacataacgcaattgatcaacatgcagtcgcattagtgattgaaggggaagatattagccaacgttttgcattaatctgtaaaactatgccagtttctactcgtctgcgtatttctgaaattgtcgatgaaatggatgagcatgaggctgaacaacacccagcagtatttaaatatgtgcgtatgcaacatcaacgctactatatacctaacttagaatatattgaaaaaacacttggtttataa

SEQ ID NO: 69756 - DNA, 1137 bp, Acinetobacter baumannii
atgaaccactcagacactctctcgcttagcttagaacttctacaacagccttctgttactcctattgatcatacttgccaaactattatggctgagcgcttagctaaggttggcttccatattgaacctatgcgctttggagatgtcgataatttatgggctcgacgtggaaccgaaggccctgtattttgttttgctggtcataccgacgtagtaccaacaggacgtttagacgcttggaattcagatccatttgcaccagaaattcgcgacggcaaattatatggtcgtggttcagcagatatgaaaactgcattagctgcaatggtagttgcatctgaacgttttgtagcaaaacacccaaaccataaaggttcaattgcttttttaattacttcagatgaagaaggtcctgctgttaacggtacagttaaagtcatcgaaacactggaaaagcgtaatgaaaaaattacttggtgtttggttggtgaaccatcaagtactcataaattaggtgatattgttaagaatggccgtcgtggttctcttaatgctgtattgaaggttcaaggcaaacaaggtcatgtagcttacccacacttggcacgtaatccaattcatgaagcatcgccagctttagctgagttatgccaaacagtctgggacaatggcaatgagtatttccctgcaacttcattccagatttcaaatatccatgcaggtactggcgcaaccaatgtgatccctggtgctttagaagttacttttaatttccgttattcaaccgaggttacagcagaacagcttaaacaacgtgttcatgaaattttagacaagcatggcttgcagtatgaaattgtctggaatttgtctggcttaccattcttaactccagtaggtgaattagttaacgcagctcaaactgctattttaaatgtgactggtactgagactgagctttcaacaagtggtggtacatctgatgggcggttcattgctccaacaggtgcacaagttttagaactcggtgttctaaacgctactatccatcaaattaatgaatatgttgatgtacatgatcttgatccattaactgatatttatgagcaaattttagaaaatttattagctcaataa

SEQ ID NO: 69757 - DNA, 762 bp, Acinetobacter baumannii
atgaataaaagtattgtagaaattaccgaagttctatttaaagaatggcaagaaaaaagtccactgtttgctgcgagtttaagtcttgatttgggtgggttaagtcaaaactatgatattcgtccgttcactatgcagcacaatgagtctgactatgactttctcacacgtttgtggcgaagtgagggggttagttggctcattgatgaatcagagctttttgtccctcattttactgcaccaatacaagctcaaaaactaagattaattgatgacaataaccaataccaagctttagcgcgtcgtagtattcgctatcacagaagtagcgcaaccgaatatcaagatagtattacaggctttgttgcagtacgaagtctgcaaccgactgccgtacatgtacagcgttggcagcccgatgcgttagcgcaagaagagggtaatggttcagttgttactacccatacacactcagataattttgattcggccactttaagtcttgagcaagcatggcacgtaagccctgcctggatgcaagatttaaaaggggaagatcaggcaaccgcttcaagcagtagccttttagaggctataggtgacgttggaagtgctgatgaaaattttaatataaataatgggggcgaaaaaaaagtagggtgtacgcgaactgctgtatatagaagatctggaaaagctttagcccagcatagaggatgggtgggatattttaggccaattattagtggaaaaaaaatatga

SEQ ID NO: 69758 - DNA, 276 bp, Acinetobacter baumannii
atgttaagcaatttcgtagcgttctctgcattgtatgcaggttcggactttaactgttcgccattaggaccttcttcattatggagtttttggaataaagccaaagctcagacggtgccagagggctatgttttagttcctaaagatattccagatagagttgtcagttgtttagaaaacagtagattccattggggtgatgggactcgtgattattacacccctatttattctttgatggttgaagcagcaagcgaatcgggagctgagggatga

SEQ ID NO: 69759 - DNA, 675 bp, Acinetobacter baumannii
atgaaaaaaatcatatttggtacttttgtatctgtaatgcttactggctgtgtagcgccatcatataacgccacatcaaagattactgagatgacaagccgacctaatattggggaagtagttactgtgggcgttggtgagcaaatgctttatcaaggtaatgcaagtgaggatgagatattagacatcccaaacccgacaaaagttgacttatatcgtttgccagcaggtcaatatactaaaacaggaaataatgagaagggagacttctattcacctgttactaaatctggagctatggttggaaagaacttctttgccgaccctattcaagttcttatggtttcaaaagaaaataaattgtgtgcagtaactgtttttaatgccaaagtttgctctaaagatgctgaattcaaagtaaagaaggttacctcacttcgtgataatacatttcagcaaacgcttatttacagtggaaaaatagggaacaaaattaatgtaggttatcgtgaattctcagggagtttagcgcgtccagcttttaataacgatgttgaatatgatttaagcgaatcaaaggaaatagggtataagggggcgttgttgcaaattattgatgctaataaccagaatataaaatataaagtaataagaaactttaataaggtggattaa

SEQ ID NO: 69760 - DNA, 612 bp, Acinetobacter baumannii
atgcatatccactcggttaaatatgatccatattgggacggtgtgtgggttgtgatgggtgatggcgcctttaataacccgggtacttcagttacatcaaacgtttggtttatcgaaaaccctggcactgctcaacaaaatatgatcagttatgattgtcgcggccaagattggacaaacgagcagcacgtttcagtattcccaatgcaagattgcatcttgttcggctcggatgcggcccctactgggttgtacagaatggcgcgcacaaaggatgttaaagcattccgtgatgttgctgtgccgatctcaactgcgcttagtcactatggttgtggtggatatcaacatcagcactatttgcctgccgctatctacttcggtaaagctggcgagtctacagtaagtttgaacgacaaagtctttttaacttatgacggagtgaatattgttgaaatctacaccgagcctgaaacaagtaacatgccatcaggaaaagtgaactcttttgcttttgcattagataagtactttatttttgaacgtcgtactgatgccagatttgccagtggcaacacttggatcatatctgatattcagtacatgagataa

SEQ ID NO: 69761 - DNA, 495 bp, Acinetobacter baumannii
atgaaagtattactcgatatcttatttgcttttgcctttttatatccgttgttgatggcttggacatggatggtaggaggtctctggtttttctttaaaagggaatatcatgagcagcaactgcctgagccatcaagtgaagggtgcagtattattattccttgctttaatgaagaagctcaggtccgacaaacgattcgttatgcattacaaacaaaatatccgaattttgaagtcattgccgtaaatgacggaagtagtgacagcactgcagaaattcttgatgaactggcagctcaagatgcccgattaagagttgtgcacctggcagaaaaccaaggtaaggccgtagctttaagatcgggagtgttagtaagtaaatacgaatatctagtttgtattgacggagacgctttattacatcctcatgcaactcgtactttggcttatgcagccttttttaaattttccaagaattggtgctgtaaccggtaa

SEQ ID NO: 69762 - DNA, 198 bp, Acinetobacter baumannii
atgtcgcaagtcatgatcatggtttcggaagcaggaaagcttgagcattcgtgttatttgcttgctgatgtaaataaaggcggtaaagttttaaaggttttcgattacagcggcaatcaattaccaataaacattgatggaaccgtgacatttaatagacgccgctgggaaatccccattaaagtagatttaaaataa

SEQ ID NO: 69763 - DNA, 4113 bp, Acinetobacter baumannii
atgtcagtgccagagcaaataccatatgtcggatatgtcgcaaatgggcagacgactgaatttccaattacttttgatcttcatgatcctgagtatttgatcgtaacagtgaataaagaaattcctgttgttgggacatatacagttgatatgaatgctctaaaagtagtgtttgcaactgcaccagcagagggaacacaagtagagttgtatcgagaaacagaactaaaccgagatacaaattaccaaaaatatgataactcattccgccccgaagcggtgaattatgactttgataagatatggcatgtcttacaagaacaggacatgatcgatgctgaattattagcaagattaaaaggggaaattgagtggcgacggactcacgatgctaacttcgatgaattagcaaaaatgcgagatgcccagattttttcaggtttaaagcaatatctagatactatagttgctgcatcaacccctaatatctttgatggaattacagcgggtatcgtttttgctttggataaaaaaagtgtacaaacccatcttgaagatatttaccaacaactctcaagcataaataatgagactgattcaaaatttttggcggaaaaagaaagagccgaggcagcggaagccgatcttgctaactctattcaaaaggaagctttgcgcgctacaagtgctgaatcgcttttagatgcaaagatcaatgcaaatggtgtagggaatagagcctatctcacctatgcagcaatggatgcagataaggctaatattccagataaatctaaagtaacagttacgaatgatccggacagcacgaagaatggtgactatcaatattcatccgctggtggtggtgtatttaccaagtctagctatgatcctcttagtcaatctaaagcctatacagactcagttaccaatataaacttatatcgtggcaacagtgcacacaacacaccgtttaactcctcaacgtttgataaggcaaccacgaagctagattacagtacttctgaaatccgttataaaaacctgaatgtcacaggtggaatttctgtcccttataatggagagttgcgtactaaagttcaggtttgggttaaagtcaaaagtgcagccttaaatgctggaacaatgcggtttttaacgcaggcaattaagaacgatggctcaaacttccaaagtgtttacaccaatattcctgatggaactacaggctggtttaagttaacagaagtagcattatctgaagcaaaccgtgcagtatttaaccgtgtaaccgttacaccacatgttgttagtggttcagatataacagttgaagatttctacattggtgaatccgttccaacaattccatttgtgcgtgttcgtgaacccttagatcgaatcattgcgcgcactgcaactcgtaagagcttattgccaacatggaagtcttatccagctgcaactggtgttaccattaatgaaaatggggacatcactattgcgcctggtatttcatacccaattacctttacagtagaaaatgcaagtcgcattaattactgtggctatattgaccaagtggcaactggtgattgtcgcttgttcttccgaggctatcgagctgcaacgccaacaacattccatgatgttccgtacttccctacatctatcggtggaatagagtttctaggagcagttcagtttgatgctttagtatcaagtgttcaattgacaattaacaactatagcactacagactcaatcacattacggtcttttgatatctgttatgacccggttgctacaaatggaaagcttaaaattggagaccgtcttgatctaacgaaagtgaagtcagaagtgattcaagcagttgctgcaaataaaccacagaaaaacttttcttcatttcccgattggtctgttgttgccaagtcatctgatggaaagcgttatgcattaaacggtattgcttattctgaaccagtcgctttaggtaatattcaaactgagaaacgttactatgtaagtatgccggattctgttgccacacttggaacgggtactgcaaaattaacgctttatcatgttaaagcagacggaaacagcttgggcggtgtgtcatcaagtattacagcgacagggatgataaatgcttcaattacaacaacagcagaaaccacagcaattttacttagaattgatttgactggtgatgcaaaagttgagcttgggcggcttattatttccgaagtaccttattcatccgaaacagtctttgatgatctttttaaagaagacattactggtacgatgctttcagattgggaatatcctaatttgtcagggttcacaaagtatggtgatcaaacggccgaatatccgatcactgaagatgccgatggtgagaaagttctttcaattcctgttacatcttcgacaattcagtatggtcaaggtgcaaaatttattgtcaatatgccagctgatcagtcaaaacaagtcgttttaaccttcttggctaagagtcagtacgatacaacaaatccaacacggatttggatgcgattgttccgtgaaggcgccactgcagaaatgacagcaaatgtccgaaatatggttattaaccgtgacggatcttggactttgaaccagattcatattcctcatgtttatggggcttatgctgttaagtatgctgaaatattcctattgactgataacacaagcgttgtgcctttgcagttaaagcgtttcattcaaacagtcggaagtcacaatccgtatgttaaatttattaaatacgcaaatgaaaaacccgcaactggtttaagtgatttcttgcgattgaaagatgctttatccgagcaaccgcaaacagttttcagtgttggtcgccaattattccgtccattgaagactgtacagggttcaacatccgattacgaattaattaatggtcagtcgttattgccaaagcgtttatacaaccttagacatattgatacagacggctatttaattgcattcattgatcgtgatgacaacgtctatttaaaaaagggtacggcattatataaaactactgtagatgacttgagctctcgatgtgtttctacatcaatcgttggtgatgaaaatcgaggtgtatttaatagtacgaaccttcctttaatcaatcctaatattcccggacaatggctaagggttacagggaatgggactttagtgtctgtgagtagatcgactgctcattattctatagatggagggcaaaactggattgaggctacaggttatcaaaatacaaatggcgacaactataacgcatggggcgttgattgttctgatgatatcgtcattacttcgggttacaaacttgcagcagaggggcgaggaacagggcgaattaatttctctaaagataatgggaaaacatatcaagtcatcctagatattgagacatcatcttttattgataatgcacgccgcggttcaatgcatatccactcggttaaatatgatccatattgggacggtgtgtgggttgtgatgggtgatggcgcctttaataacccgggtacttcagttacatcaaacgtttggtttatcgaaaaccctggcactgctcaacaaaatatgatcagttatgattgtcgcggccaagattggacaaacgagcagcacgtttcagtattcccaatgcaagattgcatcttgttcggctcggatgcggcccctactgggttgtacagaatggcgcgcacaaaggatgttaaagcattccgtgatgttgctgtgccgatctcaactgcgcttagtcactatggttgtggtggatatcaacatcagcactatttacctgccgcaatttactttggtaaagctggcgaatctacggtaagtttgaatgacaaagtctttttaacttatgatggtgtgaatgttgttgaaatctatactgagccagaaacaagcaatacaccatctggaaaagtaaactctttcgcatttgccctagataagtactttatctttgaacgtcgtactgacgcgcggtttgcaagtgggaacacttggatcatttctgatattcagtacatgagataa

SEQ ID NO: 69764 - DNA, 267 bp, Acinetobacter baumannii
atgagtgagtttaaagtcgaggattgggtcaaaacacaaggacatataggattaatggtgatttacaaggtgactggtgaaaaagccattgtggatgtgatcagcagaacgggtaagtcgattgggctatctggatacaaactatctgagattgagcacgcatcagaagctgaaattaaggcaggccaccgcattgacaatgatatgggcgacgactcctacatagaaaaccacatttcgcctaactgccaatcaaaggatgtttga

SEQ ID NO: 69765 - DNA, 225 bp, Acinetobacter baumannii
atgcataagtacgattggtcaaatgtacctgccgaagttaattggatggcaacagatcaagacggttgggcttacgggtttgttggtcagccaaaaatgagagttggtcttggaatatggagtcctattgagtttgtaatctcaatccctaaagagagcaacccatttaaaggtgactgggaaaaatcattagaacaacgtccaaaaggagccagccatgagtga

SEQ ID NO: 69766 - DNA, 429 bp, Acinetobacter baumannii
atgaaaccagaacagtttattcgtgagtttggcgaaaagaaggcgagagaggttgttgagggggcgccagagtcagcatctttggtcttttattactttgatgaggttaatgatgaattgctaggaccagaatactacagagacaacggttcccagcatttcaataaagaaaataattcatgggggttttgtttagacccgcaaatcatagtaacggaaccgcatgatgcactagtgagtgttgaggacctcaagcgtcttgtggagtctttggatttgatcaagttttatgatggcattgagaaagcaaagttgaagctggcgataggtacttgtctttctggtcgcccaccacatcctcgtgaagttgaattaagacaagccatccgcgaccacgaatcaatatacggaggcggggaaaatgcataa

SEQ ID NO: 69767 - DNA, 216 bp, Acinetobacter baumannii
atgatacagcctactcaatatcaaatcgagcaatcagcaggcatcgaccaagaagttgctcaacacatgatgaaaggtgaaacagaagcagccaaaagagctatggagctattaggtatgtgtgtcagcttctatgagccatgcgctttcactttactgcgccaatcagttttggactgtaaagcagaaatgaacaaggagccctctcatggataa

SEQ ID NO: 69768 - DNA, 774 bp, Acinetobacter baumannii
atggataactacaaaatcaaagttaaagatgaagctgagagcaaagaggctcaggagttgttaaagcagcttggattccaagaagaaggtttaacagatatagacctgccatgctacttggcgacatgggatggtggatatgctgattactatattgaatctttaagtgaaggaaaaaaacgagaagaactcaccatccctcaactccgcgaccttgttgtgttgaagcgtaatgatgtgaaggatgcgactcatcgcgacaagcagcaaaattctatttatttaactagcgatatggtcatttattactggcagggtgaatggtgtaaatcagctattaataaatcaaatgactatgaaaactatattgcgaatagcctggcgcctattactcaaccccaagaccctaccttgattagcggtgcggaggctttgcgagctttggcggatgggaaagaggttgaagggttttcagaagaaaatgaagagtggatacctattgtttatttcagtgtacaagaggttgtgaatggtttgtataaattccgcctcaaacctcaaaccatcaagcttgaacttgagctaccgaagccttttgagcctaaagaagatggatatgtctacatcattgatgactatcaagtttctggatatagaaaatattactttgaagttgaagataataaagaacttagcttcattggtgtatggcacaccgaagacgagatcaaacaagtcgtagcgcaactcagaaagatacgaggtgcctcatga

SEQ ID NO: 69769 - DNA, 207 bp, Acinetobacter baumannii
atgccttacgttaatattaaagttactggtggtgatgaagcccctagcacggagcagaaaaagaaaattattcagggagttactgatttattagtagaagttttaaataagaatcctgctagtacggttgttatattggaagaagtgccaatggataattggggcattgcaggaaaaaccacaacagaacgtcgacaagaaggttaa

SEQ ID NO: 69770 - DNA, 705 bp, Acinetobacter baumannii
atgaaaaagcttgggttaattggtggaattggtccagaatcgactattttgtattacaaaaaattagtttatggattacaggaaaaagttggacacaggttcttcccaaatcttgttatagaaagtttaaatgtatttgatgttttagatttttgcgaaaaaaataaccatgaagggttagtaaaatatttaatgacgggtattaataacctcattgctgctgatgctgaggttattgctttaacaggcaatactcctcatattgtttttgaacaattgcagtctcaatcaaaagttcctttaataagtattgtagagataacaagtcaggaagcagaaaatagaagctattcaaagattggcttacttggtacaaagtttacaatgcaggaagacttttttaaaaaaccatttttcaataaagatattcaggtcttagtcccctcagaaaaagaacaatgcttgattgctgaaaaaatatctaatgagttagaacaaggtattgttttagaaaagactcaaaaagattttctggatattgttaaaagaatgcaagatgaagaaggtattgaggcaatagtattaggttgtacagaacttccattgttatttcaaaatataatgatgccgttacctgttttagatacgcttgattttcatattaaatcattgatagatattgtcctcaaagagggtatccattag

SEQ ID NO: 69771 - DNA, 567 bp, Acinetobacter baumannii
atgtctattgatacccgacaatcccttattaattcagcagaatatatgcttcgttcgagaggatatgctgctttcagttatgctgatttagaaaaaatggttgggataagaaaggctagtattcaccaccattttcccaaaaaagaagatcttggtattgaaattgtcgaagcctatatagaacgttcattactagattttgctaagatcgaacaagatttcccaaatgcatttggacgtctttgtgcttttgcatctctatttagagctgccatggctgacggaatgttaccactctgtggatctctagccgctgaaatggctgtattaccagagacaatgcaagaactaacaaagagatattttgagattcagttacagtggcttgaaaagatcatcacaactggtatcaataatggtgaattatcttctgaaagtacaccctcacaaaaagcgtaccaattattaagtttactagaaggtagtagctttatacggtgggctttaaaagatggactagaacttgatccaaatgtaataggtcgaattgtaggtgtacgtccttaa

SEQ ID NO: 69772 - DNA, 555 bp, Acinetobacter baumannii
atgagtgaaattatcaatggcattgacctcgttgctttccaaaattttgctgagaaagtaagtgagaacccagctatagcgaaagctcaattcaatgtgcaaactcgatgggctggacaaactcgttctgtttcaacagtcaaatcttacgatttatttggtaaaactcatgaacgtaactttcacattgccgcagatgagccaacagaaattctaggaacaaatactgctcctaatcctcaagaactattgatggctgctctcaatgcctgccttactgtagcttatgttgctattgctgctacaaaaggagtttctatcaaatcactcgaaatagaaacttcaggcgaacttgatcttagaggattcttaggattagatgaatcgattaatcctgggtatgacgaagtgcaatatactgttcatgttgactccaatggtactcctgaacagctagaagagatccataatgcagtattacaaacctcacctaactatgcgaatttctcacgagccattcgtatgaaacctaaactggtcattgctaatcaataa

SEQ ID NO: 69773 - DNA, 336 bp, Acinetobacter baumannii
atggctacagaatgggctaacagactaacaaaacttgttaaaagtgttggaaatctgaatcaagcaaataaaccacttgctcaagcatttcatggtctagaaatagcaactcgtgaaaacaaagtacttgatgcgaaaactcatgaattaattgcattagctgtcgcagttaccacacgttgtgatggttgtatcactgctcataccgctgctgctaaaaaggcaggagctacaaaagaagaagttgctgccgctttgggtactgctattgctcttaatgcaggcgcagcttatgtctattcagcgcgaacaatggatgcttacgacgagctgtaa

SEQ ID NO: 69774 - DNA, 795 bp, Acinetobacter baumannii
atgcaaaaaaagcaatttgatggccaaaaagttttggttattggtgggaccagtggtattggcctagaaacagctcagatgattattgagcaaggtggttcagctattatcgtaggaagccaagttgaaaaagctgagaaggctcgtaaagatatcgctacaaaatttggtgaagataaagttttcgcattaacagctgatctttctagtcaagaaagtgtacaagagctaatcgaaactctgaagcttgaacacaatgatattaacttattggtgaattcagcaggtatctattatccgaaagcatttctcgaacactctagagaagactatgacaactttttggatttaaaccgggcctttttctttattacacaacatgttgcagccaatctggtagcacaaaataaacctggttcaatagtgaatgtgacagctgtggctgcacgtcaagcgattgaaacagttactgcttcagcttattccatggcaaaaattggtctggatgctatgactagacatgtagctggtgaattagctccacatggtattcgagtgaattctgtgagtcccggcattgttgaaactcgtattttcgaacgcttcattcctagtgagcaacttaatggagcattaaatgattttaacagtttccatccactgggccgtaatggaactccacgtgatgtagctgaaacaattgtattcctactttcagacaaagcttcttgggttacaggtgctgtctgggatgtagatggtggcgttatggctgcgcgcaaactaggtaattaa

SEQ ID NO: 69775 - DNA, 765 bp, Acinetobacter baumannii
  misc_feature (732)..(741): n is a, c, g, or t
atgaaagtattaattaatgctgctaatttgcatagcggtggcggagtacaagtggctagctcgtttattaatgagttgccatttgtctcaaataatatcattaaatactttgatattattgtttcatctgaagtggataagaatattagtcagactacaaaaagtgataattatgatcttgtttttacaatctttggtccatgttatcattcaattaaggggataaatttagttgggtttgctcagccttggattatttatccgaataatgagtgttataatatgctatcaagtgtagaaaaattaaagttcaaattaaaatttttcttacagaagaatttcttcaaaaagtcggattactgtgttgtagaattagaacatgttaagcaacgtctaactaaactaaatatttttaaagataatcaggtagacgttgtttataatactgtttcaaatatttacttttctcctgaaaagtgggaaaaaataaaatttgaatcatctgaaaaaattaaaattggtttaattagccgtgattactttcataaaaatactaatatattacctaaagtaaaagagactttgaaaaataaatataaaaaagaagttgatttttatgtaactttcaatgaagaggagtggcttaacaaatcttcttattttcaggaaaatattattaatgttggtccattgaaggttaatgaatgtccaaatttttatgaaaaaatggannnnnnnnnncaattatattccctagtcttttag

SEQ ID NO: 69776 - DNA, 219 bp, Acinetobacter baumannii
gtgtccacaggtgggccagctaaaggttattacagtgttggtcttggtgcgcaatatagtccaacttcaaaatactttatttcaggtggaatgaagtatctatggctcggtgatgccaaaggtcagcttggtgctcaagcaggcagtgaatattatgtgggtgaatataaaaataactattcaatcggttacggtctgaaaattggttataaattttaa

SEQ ID NO: 69777 - DNA, 462 bp, Acinetobacter baumannii; identical to SEQ ID NO: 54437

SEQ ID NO: 69778 - DNA, 780 bp, Acinetobacter baumannii
atggaatttttttttattttggttggtatgatattgcttgtacctgtatgtatagctctatctcagtcaaatatattgagagatgaatttgatgaagatgactctcctaaaacaaagaatacagctactaaatttcaactccaggaagaagaacgtaaaaaagcattagaatattcaaaaatgatggatgaaaaacgtaagcgagtagctgaagaaaaacgtaaacgtgaagaagaaaaacttaagattaaggaagaagagcgaaaacgcgaagaagaaataaaatatacgaaagaaaaaaagcttgaagaatttagtatttataagaatcagctcaaagaaaagatccttattattgaaaaaaaagacaataccattgtaatcaatggaatacctgtaagctcttggttagatttaacattttatcaattagcttacttaataaaagataatgcaaaaaaatatgatgatgctacattaagagcagaatatgacaaatacaatcccaatacatatggtggattacgtctcttaagagaatctggtgtgttgattattgagattggaaataaagaatatccggactgtatattactcaatagaaatatccaacttgttggttatgagaatactcctctaaaagaaatattaaaaactataaaagaatctgaaaaaagcagtaaagctatgcttgaggaacaggaacgtcaagaacaagaacaagaagttttacatagacaaagaactcaaaatggatattacaatgaatatgatatgtaa

SEQ ID NO: 69779 - DNA, 1197 bp, Acinetobacter baumannii
atgagttgggatgtaaaaccattagatgaggttgtagaacattttattgattacagaggtaagacacccaacaaaaccaatcaaggtattccattaattacagcaaaaattgtgaaggatggtcgtcttcttgaggctaatgaatacatagcagaggaagattatgatgagtggatgactcgtggttacccagaaattgatgatgttgtattaactactgaagcaccactaggtgaagttgctttaattaaagacaaaaatgttgcacttgctcagaggattatcacacttagaggatacagggataagcttgataataagttcttaaagtattggtttcaatcggaatatggtcaatatgagctagattctcgtgcatctggaactacagtgtttggaattaaagcatcagtacttaaaaaggttcctttacctgtgccacctctccctgaacaaaaagccatagcctcagtcctttcatcattagatgacaagattgacttactgcatcgtcagaacaagaccttggaagccatggctgaaacactgtttcgtcaatggtttattgaggaagcgaaagaggattgggaagaggttactttagcggatgtttgtactcgtattactgatgggtcacatagtagccctgcatcagttgaggaaggatttccaatggcttcagtaaaggatatgtatgactggggcattaatcagtctacatgtcgtaaaatttctaaagcagattatgaggctttagtacaggcagactgtaaggcattacaaggtgacattcttatagctaaagatggtagttatctcaaacatgtcttccttttggaagaaagtttagatgttgttttgctgtcatctattgctatgctaaggccaaatggtcgatacaatccgatgctcttaaccttgtttttgaagctagattcaactcatgaattgatgcagaacattgtcactggagctgtgattccaaggattgtactgaaagactttcgtaagttcccggtacagttaccacctgaggatttacaggaaaaagcagccaaaattattaagcctatctttgaaaaatgttgggaaaacaatcgacaaatccaaacactcgaaaacttaagagatatgcttctacctaagcttatgaacggtgaagtaagagtccaataccgaacacaaaaaattgcataa

SEQ ID NO: 69780 - DNA, 1005 bp, Acinetobacter baumannii
atgaatgaagattttctaagagacctgatcaaaacagatgaaaatggaagaataataaaacgtgaatctaaaacattagaattcaaagaaagcttcaatatgaatgctataagaaatggtgatctgtctaagtcaattgcagcttttgcaaatactagaggaggtatcattttttttggggttacagacagccctaggaaagccaaagggctaacgaatacaaactttcatgatatccaagaagagaaactaactgagtttcttaataatcagtttgcaccagaattgttggtagagattaaaacattcgattttgatggaaaaaagtttggagcatttattgttaaagagtcaataaataagcctgtaatctgtacacagcatggtaacaaaattaaagagggtgaaatctactaccggtatgctgggcgtagtgaaaaaattagacatgctgagttgttagcgatattagatgaagtaagagagaatgagcgcaagaaatggatggagcatattcaaaagatagctcaaataggcccacaaaatattgcgttaatcgatgtatacagggggaatttactcaatcctcagaacaaagaagtcatactggataagactttgcttaaggaaattaagtttattcatgaagggcgttttgttgagaaagaaggtgctccagcgcttaagttgattggtcagatagagggaatggaagggatacaaacgattattcctgacttcaatctgaatggagatttcttaacaacaaaagagcttggtgagcagttggagattttaagcgataaaggaagtacgaattacgttactgcagtaatttggaaatacaaagtccaagataatccaaagtattaccaatataagaaaaaccaaaagttatacagtagattatgtctagagtttcttaaagaaaaaaatctaaccaaagagcaaatcataggcattcataaagagtatcaagctagtaaaagtaagagagctgcttaa

SEQ ID NO: 69781 - DNA, 426 bp, Acinetobacter baumannii
atgtttgcaatgtggtgggcttactttgaccgcagtgaacagcatcatcatgttaaaggtgtacgtccgtttgtttggggatatggccattattttgtttttgtgagtgttgctgccgtaggtgctgcccttgctgctgctgtggatgtcaccacccaccatgcccatatttctgatttatacatgggtgtaattgtcgcggtgagtgtggtgctttataccagctgcatatggatactttatgagtttcagtgcttatctggaattactaaatggttttatcctattactgcactcattattttatgtattccgtttatttgtaataacgtgggatatagcgtgtttgcgatgggtattgtctatacgttacgtttattcatctcgaataaatttatggaaaatatagagccaaaacaggtttaa

SEQ ID NO: 69782 - DNA, 462 bp, Acinetobacter baumannii
gtgtttattagtgtatttgatctttttaaaattggcatcggcccatctagctcccatacagttggaccaatgcgtgcggcatacagttttgtggaagatttattgaagcaagacgatttacaagcaacggttagagttcaggtgaagttatacggttcactgtcggcaaccggtgtcggtcatgcgacagataaggctgttctgttaggtttaatgggttttgaccctgaacatattgatactcaagtaagcacaagcttgattgaagatgttcttgaaaataaagccatccagcttaatcagcaaaaaactatttcgtttgactataagcatgatgtgctttttttagatgaatctttgccttatcaccccaatgcaatggaactgattgcgtataatgaggctcaagaaattttatatgcagaaacttactattcggttgggggggggctttattgttag

SEQ ID NO: 69783 - DNA, 240 bp, Acinetobacter baumannii
gtgtttgaagccgactcgattagtttacaaacccatttggtgtccgaatctcgcatgtataccatgctggggccgcaagctttaaaaaaagccagccaatacacctcaattcaagccgcaaaaattattaaccctgccctaaagcgctatatttctttgtctatttctaaacatggctatttaacgcctgcgtgtaaggcagtgatggaagaaattagaaatttggccgatttgctttaa

SEQ ID NO: 69784 - DNA, 960 bp, Acinetobacter baumannii
ttgaaaagtttagaagattttttgtcaggtaaagcattcttttatgaaaaagaatacagctctctttatttagatggtgatgttttttcgccaggatacctatgtgcactagcagctttcattaaagcaaatgtgattgaatataataattttgatacatccacagaagtaatgagttatctaagaaccttgggattccataaagtactttggaataaacaagataacattaatcgttgtaacagtggaaaaagttattccccattaactgccttagttcatccaagcgaagttgattctgccaactcaactattaatagttgtataagagacttagtgaataatctaagaactcaaggaatttcagatttatgtaaagttgttggtgaattacatgataatgtttggtcacatggaaaatctactggtttttcgatggcacagcgaactaaagtcccacatacaaatggaagagactattttattgaattcgctttatctgataatggtttaggttttctagaagaactgaaaagaactaagatcccaattcaaactcatgaagatgctattgcatggtgtattcaggaaggaaactcttctaagctgaataataatgatagttgggcacaacggttacccgacgatcatgtaggtgaagatcctatggcaggatatggagctgaaattccggaaaataatcatcaaggtttaggcttagctcatttgataaaactaatcaaaacctataaaggtgaattaaagctttgcactggggacaccattttctctattgactcagaagacaatgagacgtatacaaagattagtaccccttggcaaggcgtatcaataagctgcaaattcaaattatcagagttatcaagtgaagctaacaactctgctcttaatgaccctcagaaacaatatataatggcaaagttgagaggtgcaatatga

SEQ ID NO: 69785 - DNA, 291 bp, Acinetobacter baumannii
atgaatactaatatattagttcttccaccaggagatcttgcttcaagaagctcagcaatacattacaggcttcaacttgaagagttattatcatctgaaagtcaacatgttataaaagttgatctatgcaaagtggattcaatatctgagtcttatgcagatgagttatttggtatgttagttaaagagtatggcttagagaccattttaaatagaatgaagataatcaatggtgatgattaccttttaggtagcatagcctcagtgattcaacgaagagctttacagtaa

SEQ ID NO: 69786 - DNA, 630 bp, Acinetobacter baumannii
atgaatccattcgacaaaataccttcagcttataagttcactttgaaacagttatccactaaaaccggaaaacctgaacatcacctattaattatggctctagacgatttgaacgaaaaattcagacactctttacttaataccgagccttcaataacacatcagtcaactaagattacccatcatttatcttctgattattgtttatcacaactagagattattcctaaagatggccaactaggaatattgttacgaactgatcaaggaatctttatcactaaacacacatacaaaaatttggtcgaggcactaacagctcttagcgaatcagcatcggttcgtgaaaaatggatatggacagcaattactgggaattaccctgtcgtaattgctcagaagaagcctagtcatacacctcacttgtggttaggacaaaatactgcctgcaagatgtttaacagccatagcaacaatccacgtcaatactctttaacaaccacacttccaatgcaaaaaatgtgcaagatttgtataagtaactacaatcatttaaagaacagtcatctagacattaaggttgttaatgaaattatagttggaccactgtatgacaacgctttgttctaa

SEQ ID NO: 69787 - DNA, 135 bp, Acinetobacter baumannii
atgacgttagctttggtcgaaattcctgttgcagcgttattggcagttgttgtagtaggcgaaagtttaacaatgaatagttatttaggtttagttttaatattcctctgcgttattgtcctcactaaaaaataa

SEQ ID NO: 69788 - DNA, 933 bp, Acinetobacter baumannii
atgaataagcctacacctaaaatctaccgtacaaccaattggcccacatacaaccgagctctcattaatcgtgggaatattgccatttggtttgatcccaaaacacaatggtatgctcaaccaaaaagccaacatggtcgaaatcaaacttattccgatacagccatccaatgctgcttaatgattaaatccatatttcgtctttctctacgcatggtcactggctttgtacaaagcctgattaaactttgcggattagattggacagcgccagactatacgacgctttgcagaagacaaaaacatattgatattgcgattagctaccaaaaaagtagcaatggtctacatctactcgtagattcaactggtttaaagtttttgggcgaaggtgaatggaaacggaagaaacatcagcctgaatatcgtcgacaatggcgtaagcttcacattggtatagatgctgaaacgctgcaaatacgtgcagttcagctcacaacgaacaatatcagtgattcacaggtgctcggtgatttacttggtcaaataccacttgatgagcgagtagattctgtctataccgatggagcctatgacactaaatgctgcagacgagtgatctcagatcgtcaagcatatgcggtgattccgccaagaaaaaatgcgaaaccgtggaaagatacaaaagttcattcgcaagagagaaatgaattactaaaaacagttaagcgtctaggaagagccctttggaaaaagtggtctggttatcatcggcgaagtttggtcgaaaccaggatgcattgcatcaaattattaggcgataaactctactcaaggaattttgacagccaagtgaatgagatccatgcacgtgtagccgtattaaataaatttacagaaataggcagacctcatacccaagttgtaacctaa

SEQ ID NO: 69789 - DNA, 1320 bp, Acinetobacter baumannii
gtgattttattatatcctttaaaatttcatacaatactattattagatatgtcagatatacttattatttgtgctttacgcgatgaatacaatgctttactagaaactttgaatggtgaaacttcctggaaagaagaaatcattgatggctggactattgccaaaacaaccattgagaccccatctggtacattatctataatggctagttggcaaaactttatgggccgtgaacaggcgattgcagcaaccacatctttacttcaacaacagaaaaataaaataaaatgtatctgcatgacaggtatttgtgcaggaagacgaggtaaggttcatcttggagatgtcatttttgctgatagattatggtcatatgatgctggcaaatcagtcataattgaaggcgttgaaaattttcaaggagaccagcttcaatttaaacctactcctaaaatattacaaagaatgcaaagcttcaaagttgaagaggaaagctggtgggacttgagacctctctactcactagactaccaagaaagatggcttcttttgcaattatttgatggaaatcaaccttctaataatgaactttttcaaacctattgtcctaattttcctgaagtaatcaaacgattgagaaaacgtaattggattagctctcaaggatttaatttaactgaaataggctcggaacaagctacaaagttaaaagaagaaagtctctatggtttacctaatgatccaaaattttcagttcatatagcacctatagcaacaggaaatacagttaaagaagatgaaaatatttttaactatttggctgatagagatatgcgtaaagtcttaggtttagatatggaatctagtggtttagctgcattaggcgaaatactagatattccagtcataatctctaaggctgtatcagattatgccgatacatttaaagatgactcatatagacattttgcatcacgtgccgccgcagaatgcttgatcaaactattaattaattgttctgatttaattctaaataataatcaaacaaataattctgttcaggaagattctatctcctctcctacacatatggctaatgagctatcaactttatactatgatgtaaatagtataagaagtatttgggtcaaatcagggggtaaaccttcagaggtttctagtatctcaaatattcatgatctttggtttgaattactatataaagcaaataatggagctaatgtaactattaatgaaatagttaagaatgctttaatagattttcctaaaaaccaagtgcttcagcaatatataaaataa

SEQ ID NO: 69790 - DNA, 1104 bp, Acinetobacter baumannii
atgggtatgacttttttagatgctttaaaaaaagcaggttgtcttgataaacaaattacagaaagcgatgatcgctttgataaagcaaattctgcagcagaagagtttgcaaaagaaatggactctaaattattaattgagggatgttatgcactaatcaaagaatctttctttgaatcaaatttagccatgcaatcagcatatgagacattagaaacaaactggtcaaatattggattagtttattcagatgagagacccaatagattacttacagctatgatcctgtacgcatgtgagaaacaggcacaagctgaagatagcattgcttcgaagttagcattaaatataattgatatttggccttatttatctcctaaagactctaactttactcttaccaaagaaacagttgatcaatggaactataaacttaatactcaatcttataacggttatgaagacagcttagaaataaaaaccataaaaaataagactttcaaggccgaaaattttcacaatgaagatgaaacaggagccgctcctgaaaagatagcaaaggcttttacagatacatttaaagaacttagtgaacacacaagttctgtttcttatgcgttagtgaatccttttacttaccaaaatgagcaattaaaaatactttggtggtatgaagcaaaatattcccaaagcttttttacaagttatcgtgaaattgacactctacttacccctttagtaatggcaatagatcaattacagctcattaatgcatatcctgctcctgttagttcaacttatattttagctgaatcaattagccaattagaaaatgctaattacgataaaagatatccattgatagaaatcctatcaaaaattagggaaagtaaagccgaacttctggctaaagatatatttaatagtcttgagctccccctaaatcaaaaccacttaaatataagggacctcatcgtttcagcattaaaaactaatatcgatttagaaactttaaaaaatcaatgtattgtcgaaattgaagaaatatctttaccagatctagccaaagctatttatagacaagagcaaatttatagattttag

SEQ ID NO: 69791 - DNA, 957 bp, Acinetobacter baumannii
atgtataaatgtactaattcagaatgtggcgtcgcagagggaataagctgtgaaaagggctatctcaatttatctgattgtgaatattgcgttaaagccgaagaaactgataatccgctaattgatgatatatctaattctacatataaagtgttttggagtggatctcacttaggattcaaaggactacaaaaactatcggatgtaagaaggcctttaattatcggtatagctggtccagcagaagctggtaaatctacacttctcctcacactatatttacagattttaagtggtaaaaaattaagctttggggatttttgggcaagttatactcttgaatcatgggaaagtttagcaaaaaattctagattcacatctccattatctacgccagactttcctcctcgaacaccaagaggagatgcaagaacaccaggttttttacatttatcttttcgagatgaaaacaatgtaatccgagatcttatatttatagatgcaccaggtgaatggttcaatcaatgggcaattaatcccacatcagctaaaggtgctgattgggtaatcactcattctgacttacttattataacttcagattccgaaaaactttcccactcagaagctaaaatccgtggtagtactagaaatgatatctcaagcatttttgatcggttaaaaaactaccattacgcaaagcatattgctttactttggactaaagctgaagaacagaataagatcccggaaagtattagtgggttgattactcgtagccttaattcgcttactttctgctcaacttcgagccattattgttcgataacacaaccagatgaaatatttagaataattgatgagttaattacaaatatttcagtaaaacctacaaaaatcaccgatcctattattggttattctatatttgaatcatttagaggaagccatgaataa

SEQ ID NO: 69792 - DNA, 849 bp, Acinetobacter baumannii
atgaataaatctaattcaattatggtattaggaaaacccaatagtggtaaaactgtctattcagctcaactatatgggagattaactcgtggcatagaacagcaaattgccatacgtcatactccagataatcttgatctctttcaagaggcactagagagattagctgagggtagtaatccacaaagaacaacatcttctcaatttgcaaatgtatcattacccttaaaagttaataatgagaaagagtttgatcttacttggttcgactatgctggagaacaattaacccatatttttgagaatagatcagtaaatgagaaatgggctgagtccttaatcaatgcaaatggttggatggtatttattcgcttaaatgatgaaactaaatttaaacacaaaattgaagatttattaaccaacaaagatgcttcacaaaaaaataataaaaaagaagctgatatagatactgtagatgctaatgtctggtggatcgaactatttcaaataattcttcatgtatgtaatttaaaaaagccccaaagagtttcaaaacccaaacttgcaattgttttatcttgttatgatcagataattaattcatcagataccactcctcaagaaatttttgaaaaagaactacctttattaaatcaatttttacattcaaattgggaaaaagataaaatctctatatggggcttatcttccttaggcagatcattagataaacgatctcaaagtaattttgtggataatggaccagagaatcaaggctggattattccaccggatacaaataaaaaaaattctgatctaacttcccctatagtctggatatatggttaa

SEQ ID NO: 69793 - DNA, 1110 bp, Acinetobacter baumannii
atgaataagcttttcacttcctatgatttatctggcatagaattgaagaatcgtgttgttatgtcaccaatgacacggactcgcaccctaaatgacgtagctgacgatttagtggctctttattactctcaacgagcatcagctggtttaatcattactgaaggactaccaatttctgaagaaggccgtggctatttatataccccaggcctatacaacgaagagcagatgcagagttggcgtaaagtaacagatgctgtacatgcaaaagggggaactatttttgctcaactatggcatgtagggcgtatgtcacacgtctctctacaacctggaaagattgctcctgtttcttcaggtactgtacctgcgatgaatactacagtttttgcttggactgattctggtgagccaggccctgtagttccgagtgaaccacgagctctgcaaactgaagaagtaaaacgtattactaatgatttcgtactatctgcacggctagcgatggaagcaggttttgatggcgtcgaaattatggcagctaatggatttatttttgatcaattccttagcagccaattaaataatcgaacagatgagttcggtggatcaatcgaaaatcgtcaacgcttccttttaaacacgattgatgctgttgcagatgaagttggtagtgacaaagtcgcagttcgtctttcaccatttggccgtatttatgatttggcaccttacgagaatgaagaagaaacatggtcaaacattgcaatagcacttggtaaacgtaagctcgcttatgttcatctgtattatcaacctacctatgatactgcaccacctgcggctgaaagttttaaaaagtttttccgtcaaaattttgcaggaacaattattgcggcaggtggatttaatcgtgatagtgctgagcaagcgatagaaaaaggtgaagttgatttaatcgcttttggtgtcccatatatagctaatcctgatttagtcgagcgcatgcaaaataattggccattggctgaaagtgaccgttcaacctattacggtgtgaatggatcgccagaaaaaggatataccgattatccaacttatgttgctgaataa

SEQ ID NO: 69794 - DNA, 702 bp, Acinetobacter baumannii
atgaaatcttcaagtttcgatatcacaattgatatttggtcagactttgtatgtccttggtgctggattgcaaaaaaaagatttgagcggggattagaagcctttgaacataaagctcttgtaacagtacagcatcatagcttccgtatcggtgccggatcagaagtagtgcctttcagtgaagtcctattaaaaaaatttggtggaaaatttggagcggaacagttgatgcagcaagtcaaagtggctggcgaggaagaagggctaatttataattttaatactatgttatttggcgataccctagatgctcatagattagtagttgctgcacgtgaaaagagactagatacaaaattaattgaacgattattccaagtaagtatcactgagggaaaatcaatatttgatagaaatatactcacggatctcgctcttgaagtaggaatggaacttgttgatataagagatgcgtttacaaatactacatatagtaaagcagttgctcaagatgagaacgacgtatacaccaacaaaatgaatggtgtacctctctttataataaataaaaaatatgtcatcagtggtgctcaacaaactgaaacctttttaaatgtgttaaatcaaatatgggaagagcaacaaaaagaactaaacataagtgcaggatacagttgtggtattgaagggtgccagatttaa

SEQ ID NO: 69795 - DNA, 954 bp, Acinetobacter baumannii
atgaaaaataaaaatatagggtgctggctgttacttgccagtagttcaagtgtttgcgcgatgcaacctttggatgatcaaagtcttgcagctgcgacgggtcaaaatggtctaactttaggtattcaggctgatcaagttaaatttaatcaagtcgccttgattgatacgaacggtattgcagctacgtcttataacagtaaagcaggtcttgtcattgcaggaaactctactaatccggttcctagcatagagtttattaaagctgctgtatctacaaatccttcttttaatattgcaatcgataccgatgctggtggtggaaatccttttttaaatttagctgtcacgatggggagtgacgtaaatggtattcggcttttaccattttcagtttatttagccccaagtacatctttatctagcccatccgattacgcactaacgagctatgcaccaaaatcaatttttagttcgggcacaacggtgaatacgggggtaaaagagctgattcgttctactggtaatcttgatattaactttgtacaaaccaataagcctcgtttaaatattcaattgggacatgctgcccagtcggttatggttaaatttggaggagctattcaatcgatttgttctgctgcatctggctgcccgattactttagtttccgataacacaggtgctacatttggggttaaatttgcaggtacgaatgcgtcaacgggttttgttctggatggattttatgctggagttgactcgacaggacttactattggaaatataggtgtgtctagtaaatttgatgcatcacttaacaatgtgactttaggaaatttaggtacacaaagtacaacaacctttaataatttacccaatgggtctatggggagttttggagttacgggtgcttcagtgaccgattttaaaatgaaagtaagtggcttttaa

SEQ ID NO: 69796 - DNA, 1281 bp, Acinetobacter baumannii
ttggaaattggtggggcagggctgaacgcctatggttttgaattcggtaatttaacggggctgaactcggctacacgcggttattttgacagtggaaatatttatctaaatcttgctgatacaaaaactttattaatgccaaataacgcaacgttaaatgcaattcgtttaggatccggcactttaaccactgctgccgattatcaacataatattcatcgtgatacggtgactaatccatttagcttaattcttgccatgcgtggtgcagagtttcaggcattttcaagacgaggtcgttttaccaccagtgcaaatgtcgctgctgctaatcaatttgcagataatggtttaaataaccagtggggtttggcattacccttttataatttaaatgcgaatgccgctgtctatggtgtagatgcgcctgcaaatggtgcttattactatacaaaagatgccaacggtaaaccgattcaaaatttagttgcaacatctggtacaacttcacgtttaggttttggtatagctgtaggaacgacaggtcgagatgcaggcggtactaaaacaacttcaattttattaattgatggttctccaaatgctaataatgcgggcaaccctaccgattattatatggggttacgtaatattgatatgttcctcaaaggcaatggcactattggtttagaaaatggcagtttaaatatcggtttaaaagatatgttacttgctttatcaaccgaaattgcggcaggttatttaccgggagctaaatataaaacttgtccggcaactgggtcttgtacttcgccaatcgataactttgccaaaaataatgatgtcttatttggtttaaaactacgtttaggcggcgatcttaatttatcgatagtgccgaatagttcaattgcagatggtagtgctttaactgtactcggcgattttacaatgcctgcgacagcaactggaaatactgtacaaattagtgacccgattgatggttctgcaattggttttgacaatattactggaaagctagcgtttaataccgctttagttgtgggcaaagataccgcaagtggtttaggtaaagttggcgtaaataccgcggtttattttaaccctgataagagtattgacggcgcattacgtgtgaaagatattaatttctacccaccttcaacaggtgcaggagcacgtttaggtgagcttgcaattacgggtggacgtctaaatagtagctttagcattgtgcctagaaatggagcctttaactaa

SEQ ID NO: 69797 - DNA, 198 bp, Acinetobacter baumannii
atgtctaaaaccaagcaccccaaaactgaaaaagtcctattgtcgacaagggaggccgcagaattaatggggcttcaacctcagacgctaagacgctgggctatatacgaaaatggccccgtcagtccgattaggtatggccgtctactgcgttggagtaaaaaagaaattttagaattcgcacgtgaatcaatttaa

SEQ ID NO: 69798 - DNA, 1668 bp, Acinetobacter baumannii
atggaagaaaataattttttaaccacgctgaaatcttatgaaagaatgcggcatgcaaatggtttcttcgaaatagctgaagatggtgtttggtttgtcaaagataataatgatgataagcaaaaattatttatttgtagtcctatcattatactggcaaaaacacgggatgatagttctaatggttggggacgtcttttacagtggttagacgatgcaggtatgctacatacttgggctattccaatgcaacacttccaaacggatggtgctgatataagaaaagctttgtcagatcaaggagtaactatttctgtaaatggatatgagagaaaactttttcttttttatttggctaattatccaataacacaattagcagtatgtgttagtagaattggttggtatcgaaatcaatttattttgcccaataaaacgattggccaaaacgatagtggtgaaatcgttgtatatcaatctgaaaatgcttctctaagtaaatattctacaaaagggacattacatgaatggcaacaacacatagcaatacttgctgaaaatcatccttttttaatattagcaatcagcctagcttttagtggacagttgctcgaacctttaaatcacaatggtgctggcatacattttaaagggaaatcaagcaaaggtaaaagtactgctgagtttgttgcatgcactgtttttggaaatcccgaatcatatcattgcacatggagaaatacgggcaatgctttagagcaaacggcttttatgcataacgatagcctacttgtattagatgaaataggtgaaattccgaatccaaaagaacttggaagtatcgtgtatatgctaatcaatggcattggtaaggggcgtatgactaaatcattgactttaaaggatagtaaccgttggcgtatagtatttttgtcaagtggagaaaaaaccttatcagagcttatggaagaatcaggtcaaaatagtaagctagggcaagaaattcgaatgataaatataaatatagatgattctccttatgggatattcgattgtatcgattttgaagaaaatgcagcatctcaagcaatgttattgaatagcaattcaaagaaatactttggagtggctggagagcagtggttagaatatttaactcaaaataaatttgaagttattgatatagcaaataaattattgactgaatattttaaagtattgacagtaaattttagtgaagggcatataatacgtgttgctaagtcctttgcattaatagctgttgctggtgaattagctactcaagcaggaattaccgcttggaaaagcggagttgcatttaatgcaatacagacagtcttcaataattggattaagaatttaaaagaaaaaggaaactacgaagaaaaagaaatcttagaaaaaataaagttattttttatacagaatggttcaagtaaattcgaacaattgattcagaaagattcaaacagtttgcagtatgataattttcagcagagaacaaatgattgtgtaggttgttggatgcaaagtggattaactaaaaggttttatgtggaacctgtaagctttagggaagcaatatgcagacctttgaaacttgttaatcctgattatgtaattaaggtattaaaaaagaatggttga

SEQ ID NO: 69799 - DNA, 468 bp, Acinetobacter baumannii
ttgtgcaacaaagccaaagaacaagctgaacttaaaaaagttgaggatgctgttcgttattatcttaaagatggtgattctgcgaaatttagaaatgttattaaaaattgtggtgaggtaaatgccaaaaactcatggggtgcttatgcaggtttttccagatttatagttaaatcagataaacaagtaatctttgatgaacctgataattactattttgatagtttggtaaagttatattgccataaagattatttagcaaagtttccagtggaaacaagtgaagagatagcaattgatgcatctccaacagaacaaatatccggtgtggctgctgaggcggcagcgggagaaactttagaaaatgaaacaagatcagttagtaaacctaagaaagaggaggtagctgttgaggaattaactactgaagatacaacatcagataatggtagttctgaaaattattaa

SEQ ID NO: 69800 - DNA, 516 bp, Acinetobacter baumannii
atggatgaatatactttgaaattaaagttgaagaatttaccagcaaatcttcagtacttaatttttgaaggaaatgatactcaggaagagatagcattagaagaacatcacttacaaagcatcaaagcactaaatagtttagatggcttaggattgctatatttactacatttacttgggagatacattggtagtataaaattaactaatgatacagcatcttctattaatcaaatgtttgaaaatctttctaaatttcaaggattagagagagcacaccttttacttttcgatgaattatcaaagcgagtctatcaaattaaatttattggatataataaaccattaaaaatttttttcccttggcgaacatatagggataaagattgggattcgtcgcttcgaatcaattcacaaaatgctgaacagaaaatgcttaaggataaatacttaaaagaaaaactatcaaattcaaacttaatagaacaagaagtttttataacatcttttcactaa

SEQ ID NO: 69801 - DNA, 183 bp, Acinetobacter baumannii
atgcaacaaagcctcgacgttatagaaaagttacgcacgcaaggtaaagtcaaacacgatgcttttatttggcgacgcttaattggcggtgcaatttcatggactgtaacttggtataaatctgagggtaaagtcaaaattgatgagttaaccgaaatggtctgggaaatggctttgaaataa

SEQ ID NO: 69802 - DNA, 762 bp, Acinetobacter baumannii; identical to SEQ ID NO: 69757

SEQ ID NO: 69803 - DNA, 219 bp, Acinetobacter baumannii; identical to SEQ ID NO: 69776

SEQ ID NO: 69804 - DNA, 462 bp, Acinetobacter baumannii; identical to SEQ ID NO: 54437

SEQ ID NO: 69805 - DNA, 210 bp, Acinetobacter baumannii
atggaagagcgcaaaaatctggataccagagcttcggctttaatggtgcttttatgtatggtcttagggctgcaacaggtggttctgaaaatagcagcaccagatatttcgccgattatgcaaatcgctttacgttccggcttatctgctgttctagttttacctttattgtggcgagatcattcgattcatctattttcttatagataa

SEQ ID NO: 69806 - DNA, 462 bp, Acinetobacter baumannii; identical to SEQ ID NO: 69782

SEQ ID NO: 69807 - DNA, 1137 bp, Acinetobacter baumannii
atgaagaaaatttttatttcaattgtatttggtactcgtccagagctcataaagttggctccggtaattttattagcaaaacaagactcacgatttcaggtagaagttatttttacaggacaacatgatgaattagttcgagatgcgatagatttctttggggttgaaattgatcatcgccttaaaattatgaatgctggacaaagcctaaatcagcttttaattcatggcttaacgcaacttgaaaatatctacacagatggtcaaaaaagagatgcaattgttattcaaggtgatactacaaccgtgttagctgctgggctagttgcattttcaatgaagattcctgttgcccatgtcgaagcaggcttacgttcttatgatttagatcatccgtttcctgaagaaggcaaccgccagttagtttctcgtattaccaaatggcattttgcccctacagaacaatcaaagcgtaacttgttaaatgagcggattccaccttcattgattacagtgacagggaatacggtagtcgatgctgtgtatttaggaaggaaactcatagctgaaaagacgggtttgaaaaatcaacttgagccttacggaattgaattaaaacaaaatgataaagttgtacttataactgctcaccgccgtgagaattttggcgaaggaattcagaatatttgtaatgctgttgagtatttagcaaaacagcatcctgatttacattttatttggcctgtacatttaaatcctgctgtacataatgtagtgcacgataaatttaaaagtcatgctcaaattcatcttgtgaagccactcgattatccaagtttattggccgttatcgaccgctccacctttattttaacggactctggtggtttacaagaagaaagcccatcatttaataagcctgtcttaattttaagagacacgactgaacgcccggaagtggtagaggtgggagcaggggtattggttggaacaaatcagcagaaaattattgaagaggctgagaaacttttaacggattcacagcattaccaaaaaatggctcatgttgaaaatccgtttggtgatggacgtgctgcccagcgaatattagatgaaattgccagaacttataactag

SEQ ID NO: 69808 - DNA, 135 bp, Acinetobacter baumannii; identical to SEQ ID NO: 69787

SEQ ID NO: 69809 - DNA, 399 bp, Acinetobacter baumannii
atgtattgttcttacaaaagtgggaatagaagattaaagggagttattcctcatattaaacccttattatccaaggctaatagaattaagttaagattttatgaggctagaagctttcctacaaaaaatacaaccatatcatccaatgaaattgatgaaataatcacggaactttgtgctgaaatattctcagatagactaaaatctatatggataagagctggaggaaaagccagtgatttaattagcaacggtactgtttatgatcaatgggttcatgcaattaatgcagcttctcaaggtaaaatcaacaactaccctcaaagtataatacatattatgtcacaagaatttccacgtaataaagatataaagaaccttattgaacttctggaataa

SEQ ID NO: 69810 - DNA, 702 bp, Acinetobacter baumannii
gtggtaaaaagaaatagcaaaaaaattattatatctttatccatcttaggcgtagcgataattttaattaatactattatatcaatatatgagaatacaagatactcagaaaatattattactgaaggccctttaccagctgaacaagctgatgagacagtaaatactttatatgcctctacttctgaatctgtcagtacaccagaattagttaatactaccaatgaagagcctaaagtaattccatatcgaccagatctaatgaataaagctgtcctaagcgttattaatattcaagaagagagtggcatcataggtgtggtcaaagaaattcatgactgctatgtagataaaaaagaagagaggctttattgtctatttttagatttaactgctagaatgcttgatttaggtgcttctcagacaatgggtattattcgtgatgattacttaatggatgaacgagtattaactaggataaataataattactatataccaaatggtattgactctagtacagcaactgaacacgtgcaaagaatgaatattgaactagcagaaatatttaaagaaaaatatcaagaaaagataaaaaatatgcattcttctgaaaatcttaataaatctgttgaagaggagttatcagatataaataatgatgaagtgaaaacagatcaaccatctagtaatttaatctaa

SEQ ID NO: 69811 - DNA, 300 bp, Acinetobacter baumannii; identical to SEQ ID NO: 64351

SEQ ID NO: 69812 - DNA, 258 bp, Acinetobacter baumannii
atgttattcaaaaaattcgctgttgctgctgctgttgccgctactttagctttcgttggttgttctaagaaagaagaagctccagctgctgcttctgaagctgtagctgctgcttctgaagctactgctgctgcttctgaagctgctactgctgttgacgctgctgcttctgaaactgccgctgctgcttctgacgttgctgctgctgcttctgacgctgctgctgcttctgacgctgctgcttctgctgcacactaa

SEQ ID NO: 69813 - DNA, 540 bp, Acinetobacter baumannii
ttgaatgagattaatcagcaaatttctattaaagctcatgaattagcagctctcctagaaactagatccgagttaataaatacttctggctttatgacagatacccattatcacattggtaatgtaattcgtgaagcatctcagaataatccgtattttagaacatctttgctagataaattaaagcaactccaaggtcagtttgatcttaaatattggcctcggttagatgatgtaatgaaagttatcgctgaagatgcaagaatggccgtacctattgctattgattctattactgaagtggcaacaataggtgagagagcttccttagttgattattttagagctttatttgaagctattgaatgtaatcgtcagaaagaatatggtttcttacctaatgactttaagttaacagataatacaattgctaccttagcgaattgcgccttagctttagagccaaaagaaatgattgatggcctatatgtgaaaaattttagaagtcgtgaacgcaaacgcataggtagtgactcctaa

SEQ ID NO: 69814 - DNA, 282 bp, Acinetobacter baumannii
atgaagtctatagatgaaataaaagctcaagaggtatgtgtagctattctattagataaaaaagctactaatacgcaagccaagatacttcctagtgaaaatataatcattgataggttacttgagcgtaaagttgagttacaacatgcttatagtgagttgtattcaaaactagggaaatatcatcaagccctcacaaattttttagatttgttagtaggaattacttcaatgcatagtccagaggaagtaataaagtctagggctgctcagaaaaattga

SEQ ID NO: 69815 - DNA, 765 bp, Acinetobacter baumannii
atgccttttacaatctctcatgctgttcttgctccaccgattgctaaactaagtcgaaacacactgcctgttgctgccctagctattggcagcatgacacctgacctttaccgcttatttacagttcagtcaggtatgctgactcatcaatggaagggtttgctttacccaaaccttgcattaggtttattgttttgcgtcatttggtatttactttatcggcctgtggtttaccgtttttttggtattcagcatgatttgaaattagactcttttaaacgttttatctactttttaattggaattatatttgcactcattatcggtattgccactcatctcatttgggatggtcttactcattctgactttcgaacttttatcttccaagattttttatcccaaacggttcatttctttggtcgtccctatcctttgcatcgactacttcaactcggttcttctgctctagcattaccttttttaggctggatgagtattcattattatcaaaaacataaacagcactggaaaataagtcataaaattaaaatttttgcatggtctctgtttattttatctacccttttgggcttattttcactttgggattatgcccgttacattcctcacgaggtttggcataccgacacctattactttacaggtcgatctattaatgagtttatgcaaggctggttaagtacttttagtttggggtgcttattattcctgtttttagatagacaacaaagaatgggctaa

SEQ ID NO: 69816 - DNA, 831 bp, Acinetobacter baumannii
atgaccgaaaaaacacagccgaaaaaatttaaatcgaaatggtttcgagttgccgtggctggtgacaccaccgatggacgtgaaattcagcctgaatggatcatccaaatggcacagacatatagtttgaatacctatggtgctcgaatcaatttggagcatattaagggcgtttcaccagatggaattttcggtgcgtatggcgatgtgattgcgcttaaaactgaaaaagtagacatcagtggtgaacagaaagatgcactatttgcgcagatccagccaaatgataatttgattgccctcaatcagaaaaatcaaaaaatttatacatctatcgaagtagatgaaaattttgcaaaaactggccaagcgtatttggtaggtcttgccgttacagatagtccagcgtctctgggtacagaaatgctttcgttcgcagcgggtgctactgaaaacccattaaaggccaaaaaacaacgtcccgataaccttttcactgcagctcaagaaaccacgtttgaattcgaagaagtcaaagaaaattttggcgctaactttctgaaccaaattaaaaatttgttcaaaactcaagagcaacaacagcagcaaaatcaagaaaatttcagccaaagtgagcaagcgatccttgcgattgctgaacagactgccgagcagggcactgaatttaatcagttaaagcaaaagcatgagcagctgcagcaagaattcaatcaattgaaatcaaagctggatcaagaaccacaacatcaaaaacgccctggttcaaacaacagccaatttaagcatgacgaagaagaagtcgactgttaa

SEQ ID NO: 69817 - DNA, 1011 bp, Acinetobacter baumannii
atgcaattacttacccgtcagaaatacaataaggtgatgactcaattagcagagctaaatggtgttgaaacagtcactcagcagttcaatgtcacgccttctgttcagcaaaagcttaaagaaaaacttcaagagtcatctaagtttctaagtttaattaacgtttatattgttcgagaacagtcagcggaagcaattggtatgggaatctctcgaccaattgcatctcgtaccaatacaaataacagcgatcgtcaaaccaaagatccaactggaatggataatcgcttttatttttgtcgtaaaactgattttgatacagctatcaagtatcaaaaactggatcagtgggccaagttcaaaaatttttatgcaatgttccgtggtctgattatcaaacgacaagcgctagaccgtatcatgattggatttaatggtaccagtatcgcagccgatacagacattgtagccaatccaaaacttcaagatgtgaacaaaggttggttgcaaaaaatgcgtgaagagaatccttcacgtgtcatgaagtctggtgccactcaaaacaaaattacgattggcaaaacaggtgattacaaaaacattgatgccttggtcatgaatattgtcgacgaaatgatcgatgaagtgcatcaagataatcctgatcttgtcgtcatgtgtaaccgaaaaactgtatcagataagtactttccgttagtcaatcaagatcaaccgaacactgaaaagttagcagccgacatcatcatcagtcaaaagcgcatgggtaatctgcctgtttactcagtaccattctttcctgaaggcatcattttggtgacgactttcgataacttgtccatttacatgcaagaaggtggtatgcgtcgagtagttattgacaatccgaaacgtgaccaaatcgaaaattatgaatcttcaaatgaagattacttcattgaagatttgggtcttgcttgtatggctgaaaacatcgaaattcaggcggagtaa

SEQ ID NO: 69818 - DNA, 849 bp, Acinetobacter baumannii
atgaacttggctcgaaagcactatcaacagcatcaagccaaatccgcagctgaatcagctgcggagttcggaacgatgcaaaataccaacgcttatgaacagcaattaatgcagctcaatagcgataaaaaccgtctgaaaaatattcagtcaaaacaaaacaaagtcgaactgaaacgccagttactaccaaattacaaaccatatcttcaaggcattctagaagtgaagccaggtgtacaagatgcagtagtcactgaaatgttggtttggtcaatcgatgttgctgaatacgactttgcgttggatcttgctgaatatgtcctcaagcacggattaaaacttcccgatcgttttgagcgttctgaagcgtgtttcatcactgaagacattgccgatgaatttttaaaagtgcttaaaacggatgtatctattgatatcactgtgcttgaacgacttgaaagtttgattacagatgagtcactggataagtccaaacgtgatatgcctgacgaggtaaaggccaaactttatctggcattgggtaaagctgaaatgcgtttgattactggtgagcagcttgtcgatttagtacacgcaactcgtgcacgtgattttctagaacaagcttgcaaactagatgataaatgcggtgggcgaacagatctcaataaaatgatcaagcttgtctctaagtcacaaccagccgttgcgccagcggttgaaactgaatcaaagccagaaccagaaccaacaaccgaacaaccagaagcaaccaacgttttgctgaatcaaaacggaacgcctgtcgtcgacgatcacggcagtatggtaccagcttctgaataa

SEQ ID NO: 69819 - DNA, 450 bp, Acinetobacter baumannii
atgggctttgtcgcaaacggcagtaccacgccaagcaacatcaatattaccagtggcacttttttcccaagtatttcactcgatcaaattcgggatgtggttcgtatcgatggtgcagtaacagatgctcgactccgtcaattggttcttgaagaaatcatcgataccaatcgtttgcttgcaagcttggtcatgaaagcagacacattggcagatctggcaataagcatcatcgatggtaagccagataccgaagttctatatttttcggctgtatccaacggtgtagcagccaaagtaaatgaaaactatcggaattatgacagtacaaattcaggtaataaaaaagctgaacatgcctttttgactgtagaagattatcgccgcaacaagatgtgggcgattcagcagattaaaggcgaaaaccatagtgtcgtggagttgatatga

SEQ ID NO: 69820 - DNA, 204 bp, Acinetobacter baumannii
atgagaggtttaaaaaatatttttttagcttcaacagtgcttggcggattgactgcgtctactacaactcttccaagagcaattggtataacgactttaatatcatcaccaagaaatttttattttattccgcgtccatcaaaaaagttgaataaagttagtcaaaaaaaacgtcgattgaaacgtcgacaaacaggtaagtga

SEQ ID NO: 69821 - DNA, 213 bp, Acinetobacter baumannii
atgagcagaaccgtcacagccgtccaaaatgacacgattgactcaatttgctggcgatattacggacgtagctctggcgtggttgaagcagtacttgaagcaaatcccaatctggcagacgtcggtgtttttctgccaatcggtacatccgtgattcttcccgacatcgatacaccacaacaaaccaaacaaacaatacaactgtgggattaa

SEQ ID NO: 69822 - DNA, 354 bp, Acinetobacter baumannii
atgccagaaccaactacgaccaccagtatttcaacactgacattgagtgctgcatcactactgccttttatcaatggtaacgcacttttaggagcagtattaggagctgcattcatttcaacttatgaaaaaaatctgacagccctttcacgcctacgcaccatgctgctttcgaccggaattggttatctgctcgcccctgaaattactagtcggacttttattaccagtgatgcgacagcagcactgattacatcgacattttcgttatttattttgatcaaggctgtggactgggtaaaagccagcaagctttcagatctttggaaagcctttcgaggaggatcatcatga

SEQ ID NO: 69823 - DNA, 273 bp, Acinetobacter baumannii
atgattgaatttctattccagttgatcgctgttattgcgtatatgctctgtggcattcgcattgtttgcttcaatcgaaatgacacagattttcaccgtggatactcatttctagcgacattacttattgcatcttttatgggacaagctgtccatatcttattctttaaagatccagtcacattgtgggatgcgatatttgcagtccttttggctgttctgatttttcgagcaaaaggtaatgtggccaagcttatctggagtacatcatga

SEQ ID NO: 69824 - DNA, 855 bp, Acinetobacter baumannii
atgatcttaaaatttggttcaaagggtaatgatgtcattacattacaacagcagcttaaaaagctgggttttaaaggcgtaaaaggcagagagctgtccatcgatggtgattttggtgcttctactgaacacgctgtcattacatttcaaaagcaaaaaaatctggttgcggatggcaaagtcggagacaagacaagagcagctctacttgaacaaaatatctcgaaattacttaaagatagtgactacacagcagcagctgcacgccttaaagtttcggagcttgcgattcgtgtttttggtgcagttgaaggcaggggagtgggttttctaaaaaatggaaagcctaaaattttgtttgaacgtcaccgtatgtatgcatatttacgtttgaaaaaaggagctgcctttgcaaacaaaatggcagttgaacgtccaaatattgtaaataaaaaatcgggtggttatcagggcaatgaggccgaatatgtccgtttagaattagcaaagcagatcgatgttgaatgtgctttgatgtctgcaagctggggccagtttcaaatcatgggcgaaaactggaaagatctcggttatgcgtctgcccaagattttgtcgatcaacaatttgctagtgaatctttccagcttgaagcatttattcgatttatcgaatggaaaacaggcattatcgacgataaaaaagtcgcattgattgatgcgctgcgagctgaaaattgggacgctgtatttactctctacaacggaccaaattataaaaaacttgggtaccaggcaaaattccaaaaagagtgggatcacttggaaccaatttatggcggagccaaagcagcatga

SEQ ID NO: 69825 - DNA, 501 bp, Acinetobacter baumannii
atgaaaaaaccacagagccttcgaacacatttattaaatgcgataccagaactgcagcgtgatcctgagcgtgttcttatttttgttgacgaaggcaatgtccgcagtactttagcgaacggcctatcatttgaatatgcatacacactgacgatgatcttaactgattacgccggtgatttagctgcagtcagtattccggtgctcgattgggttcgagaaaatcaatctgaactaatggccaatcttgatcacgctaaaaagggcataaaatttgaagcagagattttagcaaacgacaaagtcgatttagcgattcaattgcctttgactgagcgcgtcattgtaaaacagaccaatgacggtctaaatgttagttatccagaagagccaaaatatcataaagctgaagaatccaaagaagtcacgctctatgataaagacggtaccgtcctagcatcttggatgtcacgtgaacctgaagaaggacgttatctgtaa

SEQ ID NO: 69826 - DNA, 453 bp, Acinetobacter baumannii
atggctgaactcgaatatctttctgagcatctcaatgcattactggcatcgttaagtgatgctgaaaaacgtaaatttgcaatgatgatcgctcgaaagattcgtgcgagccaaagtcagcgtatcacacgacagcaaaatcctgatggtagctcatatacaccgcgaaaaaatttacgtgcacgtaaaggcaaaataaaacaaaaaatgttcatgaagcttaaaacggcaaaattcatgaaaatagaaaaaattccagatggcgtgactattggatttgatcaacgagtatcaagacttgctcgtattcaccaggatggattaatcgatacattaaagtacaacggcagaacatttaaagtcagatatgcacagcggatcttgcttggatttacagatgcagaaatagaaatgttcgaaaatgaagtttttaattttattgataaaaaataa

SEQ ID NO: 69827 - DNA, 666 bp, Acinetobacter baumannii
atgaatgcagatatcaatcgtcgcgtcgaaaatttgatccgtttcggacgaatcaagaccgtaactccgtctaaaccctttcatacagttacagtcaatctaggtgacatcgtaaccaagcagttacgtgttcttaatttgagagctggcaaagactcgactcatgatttacctagcatcaatgaagaatgtattgtttttagcccctgcggagttttagagctgggtatcgttgttgtaggtctaaacaatgaagatttccctacaccatcccaagatcctgatatcaagctgcgcatgtttgaagacggtgcggtcattagttacgacaccaaaaaccatagtttacaagccattttacccgctgacgcaactgcaattcttactgcaccaggtggactcactgtgaatgccgataccaccatcaatggcaaactttttgtcaatggcgaccagaccaacgttggtaatgtccaaattgagggcagtactgccatgactggaaacaatacggtgggtggtagccagttagtacagggatccagtcactcttctggcgattttagtactgaaggcgatgttaaagctggtgatataagtctgaaatcacacaaaacttcaggtgtgaaatctggcggagatgtatctggaggaccaacgccatga

SEQ ID NO: 69828 - DNA, 345 bp, Acinetobacter baumannii
atgatgtcacgccaaaacggtgtctctatttcagagcttgaaagcattcaacaatcaattcaagacattgtcacaactccgcttggctctcgaatcatgcgtcgagactacggttctatcattcccgatctgatcgatcagccaatgagtgatgtacttaaagtcaagatttttagtgcaatctacacgccagttactcggtgggaagagcgtatcagtatagaaagtatgaaggtgagtgatgtttattctggaggactgcaactggatttagaagccgttcatacactgactggccaagcactcaacttaaacattccgctgcaaatgggatcttcaatatga

SEQ ID NO: 69829 - DNA, 891 bp, Acinetobacter baumannii
atgagcgtcgacttttcacaacttaccaagcccagcatggttgaagaaatcgactttgaatcgattcttgctgagcgtaaagaaaaactgattagcttgtttgacagtactgatcaggatcagattcgtcagactttacagcgtgaaagcgaaccactgacaaagtttttagaagaaaatgcctatcgtgaagtcattctgcgtaaccgcatcaataatgcagcactttctgtactactagcttttgctgaaaagaccgatcttgatgccgtcgtagctaactatggcattaaacgattactgattaatgaagcgactgcagacagcgatgctgtgtatgaaaccgatgatgctttacgttatcgcgcatctctagtttttgactctttatccgttgctggtcccacctctgcatacgaataccatgcattgagtgccgatggacgtgtagccgatgccaaagcatcatcgccagcccctgccgaagcgctggtcaccatcttacaaaatgatactgaaacaggtgcagcaaccgacgcactattatcaatcgtacaaagctatttaaatgatgatgtacgtcggcccgtcgcagatcgactgacagttcaatcggtcgatgtgatcccttttgaactcaccgccacaatatttactaacaatttacccgaatcagactctctaatttcagcagccaccgcagcagtcaaaaaatatttagatgaaagccgacgtattggccggtctatttacctttctaaaatttacaacttgctgcatgtgtcaggcgttgttcatgttgtgatttcaagccctgctgcagatgttgaggtaagccacgttcaagtcgcgcactgtaccaacattacgataaatgctggagaagcttga

SEQ ID NO: 69830 - DNA, 612 bp, Acinetobacter baumannii
atgaataaacttctcccgcctaactcaacactacttgaacgcaatgtttgtagtgtgacttctgaagccacggacttagacgttaatattcgagcaattaccacacttaaaaatacaccgaacgatttcttacctttgatcgcttggcaaaacagtgtcgaccgctggaatcgaaactggtcagacaaagaaaaaattgcccaaattcgtgcttcttttcagattcatcaaaagaaaggcacagtcgcagcacttaaagaaattaccaaagcctttggatactccttatcagtgaccgagtggtggcaagagcagccaaccaatacaccaggaacatttcaaatcaccattgataccgaaggcaatgaactcagcgaatcaggctacaacaccctgattgccttattgaatgatgcaaaacctctgacacgtgaactcaaaggcattgaagttaatgttgtctcagtgcgtggtgataccaatatcgcttgtgccatgtacgacggtgaagacgtcaccatctatcccaaacaaaacgaatttactcctatttgttgtccgatttttgtcttctttggacatgacgacaccaccatctatccgagagcttaa

SEQ ID NO: 69831 - DNA, 2532 bp, Acinetobacter baumannii
atggcagaacaaatttattattcagttttcacaaaaaaaggtctggaacttctaactgaagcaattcgtaatggcaccaagcttgggattacaagcatggcctttggtgatggcggtggttcattacctgttccgaatgaaaattttacatcgatggtgcgtgaagtacatcgaactcaactaaatagtctcgcaccggatccaaacaatgccaactggttacgtgcagaggctattattgcttcagccataggtggttttaatattcgtgaattgggattgtatgctggcgatgtgttagtcgcatactcaaactatccagccacctataagccaaatccaagcgacggtactgcacggattatgacatttcgcatgattttgcaaattgataatgttgcaaactttgaacttgtcattgatccagatgtcgttcttgcgacgatccaaaaagttgaagatgcgaaacaagatgcaattaaatatgcagatgaaaccaaaacgcatacagtcgatgctttgattgatttagatgcaattacgacgaagtgggatggacgtaccgtttacgttaaaggttatcataaaccagaaaatctagctttagcacaaccatttaaaggtggtggtacacgtatctataacgacagcagaaaaaacgaaaatgatgggtttctgtgtatcaatggctgggtacttcagttagacaacaacgttgtcacacctgaacaagcgggtgccaaaggtgacaacaaaacagacgactatgaagcgttaaaaaaagtttttacatcacgattaaaagttgaatgcgactgttttgcaacttataaaacgagtaaaccgattgagctgtttacaggacaaaaaattgcaggcaatggtgcaacaatttcaaaatattcagcaagcaccacaggtattaaaggaagaacagatcccgcaggaaacccgtataactacgaccaagactgtgcagttgtatttggggcattctatggatattacagttacattaatattgaaaacttgaccatcgttaaagaaaaagtcaatggtgaagatgtcggaaaagtattttttgcgccttatatcagcatgtccaacctccagtcactcacagtaaaaggcggtgagtatggcttttattgtgaagatatatggatgatgaactggactcgctgttcagcatattcaaaatgcggtttttacattggtacagggacttctaacactttagatacgtgttggtctaaagaaacaaaagcgggttattcatcttatagaatacataatttagtttattcgacgctaaaaaactgttgtgctgaatatgttggagaagatgggaaaccagctgaatctgcatttcatatcacgaattcagatttaacaatgattggatgcggtattgaaggcattcatgcatataatctactgagaatctcatactcatggatacgcatcgaatccccaagtttcatctacggaatagataataaatatcggcatggaatttacacgggtttgattgatatttcgagttctgactcagttgtaacgctttctggtggcagaattaatactaaaaattcaggaagcttcgcagatgcggttagggttgacggtggcacattcaattatgattcaccaatgtgggtaggagtgggctttccagatgatgttgctgactttaaaattcgtatatcaaattgggcagcaattctaaatttaagcgatttcgttggtcgaaagtacacatttaacggtcgttcaaaagagtgggttaataaaactcctacttctttcgttaatggattaattatcaatgacttatcaaaagaaaatttaaacagtatccgtcgaaatactgtattttcaatgcaagggaacgcaaatttaggaagcaaagctaataattatcctgttgacggcttcggtggtgctattcttacaattgcttctaatgatgccggactttacacaaacgcagttcaactggcttttcctgttaattctaaaactgcctatcttaggaatgcggaatgggggggggcatacaaagcctggaattatttttatacttctgctaacacgacagtcacagcagacggtactctaaaagaagcttcaccgatcgtcaaattattttcagatcacattgaatctaatgatgaagctgctgaacaaaatccagaatttgagaaaattgggatcggtcattatcttattaaaaatacgttaggattcgcaaaagaggggtggtggattaatgtaccgactgacagcaacggcaataaaatttgtgcaataaaatatgaaatttttgaaaacggtgacatcgaaatcaaaacatttaaacgtaaatttgatatcgaaacagcttctgttgtcgctgatgaagctcaaccaatagatattcctaacaatatgcacggtgaacaacgttggattgatatacggttgcaagaggctcaaagagaggtcgttgtcaatgatctaatgacttcagaagacgaggagctggtttga

SEQ ID NO: 69832 - DNA, 516 bp, Acinetobacter baumannii
atggctctaccaaaaaaattaaagctttcgaatctatataacgaaggtaattcatatcttggccaaacgggtgaagtgactttgcctaagctcggtcgcaagttagaaaactggcgtggcggtggcatgaacggcaacattaagtgggatgccggtctagctgatgatatcaacgagatgacatggaaactaggtggcatcgataagttgattttacagcaatggggtgctgcatccgtttcagcattcggtctacgttttgcgggttcatttcagcgtgacgacactggcgaaaccagtgcagtcgaagtcgtggttcgtggtcgccatgaggagattgattttggtaactacaaaccgggtgatgacacggaaaccacagttaaaaccatttggtcttactacaaactcactatcgatggtgaaaaaatcattgagatcgatattcctggtggcatcgaaatcgtgaacggtatcgatcttcaagaaaagcatcgtcaaaacatcggtctataa

SEQ ID NO: 69833 - DNA, 336 bp, Acinetobacter baumannii
gtgaaaacattagagcaatttgaaaatacagcagccatcaacatggaggttcaaacagtcgatctggaaaagccagtcatgatgggtaatttagaaattaacacattagaaattcgtaaaccgaatgtacaagctttgcaaggcatcaaaatttcagatttattgcagggtgatgtcacagccgtttgtacggtattaccgcgtgtatgcacacctgagctgacaaaatcacaaatcagtcagcttgagccagccgacattacacaaatttgtggagtcatcatgctttttttgcaaccgaaatcagtacgtgcggaagtattacgccaaaagtag

SEQ ID NO: 69834 - DNA, 2937 bp, Acinetobacter baumannii
atgaaacccttaaaacttgaagtcctgtttggatcaaaagacagcttgagtcccgtactcaagctgatgatcggcaacagtaaagctgcttcaaatgcgctaaaacgaaccagtgacgaagtcaaaaaactcaatgatcagcaaaaacagatcgatggttatgtaaagcaaaagaaagccaccgaggaaagcgccaaagcacttaaagacatgcaggatcgcattaaaaccttgcgccagcagatgaatagcaatccaagtgcagaattaacacgtgattttgaaaaggccaaagcagcagcaaaacggctgaaagattcgcatcagcaaaatacacagcagctgcatcaacttcgtactgagatgaatcaatccgggttatctaccagtaacttatctcagcatcaatctgaattacgtcgtcgtacagatcaagcaacatcagagcttgaacgacagcgccgaacactccgtaatttaaacaatgtgcagcagcaacaccaacgctacagccaaaatgcacgtacagcaggcatgacgggaatgatgatggctggtgcaggcgtaggtacactttatgcaatgcgcaaaccgatcgatgagtcaaagcgcgtcgacatcgaagagaatcggattgcatcattgggttttggaaaacaagccactgaagaagcaattcaatatgccagagcgatgaaaactttcggtaccagtacgcttgataatttaacgttagtgcgtgacggtgtaactgcgttcggcgatgtgcatcatgcacaatgggtcgcaccaacgttggccaagatgaaatttgcaaatgaagccatgtatggtgatcacggtgtcgaaaatgaaaaaaaattcatggacatgctcaaagtcatcgaaatgcggaatggcttaaaaagcaaggaatcattcacagagcaagccaatatcattcagcaagtcatcacggccacgggtggacgtgtacaagcagaggaatggttaaacgtcatcaaaacaggtggtattgctgcaaagggtatggataacaaagccttttattacaaaatggaaccactggtgcaggaaatgggcggttttcgtgtcggtacctccatgatgtctgcttatcaaaacttgtaccagggtagaaccacgcagcgagcagctgcaaatctcgataaatttggtctaattggcgattattcaaaggtcaaacacaataaaaccggtgatttgtcttatctcgatatcggtgcaattaaaaacgctgcattgttcaaaaaagatcagtttgcatggatggagcaagtactggtaccggctctaaatgccaaaggcattaccaaagaaagtgacgtcatcgatgcgatcggcagtattttcagtaaccgtactgcatcaaacctttttgctcaaatgtatatgcagcgtgatcagattcataaaaatgccaagctaaatgaaggtgcctttaacattgatcagttagagaaacaggcacaaggcaccacggctggtaaagagctggatgcaaaagcaaaactccacgatgcttatttacagtttggccagaccattttaccgatctacacacaagcattaatcatggcatccaatgccatgcaaggcttcacaggctggatgcagcaaaacccaacactggccaaagcactcggtactggcctattggttattgctgcagggctagtggccattggtggattgctcttggtattttccccgcttattttaagtatgttgagcctaaggctcatgatggtcacattgggcgttcaaggcagcgcattaagcttcgtatttaagatgctgacatcgccatttaaagccctcggctcagctatcatgtggattggtcgaatgttcctattagtcggtcgtatgatgatggctaatccgattctcttagcgataacgttacttgcgacagcagcatatcttatttataagaattgggatccaataaagactttctttagtgatttatggaataaggtcgtatctgcatttcaaactggaattaattggattaaaggaattattcagtctgttgatactgtttttgccaataatcctatcttaaatttccttttgccatttattggcattcctagaatgatcatagctaactggtcaagtattacagctttcttcagtgaagtttggacatcgattacttcaggagcaagtgaactttggaattctatatcgctattattcagtcctattggacaatggtttgcagaaaaatgggatgaaattaaacgatcagccgccacggcttggaatagcgttataggttatgtttacaatgcttgggaaacactaaaaaatgtaatttctaataatccattgcttcagagaataatggacgggtggaacaccatatttacatatttggggacacttaaagacaaaatgttgtctattggaagcaatattatcaatggattgatagatggtattaaatctggattcacgcaacttaaatctgtatggggaatggttaataattacatgccagattttatgcgaaagagaatggatattcattctccaagccgagtcatggctggtctcggcggtcacatcatcggtggtattggcatgggtcttactcaggcatttcctgagctcaagaacaaatacaatcaggtcctcaatctatttaccaataaatctcagtcaccggtcttagatcagattgatattgctgcgccggtaatgtctaagattcaggcagcgccaaatcttaccccaagccgtcagtcttcattggcagtggcaggggatacctacaccattcacattcacgctgcaccaggacaaatcgttcaagatcttgaacgtcaaattgaacaagtcgtcatgcgaatccagcgtgacaaactggcgcgagttcgtaccatcatgtccgaccaggagtaa

SEQ ID NO: 69835 - DNA, 1497 bp, Acinetobacter baumannii
atgactgtactttccacactcaatgatctggctattgatgtcttaaaggcaaatccgcttcccatttttaagctaatcgtcgatggcttggatatttcatccaagatcaacaatcgactcatacagatgcgtatcgaaaataaacgtggctttgaagtcgatacgctagatctctcactttcagatcacgatggtttgctgacaatcccaaacaaaggggcaattcttcaagcatggataggctggcagcattctggcttggtctacaagggcagttacatcgtcaaagaggttgagcatgccggtgcgcccgatgttcttcgtattcgagcaaccagcgcagatatgaaaaagtcactcaaacagaaaaaagagcgtagcttcgataacattgctcttggtgatttaatacgactgattgcccttgagcatgatcttaacgatagtgttgcagcagatctggccagccataaaattattcatatcgatcaaaatgagtcagatgcgaatttgattactcgtttagccgatgaacacgacgcgattgcgaccatcaaaaatggtaccttactttttatgcccaaaggccagagtcagaccatatctggccaagatctaccgacttacaagttgaccagggcaatgggtgatgatcatcgctatagctacagcgatggcggtgaagaagtcactgcaattcgcgcgttttattacgatgataaaatggctaaaaagctcgaggtcattgtcggggatcaatcgaaccaaaacatcaaagagctacgtcatattcatcgagacaaacaaaccgcgacactagctgcttcagctaaattgaaccacttcaaacgtaccagtgaaacactcagttataagctggccagaggtgtgccagacatcataccagagcagacttttctatttgttggggttaaggagcagatcgatgaaatctactggctcgcgaccaccattacggacacattggatgcttcaagcggttacaccacagatctgcagctcgaagtgtttttcccggatgcagatgatgtatccgaactatttgaagatcagtttgtcttagaaaaagataaaaaatggacgggcgtggtggtgtattaccaagacggtgaaaaggcaataaaactgaccaagggtgatcaatccaatccaaaacattttacctatctgtacgtgaccaaagcaggcgcacagcaacgtttagatcgtgaatatgctttactggatctcgaaacaggcaaattttcagcacataatgagcttgatattaagccttacactggcttgaaaatccaatacacgattggaaaatctatatccccacgctattgggcaacactgggtgatcaatctaatcccaaggtgattgataaagtattgaaaagtaaaaaagcggcagaaaaacgcttaaaacgggaattgccaagactcaatgcgaagaagaacatgctggagcaagtgaaggaagcaaaataa

SEQ ID NO: 69836 - DNA, 279 bp, Acinetobacter baumannii
gtgagtaattttgattcaaaaatttcaaccattgcgatcggtattatccaagccatgcaaacggctcaagcaatttatattgtcgtggctaaagcaatggactcagttgaaagcacaaatgcagataagtctggaggcgataaaaaggcatgggtgatggcttatgcaaaaaatattgtgttggcattaggagacaaatgggacgagcttgaatcaaaagtttcattgttcatcgatcaacttaaatcagcatataacgcggcaaaagtccttttttaa

SEQ ID NO: 69837 - DNA, 423 bp, Acinetobacter baumannii
atgaataaacattcatttttaaaacctatctggtctgtattgtttggagattttattcttattaaatcaagagcagttggtaaaactattccaatgcccttagtagccagaataattgagttagaatgggatttctcaaaaaatttctgttttaatccatctcaaatatcaaaagttaaagatagaaaattacgcaaagcgtgctatcaagcttttgcgctatataaaaaatcttttaaacctataccgaagcctaaattaaagatctggagagatgagtggccaagattaatcaaaagggcaactcaggtttggtcggatcatgcagtggatgctttttcatttttttcgcattgtgttgatcagaaagccaagtttgctgctcaatatgaatgtagatgggatttgggtaaagagctatga

SEQ ID NO: 69838 - DNA, 225 bp, Acinetobacter baumannii
atgaatccagaagaactattcgaattgttttttcaagacatcacgccagatatgaatccaccaggtatgaaatatcattgtgaagcgatgcgcagctggtggcgcgaacgctttatgaatgcttattacggtgtagaagaaccgtggagattacgcagttgggcagaagcaccacagatgtggttgaaagggtatagacagtgccagaaaaatgagacgcaatag

SEQ ID NO: 69839 - DNA, 909 bp, Acinetobacter baumannii
atggtaacgattacattagcaaagtctttagaaactggccaaataattactacagcggaagcagatcatcagcgtgaattgggaaatattaaatctaaatatttatttgaatgtatagatgagaattgtgacgcacagataacttgtgcgaatttattaaaagaagtttcaaaacgaaaaaaagaaccttattacatttatgtcggtgatcatactccagcttgtaaagaaaaagacaaaatagaaaaaatcgaacgagaactacaggaacgtcaagagtcaaaaccaagaaggtatatttcggataaatttgcatttttaaatttagataagccttcaacaaaaaaaactgaaacagctacacaaggtgcatctgccttaactgaccctaccaccaatagttcaggcactacaaatggacaaagccaatttggtgtaagaccatctaaaaaagcattgtcgagttgggttaaactttttaatgatgatgctgatatttcagtaatttataatgatgaagaaattcatattcgtgatttatttgtgaatatggatgaagttacaaatatcgaagatcttgaggaagaaccaaaaatatattatggaacagcttggattaatcctaaacccaacgggattcaatttactttcagtaaaaaagtccagcttgatgaattaaatcaaaatccaagcttgatgttatatacaaataaaattgctaatgaagctgaaaatggtcgtttttcagaaaaaactttaaagcaacttgctgcaagaagaactaagaataataaaccgcaacctattactgtttatatttttagccaattgcctcctcaattaagtaaaaatggtaaatttattaatttctacgccaaagaattaacttatatttattatgaaaaatga

SEQ ID NO: 69840 - DNA, 468 bp, Acinetobacter baumannii
atgggtaaaagtttgattcgtatttttttattgatatccatctcaattttttcaaatttaagttttgctcaaagtgcatttgaagtcgcattgaaacttgatattaaaggtttagattttctgtatccattcaatgaaaaaaatgatttaaataaacagcttggtcgtcctaatcagtacattgaaaaagtttcgtggccagatccactaattgatccaaagtttgaaagtgatggatattacgaaagtgataatcctgacgatttcattggcggtacaattgagaaatttaggaatcaggcagatttggaaagacgttataattatattaagagcgtacatttggcgatgcccatgactaatcaatatatgtacaaaaagggcctgtttttacttcgtcttgatcgtgaaatgacaccaacagatgctaaaaaatatgaacaaaaattttataaggcagtgaaataa

SEQ ID NO: 69841 - DNA, 909 bp, Acinetobacter baumannii
atggataaaaaaatagaaaatttagatgaagaactaataaatagatttatggggactgcgataattgataaagaaataaataattttttaggattcttagaaggcattattttagatcatacaatcaataagaaagaaatttatgccttacaggtatggatggaaagaaatcctgaaatctattgtcaatatccttttgatcatttaattcacttattaggtcaaacagttattggttcgcaaaaattagatgaagaaaagtgcaaacaatttgttgaagtgattaagatttttatttcaggaaagttctattcaaaaaatactagagatgttcaacggcttcacgggctattggctggagtagtttgcgatggtactttgagtatagatgaagctaaggctttaaatacttggatgaaagaacatgactatttagaagatgatgtattttttcaggaagtttatacatcgttacgtcctgtaagaactaaacaagatgatttaacagattttgatattcaagcattgttcaaacaaataaaacggtatgttgatccagatgatcatggcacattgagaactaaaattgaaacaatagataatcctgatttttttaaaggtcaactactaattgaaaatgccctttattgttttacaggtacttcaagccgtttcaagaaaaaagactggaaagctctaattgagaacaatggcggtaagttcattgatgatatgactaccactgtaaattatttagtaatctgtaataaaggtaacaaagcttgggcacatgttagctatggtcgaaaatttgaagaagcaaaaaaatggcagcaacagggtcatgatataaaaattattactgaggatgattttattcaagcaattggattaccaattgaaaattga

SEQ ID NO: 69842 - DNA, 813 bp, Acinetobacter baumannii
atgaccacattcgaattacaacatgcagtttttatccaaaacgaccaaatcaaaacagatagcctaaaagtggccgaagtctttggtaaacgccacagcgacattattcgtgcaataaaaaacatagaatgttcacctgatttcactgaacgcaattttgcgctcagtgaatatgaggacaaatcaggtcgtgctttacccatgtacgaaatgaccaaagatggttttgtcttcctggccatgagctttacaggtgccaaagctgcccaagttaaagaagcctatatcaaagcctttaaccacatggcagaagtgctatacaaacaacaaaatcaaatccagaccatcgatgttggttcggtggtacgtctacgctcaggaagtccagatctcaccgtaaatcatgtttttgatgacgttgcagaggtcatttggtttagaggagggcgaattgtccgggagcaattacctattagttgtctaaccttaggcgaaagtgaccgtttagctccaactgtcagctataccctcgatacgttttggtcaaacctatacaactatggtgtacacaaccttaatcacagcaaccgtaccgatcaaatcgcgcttaacatttcccaagtcgtcgatcttttcccacaactattcaccagaaatgacctgttgcaaaacttgccacatagcaaaccaccatatccacaatatgtcgaacacaatgttcccatgcaaagtcgacttgaaagaaaaactgtccgctgctggatatttcaaggcaatcatccaaccatgattgatgtaaaagcaaaggggtaa

SEQ ID NO: 69843 - DNA, 552 bp, Acinetobacter baumannii
atgaacgaaaacattattccctacgtacctattgcagcgcgtgtacaagcaagcaatccaaacagccagcttgtctgccagcagttttttaatatggtcgatcaattggtcaaagcacaaattacatttaatcacgatacaacaatcggatttttatcaatttgtcctgatcaaattaacgatttaatagaacaactttcaaaaactgatcattcaatagataaattagatataaaaatcttagagttagctctaaatgatttaacttatcctaagtatttgggagtacatcaggttaccagtccaatctggaataacacctcggttgcagtctggcaatttcaattaaatagaattgcgagagataaaaacatgcaaccttatgacaatgattttctattagatcaagtattagccacactacgcatttggagaaattcactcgaagccgtcggaaacgacactcaggtgacttacaacaacaatgatctgatttataaactcatagatcttgaagacaaacttgaaaaagttcaggatcaactagagtaa

SEQ ID NO: 69844 - DNA, 351 bp, Acinetobacter baumannii
atgccgtctattgaccctgaaatttcaggtgaaattgctcatcgtttcaaagttgagctggataacaagcatttacgtgctaaaacgttgtcacgtgagattggagcaagtgaaaatacgctgggagcatatgtacgtgggaatgtgccggaccagtgggtatatctaaaccgattgcagaaacaaggcgttgatattcgttatgtattgcttggaatagatccggactttagtggcttaaccagtgaagaaagtgtgttgttaaaggcctatagacagttaagccctgaaggacaggctgcattacttggcttaagtaaggcgtatgcaaaagatgtggaacccaaataa

SEQ ID NO: 69845 - DNA, 195 bp, Acinetobacter baumannii
atgagcaaacaaatttcaccttacgctacgcgtcctagatctaaaaagattaatggtgggcgtgtccgctgtgttgtgtatctacccaaagaagaagtggacgaactcgacgctattgttgaaaaaactgacatgagtcgatcaagtctcatcgcacaaacctatttcgttggaaaacaagcaaccactaattaa

SEQ ID NO: 69846 - DNA, 246 bp, Acinetobacter baumannii
atgtcaatccaaccaagacgcatcaaaagacaacttcgtgataatcgtttcagcatcaatctaactatcgatgaaactaatctacttactgcagcttcaaatcttactggagttgaaatcagtgttttgatccgtcagatggttatgaagcaagccattaaaacgcttatcgaagatcctgaagatgattttaatttgcaaaaattcttaagtgaaggcgcgcaagaacagctttcaaggagctga

SEQ ID NO: 69847 - DNA, 180 bp, Acinetobacter baumannii
atgctcacaagagaaatcgtactgactgaacaagaactcaaaattgtgcaagaggtacaaaaacaacttggcttagccacagttgaagaaactatggaatacctagcaagagaacgcattcaagaaaaattgttaaatcttgcaggtgaagaagtaaaacgcaaacagcactttttttaa

SEQ ID NO: 69848 - DNA, 2721 bp, Acinetobacter baumannii
atgatgtttccagaaaccaaagctttagttatagataaactcatggacgtttatagctttaagttaaaaagtggtaataaattacgtggcagatgtccgtcatgtaatcataaagaagcatcagcatgggtgcaccctgacgagccgtgggtagtattctgcccacgcaaaaataactgtggtaccgaaaaccatgttaaagaactatttcccgaactatttgaaaaatgggaaaaacgctttaaaccaacgcaagaagatccacttaaaaccgtaaatgcctatttggttgaagggcgtggttttaacatcgacaaactcaaatcactcacatatacccaagagtactataaagatccagatctgcatgttggatctatcaccatccgctttccaataacagatcagcagggcaatgaaggctggtggcaacggattttagatgaacagggcgttttaaagaaaacgaccttcaaattcggatggtcatctcaaaagcatgcatggctcacaccaaacacaaattattttgaatcaaaagaaatctggataaccgaaggcattttcgacaccatcgcgctttggctatctggtatcaccagtttttcagcattaagctgcaataattatccttcaattttcctaaaccaaattttggctaaatgtgccgaaacaggcaaaccattacctaaactggtttgggcatttgataatgaccaagctggccatgatggaattttaaaattcatagagcaagccagagccgatggttttgaatgtgaagcagcacttccaccagccggtcgcaaaaaaacggactggaacgatctatacaaacaagatcgacttaaatttacagatattgaaacctacaaatattacggttcattgcttattgcagaaaaagctgtggataaaggcatacttatctacaagcataaaggtaccaagtcatttccattcgacttcaacaatcaagtctattggttcaagctcgatatggataagtacgatgactatatgaaaggcatcgattttgaaaacgatgacaatcaagactgggcacaggaagaaaaagaccaagccatagcagaacgtcgtgatgcagcaatcttagctgctgccgatgcaaagctcatcatggattgccgtccacgcggactctactatcaatacatggcagaaattgacgaagccgactattactttcagatcgactttccgcgtggcgcgaaaaccataaaaaatacctttagcgcatcacacatatcatctgcatcagagttcaaaaagcgacttttacacgttgcaccaggtaaattttataagggtaatagcaatcagctcgatgcatttctcgaaagagaactgaccgatattaaacgtgtcgaattgatcaattatgtgggttacaacgcagatcataaagcctatgtacttggcgacattgcatatcaatctggacgtcaattcctgatcaataaagaagactattttgagttaccacggcataccaatcttaaatgtcgtaagccattcgctttagatatcaattcaaagatgaatgagtataaaaaagaatggattaacgacttgatcgatgcatatagcgtccgtggacttgtcaccctaactgcattttttggcagcttgtatgcacagcaaattagaaagatgcataaatcctttccatttttcgaagcaggtggtgaaccaggaacaggtaaatccacattgcttttattcttatggaagttgtttggccgtattaagtacgagggcattgatccagtcaaatcaacaaaatcaggtctgattcgtaccttcagacaagtctcaaaccttccagttgtcttgattgaatcagagcgagaaaacgaaaaaggggtagtaaagcaattcgattgggactcacttaaaacattgtttgatggcggatcactcggcgcgcagggcgttaaaaacggtggcaatgaaacctacgagccacctttcatgggcacaattattgtgagccaaaatgcagaggtggtatcgacgacaccaattatggaacgtatcgttcagatcaagttcaccaaagatcaactcagcaaaagcagcttatacgcagctcgcagacttgaaaaatatgagccacaagatgtaagtcagttcattttaaattgcttgaacagagaaaatgcagtcttagaaacgtatagagagggttttgaaaagtacgattcgattctacacgatgaaaaatttaacgtccgtagctcacgagtagtccaaaaccatgcccaatttttggcgttattcgattctctttgtaggcacattgtcgagataccagttgagatccagaagcaagttcatgctgaaattattgcaatggctcaaacacgcgacaaagtcatcaaatcagattcaatcatcgttcaaaacttctggaataccattgaagaaatggaatcttcaataccaaatcttcaacaccatgacagcgtattaaatcactctgctaaagctgacatttttgcaatcaattttgcgcatttatataaagtcgcagctgattatcgatattcactacctgaattaaacgaattacaaaccgcattacgtcacagtcttcattaccgctttattgaagcgaataagccgatacagagcaaaattgcaaatatgagcaaacgatgctggatcttcgaaaaaccagcgtcacaacgggactaa

SEQ ID NO: 69849 - DNA, 198 bp, Acinetobacter baumannii
atgatcgataaagaaatgattgaaatcaaggtggtatttaaagcaatcaaaggaaaaatagaaagctttcgggagatgcaaactaaagagaatcagaaccggagtgaattgagctacccatatttatatggagcttctgaacaaacattaacatccattgaaacaatcattgatcaggaactttctaaacttagttga

SEQ ID NO: 69850 - DNA, 438 bp, Acinetobacter baumannii
atgcaacacgattctaacgtagaaacaccacaagcggaaattcctgaatatcttcgctgtgaaccacgtacctttaaagttactcaccacatgagtgatacgtgtgatcttcagttcacattagtcattaaatgcacagatgaaatgctgcatgaacacaatacattctggtcaaatcatcaaaatagattagatgagaatgggggagacatcgtcaaagtcatgttaaagatgattgcggttgacgttttcaatgcgtgttttcaaggaaaagataatgtcgggtatccaccatacagatggggaattaacaccatttttcagaaagaaggttgggactcagattgctttgaaatcaccaaactctattttgataattacatcagcggtgatgattttgagtttgaaccggttcaagcagaaggagcttcatcatga

SEQ ID NO: 69851 - DNA, 225 bp, Acinetobacter baumannii
atgagcgaaatctctactgcagttctaacaccgcacttaaatcatccaaacttttccggtggtagcgactactgcaaacgttgcaactatgcacataaaaaaagaaaggaaccactggtaccacggccattatctgactatgaaagaaaatttcgtcaaagatggtcaaatcagcaagttgtaattcttaaaaatatgccaagcaatgcagtactgggagcttaa

SEQ ID NO: 69852 - DNA, 489 bp, Acinetobacter baumannii
atgtcagagaaaacagaattacatctgaaatttgagtcaataatgggcaatgacttaaaagattttatctggaatgaagatctggaatgttatgacgactacacaactgaaatttgttggctaacatttttgaactcaattcagtatttaacgctcgataatcactgcatgattggccaaacatggtttatgaagggtacgccagtagcgaatctgatcaaacatgccgaacaggtttataaagccgaagcgatcactcaaaactcaaaaatcaaatttggtacagatgacaatagatcctggtttgcgcatgacgttccattttttgggactgttcagatggatcaatatgaagagcacggaatagtggaatgggacattcattttaatgagtgctggcaaggccctttcaattctaaagcacgctgcatccagcatcttgaagaatgcattcaagaaatgcgtgaagaacaggctcaggagggataa

SEQ ID NO: 69853 - DNA, 312 bp, Acinetobacter baumannii
atgtctaaatatcattgtaaatgtggtggtcttattcttcctgattttgattcattcaaggtgggtgatgaagtcaattgcatgctcgaaacccgtaaacctattggtaatggacttgtaagcatcaatcaaaaagctttcatcggaaaaattatcgatatcagtggagatgagttcagtatcaaatcaaaaaacaaaatctatgagttcaacagaagagagttttctccaatcgatgcaccagggccaattgaatatttccgaattggtaaatgtcgctgtgaattagaccaggagaagtctaatggctaa

SEQ ID NO: 69854 - DNA, 201 bp, Acinetobacter baumannii
atggctaaaaactcaaaatttgccatcacccgtggtggatggtggccatgcgaagaaaaagtcttactttcaatgcttaaagatcattatccggtgcaccgcattgcagaagtacttcagcgtgatcgaatgggcgtacatgcaaaaataaacgtgatgaaacgtcaaggtttgattgatatgggagtactagcagcatga

SEQ ID NO: 69855 - DNA, 354 bp, Acinetobacter baumannii
atgagaggaatcaataaagttattctggtcggatcactcggcgcaaatccaattgctaagcatttccctaacggcagcggttacgcgcaattttcaattgcaacaagtgaacgttggcaagataaacaaacgggtgaatatcgtgaaaataccgaatggcatcgcatcgtagcgcatggccgtttgggtgaaattgcatgccaatatctaaaaaaaggctcaaaagtctatatcgaaggttcattacacacacgtaaatggacagatcaaaaccgacaagaaaactacatcacggaagtgaaagttcatagccttcaagcacttgatagtgctccgattgcaagtccagtgtga

SEQ ID NO: 69856 - DNA, 726 bp, Acinetobacter baumannii
atgactgctctcatttttgatacagaaacacataaactgcatggcgatattattgaagctgcagcgatggaagttcattttcagccatttactgattatccaatcattccaactatgtttgatttcactaaacgctataaaccaagtgaaccaatctcaattgcagcgatggccatacatcatattgtggatgaagatcttgttaagtgtccttcatttaccaagttcaaactgccaaaagataatattgaatatctgatcggccataatattgactacgacatcgaagcgattgaacgtgctggtacagatacatcgagcatcaagcgaatctgcacattggcaatggccagatacctctggccacattttgagtctcataaattaacagctttggcttatcaattaagctctgatcggaaagcaacaaggcgaggtgtgagaggtgctcattctgctttgaatgattgcaaaacaacacatgcgcttttattgaatattgtccgagtaagacaaatcaaatcaatggaagagctttatcaattttcacaaatggccagaatacccacccatattttttatggccctcatcgaggtaaagccattgcagacctatccagctatgatctggaatacattgcaagaaagtcagatgatcaatatttactgactgcaatcgaagctgaacttcattcacgcgaagaagaggagcttcctttcatttaa

SEQ ID NO: 69857 - DNA, 240 bp, Acinetobacter baumannii
atgagctcaatacacgatcctagatacagaaagttgatacatgaccttattgctatacgtgagtcaaaaaaaataactcaggtagaactagcttcgtctttaaagaaacctcaatcttacatagcaaaagtagaaaattttgacagaagattagatgtactagagctgaatgattggctaaatgcgttaggtttatctataattagttttttagaagatagtttattaagtgacacctag

SEQ ID NO: 69858 - DNA, 363 bp, Acinetobacter baumannii
atgtgtttaactcaatctcttaatgaatgtttcgttgaattcttgacaaatacaagctttagatcagaagaattcaaagatgttaggaagatgtttgttaatgcctatccagaatttagatcgaactgtttttatcataaaacgtatcagatatttagacgtctacaaaaaagtggatatattgaattagatagttctacttttaattatagatatacatcgattaataaaagatcagaattgattgaaaatgaaggttgtcagcacgaaataataattcgttgtattccacatcaaaagtacagctacgcaaaaaaagatttaaaaacttttgaactacagatagtggtcttttctaagtag

SEQ ID NO: 69859 - DNA, 1839 bp, Acinetobacter baumannii
atggcaaaatattctgtacaccagcaaccagtagaaacattattggcttggattaaatctggtgaaatagctatccctgaaatacagcgtccatttgtttggaatagtagtaaagtccgtgacttgatggatagcctttataaaggttatcccgttggctatatcattacttggaaaaatcaagacatccgtttaaaagatggcacattgtccaatggtaaaaagattttaattgacggtcagcaacgtattactgctttgaccgcagcagttgtgggacaattggtattaaacaaagactataaagaagtacaaattaaaattgcatataacccaacagcaaaaggggacgagtctttttttgaagtgtgtaataccgcaattgagcgtgatccattgtgggtcaatgacatatcaccaattttgaatggtcaaatgtctatatcgcaagcacgtaaagcatatatggctttaaatcaggatgcagatgaagactttattgagaataagctagaagaacttaaagcgattaaaaattgtcagattggtattattgaacttgatgcaagtttagacattgatacggtcactgaaatctttatccgtattaaccaaaaaggtgtcgtgttaagtaatgccgatttcgttatgtctaagattgcatctgacgagcaatttggtggtaatcgcctacgtaagatgatcgactatttttgtcatttaatgaacgatggaagttttgataaaatgattaaacaaaatgatcaagattttgttaaatcagatgattacaaaacaattagttggattgcaacagttaatgatgatctgtatcagcccaattatatagatgtcttacgtgtcgcttatacctatcaatttaatcgaggtaagtttagcgatttggttgctttgttatcagggcgtgattttgaaaaccgtactaatctacaaagtattgctgaagaaagttatcaaaaacttggtgtaggattgaccgaattttttaataaaaccaactatcagcgttttattaatttaatccaatcggcagggtttattaaccgtaaattgatcagttcaaaaggtagcttaaactttgcctatgccttgtacctcagtttacgtagtaaaggcatggatgaaactaaaatacaaaatttagtgaagcgttggtttgtattaagcattttgacagggcgttattcgggatcatctgaatctgcaattgaacgtgatagcaagcaaatccttgataaagggattgaagtatatctacatcaaattgagcaggcagaattggatgatggtttttggacgtatcgcattgtcaatgatttagatagctcaagtacggtaaacaatgcttatttatgctatttggcatcgcaatgtaaaaataacgaatcagcatttttatctgaaagtatgagtgtacgtaatttgttagaacaaagtagtaatggtaatgtgcatcatatttttccaaaaaattatttaattaaaaaggattttaagaaaagtgattacaaccaagttgccaattatgcttttacagaacaacaaattaatatcaaattgggtgatttagcacctaaagagtatatggcaaaggtggtagatgaaattaaagctaaagaaatagccatcaatgagaataagccttatgaaagtgaatatagttcaattaaatcccaagatgtattaatagataataaggcattgaattgtatccctgaaagtttagatacatcggattatacccactacaacgactttttatcacagcgccgtaagttgatggcacaaaagattaaagcgttttacttaggtctttaa

SEQ ID NO: 69860 - DNA, 2364 bp, Acinetobacter baumannii
atggatcattcagtacataacaaacttgtgtcttttatttggtcaattgccgatgactgtttacgagatgtttatgtacgaggtaagtatcgtgacgtcattttacctatggtggtattacgccgtttagataccttacttgaaccgactaaacagcaagttttagatgaagtccgagaacaaaaagaagaacaagattttattgaattagatgctttgtctttgcaacacgtatcaggctatgtattttacaatacatctaagtggacattaaaaagcctttttgataccgcaaccaataatcagcaaatcttgcttgccaattttgaagattatttacggggttttagtgataacgttaaagaaattattacccgttttaatttacaaaaccaaatccgtcatatggcaaacaaagatgttttgttggatgtattggaaaaatttgtatcacctaaaatcaatttaagcccttttgatatgaccgaccccgatggttacaagttggcaggattgtccaacttgggcatgggatacgtttttgaagaattgatccgcaagtttaatgaagaaaataacgaagaagcgggtgagcattttaccccacgtgaagtgattgagttaatgacccatttggtttttgatccaattaaagatcaaatcccctatgctttatcggtatatgatcccgcttgcggtagtggtggcatgttgaccgagtcgcaaaactttatcgaagaacgctatggtgaaaatgttgatcgtgacatctttttatatggtaaagaaatcaatgatgaaacctacgccatttgtaaatcagatatgatgattaaggggaataaccctgaaaacatccgtgttgggtctacactatccaccgatgagtttgcatcgacccgctttgactttatgttgtctaatccaccgtatggtaaaagttgggcatctgagcaaaaatacattaaaaatggcaatgacgtgattgacccacgttttaaagtaattttaaaagactattggggcaatgaagctgagcttgatgcaacaccacggtcgagtgatggtcaattattgtttttgatggaaatggttagcaagatgaagcctaccacggttagcccgattggtagccgtattgcatcagtacataatgggtctagtctgtttacgggggatgcaggtggtggtgaaagcaatatccgccgttatatcattgaaaatgatttattaaatgcgattgtccaattaccaaataaccttttttacaacacaggtattaccacttatatttggttgttgtccaataacaagcctgaaaaccgtaaaggcaaagtacagttaatagatgccagtttgctataccgtaaattacgtaaaaacttgggtaataagaactgtgagtttgcacctgaacatattgcagagattgtacagtgctatttagatggtcatgagctaaaccgccaaattgatagcaatcatgacccaattgggcttgcagctaaagtatttgataatcaagattttggttattacaaagtcaatattgaacgtcccgaccgccgtaaagcccaatttagtttagataaattagagggcttaaagtttgataagtcgttacttgagcctatgcaatatatgcttgagaaatatggggatgatctttatacagccgagtttttaaagaaagttgaaaaagatgtcatggcttggtgtgatagtcaggacatcagtttaaataccaaagctaaaaccaagttgtttgatattaaacattggctgtctttaaatgctttatttgaatcagcaaaagccttaatgcagcacattggtaatgttgaatacaacgactacaatgtgtttaaaaaagatgtcgataaagcaattaatgatttaggtttatctttatccgcacctgaaaaaaatagcattttaaatgccgttagttggtatgacgaaacggcggaaaaagtcattaagaaagtgattaaattaaatgctgaaaagcgtgatgatttattaaattatttaggatgtcaggaaaaagaccttgccgactttggttactatgccacagtgaagtcaggtgagtatgtgacctatgaaagtaatgccgatatacgtgatagcgaatctatcccattaaaacaacatatccatacctattttttagatgaagttaagccacacgtagatgaggcttggattaatttagatagcgttaaaattggctatgagatcagctttaataagtatttttaccaacacaaaccattaagatcattagatgatgttgccaaagatattttggcacttgaaaaacaagctgatggtttgattgcacagattttaggaatttaa

SEQ ID NO: 69861 - DNA, 372 bp, Acinetobacter baumannii
atgcaattattatcagcttatgagaatccaaaatcgacagttttaggctttagatcattacaaatacaaatgacggatgatgatcagcatcaaatcacagcatttgatcccgatgtcattatggctgaaaccgagcatgaaaatagtttagttttatccatcgccgtgcaacattggttgggctatggcttggtttaccctaaattagatcaattggacataagtcaattacagcaaagataccccaaaatcattttgttggatgaaaatagccctgaacgtgatgtctttacccaatatgggcaagttgtgtctgaatgggatgaatatcaagcggaagtaaaaaagttggtgtatcacaccagtctttga

SEQ ID NO: 69862 - DNA, 1206 bp, Acinetobacter baumannii
atgaaacgagatgccattaaaaaaagacctttatccgacacgactttggcaagtttagaacccgaagacaaagattatcgtgaacgtgatacaggcggattgtattttgtggtgcaaaagacaggcaagaagtcttggcaattacgttataaaaatgaaaaaggcacttggtcatggaaagggattggtggatacccaagtgtgagtggtgcagcagcaaggcgtaaggcaaatgagttatctgaaaaattagccaatggggaagtgttagaaacaaagaagcacatcaaacaacagcagcaagagattgaggggcaaaagtttagtatcttaatggcggagtggttggatactagaaaatctgcatggggcgcagtaacttttgataaagcgcaaaaatctattaaccgtcatattatccctaaatttggcgagcgtgattttacggaaattacccctaaagaatggtttgacttctttcaaggtttgcaacgtgaattaaacatccacacccaagttgaaaaattaacatcttattgctgtaatgcttatgactgggcaaaattccaagcaaagatcaactttaacccgattggtgggatgaccaagcatttagataaaaataagaataagaaaaatatgaaagccgttagagttgatgagttaccccaattgattatagacatccgtaatcatcatcaacgtaaattagcgattggtttagagttaatggctttattattcccacgccccgtagaattacgttatgcgacatgggatcagtttgattttgataaagctatttggtcgaagcctgccgaaattatgaaaaaaaggatcgcccatgtcgtacctttacctagacaagccattacattattaaaagagttagagcaatatcgaacggaatctgagttattgtttgcaggtcgtaatagcctaagtaagcctatatcagacaatacctttaatatggcattaaaccgtatggggtataaagatcggcaaaacccacatggttttaggcatattgcaagtaccgcattaaataatcaatttagtgataaagcgcaagtggttgaagcatctttagcccatatgaaaaagggatcaaagggtagttatgataaagcgacacaccttgaagaacgagttgggatgatgcaatggtgggcagactatatagacaatttagtaaaagaataa

SEQ ID NO: 69863 - DNA, 1236 bp, Acinetobacter baumannii
atggatgttagagtttgttcaaatataaaactagacttatctaagtcatgtttaaatcatcatgttcagaacataaaactagatcaaacaataaatgttaatggggtcgttgtatttgacgacaatgctaaggttctccctctcatttctgaatatttatcctattactccaagcatgaaaaaatttcgtataagtcagcaagtacttatggtaagaatctaacttatttcctgcaatatatccgtacccgccaagattataatgatgatgaaagtgatgatgtatttatcactgttccttcatacgtaatacaagaatatttgacttttttgagtcgagaccaaaatatcagctcatctactgttagaaatcgtgatgcgactatacgtgcttttattgagtttctatgctcatctacagaaggtcataagccacttagacaagataatccttacgagaaaggctatctatcaaaagtaccaaaacgaaaagctattattgcttgtaatctagatgatctatttgtactaattgaatctacatcttctgaacgagaaagagttttacttcaatttttgtacgactcgggacttcgtcgttcagaacttcctcgtgttacgcttgaacattttaagaacactgtaaattttaattcccaaaaatttatctctcgcgaatcagataaacccatttatctagattacgtcccacttgaagttgaaggaagtaaaggtcgtggaaatgaactcaaacctcggtggacgttaattagctcagcaactattgagcgtattcaaaaatatcatgcttccccactatataaaaaatatgcaagaaaatatgctacgcctactgagactcctgcatttttaaatgctcaagggactccttacactccatctgccattaataaattattagaacgactaagcaagcgtgctattaagcaaggtcgtcttgatagacaaatatccccacataagctcagacatggtaatgcttatgcgattttacaatcaaatgacttggggaatgactatttagatcgacttgtgattttacaaaaaaacttaggccataatcacctaaataccactcaaatatataccagtattcctcaagatatctataactccatgtgtgatgaaaaaggtgatctcttaactagagccgaaaaaatgaaacgtttaagtgaaaaaactcagttaaagatcggtattaaggatataaaatga

SEQ ID NO: 69864 - DNA, 2868 bp, Acinetobacter baumannii
atgaaaaataatgggaaagccactgatcacctagtaaaaatatgggtagacaacctattacagtccccaaatcatctattaaagttaccacttagtaatgattttaagagcccttggggggttaatgttctgtctgattttttatcaaaagagatacctattactctgagcgaggctcgacgtagaaaacaccttacaatgccattaatagaaaagatggctgaaatgcaaattattgtagaagaagcatcaagcagagaaaattttattcgccagagaatactcgattggtatagtaatctgagctttgatgataaaaaaaacctcccccgcttagctttatatccgagtaatatttgttttaaatcaataggtagtgaacaacgctcttgggcatctttatcaactcaatatgaatggatcgcagaagtaattgattacattcatgaagaccttcataacttaggaattatctcggcagacttcaaaacaattaaaagtcgtaagagagcaattaaagatgctaagtctgttatcagccaatgggtatcaaccatatctgatgatatagacgccatgtgggatataccagttacaaaagccaatacagatttgggttttaacgtagcaatcgaacatattcaaaccgttctaggcatttcggagagctcagctaacaattatagagagttagcttatccattaactcaaaaaatgattgaaaaaggaattttagtatatccaaaaggcaactcaggagctggagccgttgaaagcaggaggaaactgctaaattggtacagaaagctaaacttgaaagaaaaaagccagttaccaatttttggtaacaaaatctcacttgggaaaatgcatacgaagcaatctcctattactcaaagtgatttacgttttgatattgtcaaagatgcttgggatttcattcacaaagatctcgaaaaacttggtttattaaatacgaattataaaagtgtttctgaacgaaatcatgaaaggaagaaacttctagatatacctcgtgaaactatgaaggagcgtttcaacagattagctactctcaaactcaatagtgtactcgacttcatcgaaccttctgagttagaaccttttattcagattgaacaactttttgcctcacagatgaaaaccctaccttctaattcaggacgaagtaactacacaaatgcatgcggcctatttgtagagtttctatctgaattatacggatctagccctttacgaattatcgacacttttgatgagtatctattatccaaatatagaagttatcttgaggacaaaataatacaaaacaatatatcaagccatcatgcaaatactattttaagttcagtacgtatgacattgaataggctgactaaagtaaagaatttagaatacagtttttttgatgtacagggcttcgatgtccataggcaaacagacacaaaaaaaccctttagtaagaatgaacgaattcaaatattagaggctatcgaaaaagcgatttctgaaactcaattaagtttagaaccctataaaaaaacaggtatcggaataaatcctctggatcaacatggaaatagaataaaaggtctatcaaatctagataatgctcgttggctgtttgaaaattttttggattgtaaacctgttcatcacaatacagctaaaacccatattgaaaaggcatttctcagcattattaaagattcgaaaaaaggtctgaatgaggtctatgaagaatggggaatcacaccgatgatcggaatagatttattagtaccttatattctaagactcgctcaagttacaggtctaaatactgattccatactatccctagacataaaggattttgaaactcgccatccagccacatctagaccatgcctaagatattggaaagagagatccgatgggtataaagagtatcatcttgatcttatcaaggcgaagataacttggctcacagaaagccaatctagctctgtaaaagaaattttcaaacaggtaattcaaatgactagctgcatccgtgaaaatatcaaggatagtgtgattaaggataggctcttcatttatcaatcaaatagtactaaaaaacacggacaaatcagttctttacttggaactatcgaaaaaaatgcgagtccattaggtcatagtattgctagatttattgataaatttcaattaaaaaatgaccatggccaacccttaatccttacattaagtcggtttagaccaagtttcgtaagtgaaatgcttgaagctgatgtacctatacatgagattcaattgatgcttggtcactcatccttgcatacaactattggctatatcgactctttagattttaattccattagcagaaagaggctcaatgagaaattgatggaaattcatcaatcaactttaaatagtcgctccgaagaaaaaattaaaacaatagaaatcaaaaatgaggaagagttgggagtaacatttaaaaccaatctagctgcatgcagaaatatttttgatccacctgactttgtaaaaaaaatggcttcttatactcctggaacgccctgctcgcaatataacaaatgcttaagttgtgacaacgtaattattacagcaaattatcttcctgagctatttgcaatgaagcgtgattacctagctattttagaaaattcacgagtgatggatactccctacggaaaaattatcaaagaaaacctagaactcctaagttatattacagatcctgagacttcagatttttcaaaggaagaactagaaattggaaagaatagatccaactatcttggatctacaataacaattgatggagtagtgtaa

SEQ ID NO: 69865 - DNA, 336 bp, Acinetobacter baumannii
atggataaggaagcgaaaataagtatattgacgggttttgttaatcatcgccgctatataatgaatgagctaaacactgctaagaatttagatagtgatcttcatccacaagaatctatagagtccactacatacataaacgctcttatggaaagatctgtctcaaaaatatctaaattttccgataatgtttgggattttaattctgattatcctaatgcagcacaaaatgtaaaaggcgcaaaactgcgcattaattttttaaaatacaaaaatattccaaagtttgtgctaacagaactaaaaatcatcttagaacttgctttacttaactga

SEQ ID NO: 69866 - DNA, 1767 bp, Acinetobacter baumannii
ttgctttacttaactgaacttaacagcaggaaaaataataaaaaagggattcttaaagttaactctttgattcctatttttgagaaagggttaacatttattaatcaaatattcatacaaataagtcaagacctaggttatgaatttgttcaaacacagattaaaacactctccgaggtaaataccgagcattaccatgaagctgccaaaaactacgaacatgtaaaaggtagagaattagatcaattttttgaatacttacgtagccctagtgctgttaaatatgtatttgataagcctctagcttatgttgaactaaatagtttaaattggaagaaacttccaagtactgaaaaaaagaataaggaaaaagttttacccgataatgtatttgaaaatttatccaaaatagcatctttaatcgtagtggactttttaaatgcgacaggtcaaaaatcaaagatcttggatatcaattctttagaagctttatactctagtaaatattcttcttgggcaaatcaagtaggagttaatcatgaaattttgaatgcctatattgcagttcgattgagaaataaagggtactcatcaagttccgttttaagcatcatcgagccctatgattggatgttaaataaaaatggcctagcatgtggattaacactgaggaaagccctaactagtcgcaactaccaattagataaactccgtgaatacttcaatctagtctcatattcatgcgtgtacttggtggctcaatatacaggtatgaggccatctgaattagcagaagtaaaagtaaaagattgctcatgtttagtagaggagcatgaagtctggctgattaaaagtactgtaaaaaagcatcaacaagagattaatacaggtttgtttgatgacaaatgggtggctatacctattgttagagatgcaatattagcagcatcatatatagcaaaaattaaatcatcaccttatcttatctcaaatatggacacagtgagctctagtaattcacctataccgatgggcagtactggcattacccatcagatgaataattttattgtgaaaattttggatgctactgtagctaatcaaattaaattttatccatatatgctacgccacactctgacctatcaattgtttagagcagaagtcagtttacctttaatatcttttcaattaaagcacttcgtagacagtgtgagtaaattcacctcacttggagcaacttcttcagttacgttaggctatggagagattggtgaaatgctctcaaaggatggaagccgaacaggtaataaatcattgcgacgctctgctgaattagaagctgttaaaactgttcacaatccaaatggtacatattatggtggtagagctgttgagcataaaactaatctgataaagttgtttcaaggctatatggctgaaggctacaccgaagaagaagtgtatgaagcaatggctgaccaaggaatggctattgtgtatgttggacaaggcatttgttatggtaatagaaatgaagaatacgatacgactttaccttgcatcggcagcctaagatgtaatcctgccagatgttcacaagctattgtcaccagtaaacatgctccgaaatggcgtgaagtctacatcttaaataaagcaaatcttaataaaccagaatatgctcataatagggagcaaattcaggcagcaattgacgaagctgtaatggttttaaatagtcttggtgaaatggttgaactatga

SEQ ID NO: 69867 - DNA, 594 bp, Acinetobacter baumannii
  misc_feature (55)..(59): n is a, c, g, or t
atgatgatcgcggtcgttcaagtggccgaggtcgtggtcgtagccgttatgatgnnnnntgatcgcggtcgttcaagtggccgaggtcgtggtcgcagccgttatgatgacgacgatgaagatgatgatcgtggccgttcaggtggccgaggtcgtggtcgcagccgtcgtgacgatgatgaagatgatgatcgtggccgttcaagtggccgaggtcgtggtcgcagccgttatgacgatgacgaagatgatgatcgtggccgttcaagtggtcgaggtcgtggtcgcagccgtcgtgacgatgatgacgaagatgatgatcgcggtcgttcaagtggccgaggtcgtggtcgcagccgttatgacgacgacgaagatgatgatcgtggccgttcaagtggccgaggccgtggtcgcagccgtgatgacgacgatgacgacgatgatcgtggtcgttcaagtagccgaggtcgtggccgtagccgttatgatgacgatgacgatgacgatgatgatcgacgtggtcgttcagatggccgtggacaaaactctcgtaatcaaaaacgcgatgcttatggacgctttacgtcttaa

SEQ ID NO: 69868 - DNA, 1224 bp, Acinetobacter baumannii; identical to SEQ ID NO: 62533

SEQ ID NO: 69869 - DNA, 204 bp, Acinetobacter baumannii
atggcagtaacagttcgtttaaatgacaaagagcaagaatctctacgaaagaagtgtgtagagctcaataaaattctgatcaataaaaatctacagccgatcaaggatagtgagcttgtacacatcatccttgatcaagctatagaaaatgttgagatatcagcacatggaaaagtagttgtaagaaacgcaaaagatctataa

SEQ ID NO: 69870 - DNA, 879 bp, Acinetobacter baumannii
  misc_feature (826)..(862): n is a, c, g, or t
ttgcataatgaagtagataccattgagcgagcggctgaaaatattcgtatgcttgtgccagaagcacgcgtggcggtagcacatggacaaatgcgtgaacgtgaacttgagcaagttatgcagcagttctaccacaaagaatataatgtgctggtgtgttcaaccattattgaaacgggtattgatgttccaaatgccaatacaattttaattgaacgtgcagataagcttggcttagcacaattgcaccagttgcgtggacgtgtaggtcgttcacatcaccaagcttatgcttacttattggtgccttcaatcaagcacttgaaaggtgatgctgaaaaacgtcttgatgcaattcaacgagcttctacattaggcgcaggctttatgctcgctacggaagatttagaaattcgtggtgctggtgaattgttgggtgagcaacaaagcggttcaatgcaggcgatcggatatagcttgtatatggaaatgcttgagaaagcgactaaagcaattcaacagggtaaaacaccgaatttcgatgcaccattgtcgttaactgcagaaattaacttacatattcccgcacttattccggatgattacttaggtgatgttcatcaacgtttattattctataaacgtattagtaatacagatactcaagaaaaactggataatattcgcatggagcttattgaccgttttggtgttccaccgcaatcagttaaacacttgtttagcgtgcatcagatccgcttaaaagcggagcatttgggtattacaaaaattgatattaatactcaaggcggcaacattgaatttnnnnnnnnnnnnnnnnnnnnnnnnnnnnnnnnnnnnnccagttcaggcgattag

SEQ ID NO: 69871 - DNA, 693 bp, Acinetobacter baumannii; identical to SEQ ID NO: 51770

SEQ ID NO: 69872 - DNA, 375 bp, Acinetobacter baumannii
atgtccgtcttattctgtttgcttatattccaaagtttatggaatgtggcagcggcattttgcgcccatgaaaatcaggaaaaagcattacatcattttggacatcatgctgctttgagttatgaatcttcacagcatagccatactgaaaagactgaggttgaagggattacgcataaatctcccctaagcttgtccgatcatcatgaccatttaccttcatgttttcatgttgtgattgtagaagcacaagaaaaaattgtttcaccgttaatacagtcatctgagccaaaacaacaatattattggtctaattcttataagtctcctcatatttctaaacaagacccgcctcctgttttaaccctgctatag

SEQ ID NO: 69873 - DNA, 1410 bp, Acinetobacter baumannii
atgtctatttttttatacgaaaaacgtttcgttagtctgagctcatcttggatacttaaatcattagttgttgcggttgcgctttcaactagtgttgtaacaactgcggctaattcaaatcaaaaccttgctgaaaatactcaaccgcagcgtatacagaatgttttaacgtttgagcaagtactagagcaggttaagcaatttcagacacaaacaggaatttggcaagctcaacaagatattgcagagagcaatatcagacagagccagttatgggaaaatccgacggtttctgtacagcaaacgggttttaaatctggaaaagatcaggaactagaacttggtatatcgcaaaaactagatgtttttggtgtacgttccgcagcaaaaaaactggcaagtgtccagcaaaatcaagttgagttaaatcaggttttatatgatgctcagctaaagcttgctgtcaaatatttatggtcacaagtttcgattttggagcttgaacatgaagttgccaaagcacaattaaaaacgagtaagaaccttttagatgctactcgtttacgctttcaggccggtagtattgctcaggttgatttagaccggactttaatgacgcatgttgaaaaccaacgtttatatcaggaagttgaattatcactaagtagtgccaaaagaaaattggcgaacttatggggtgagactgaagataacttcaccttacgtccagatataaaaagtgcgtggcctttaaaaaatgaaggtgacatcgatcaatacttaaaacagaatttgttagaacagtccatgcgacttcaagccatccaacaaaattctgaaattaattatttaaaagcaaaaaatcgtccaacacctaccgtaaatatgggcgtggttcgtagcaaaaccgcagaaacgagcagtaccgaaaatcagattcgagtaggtattgcggttcctttaaacatttttaatcgccagcaatatgccctgaaaattgcccaaagcaaacttgatttaattgcccagcagcaaagtttttataaaaagcaaagcctagattctattcgtactctacagtacgagttggctggtttaaagcagcaatataacttgatgaatgagcaacagattcctttatcagagacggtacaggagaaaatgttgcttggcttcaaagtcggtaaatttgcaattaccgatgttcagcaatctaccctgcaattacaagaacaaagattgaagaaagttcaactccttaaatctgcttggcaaaaagcaattgaggctgaaagtttagctctcgggatcgatccaaatatggtgatgtccggagatgcattaaatcaaattaatcaaaatttatggcaagacacctataagttgccaacagttggaggggcagagtaa

SEQ ID NO: 69874 - DNA, 1209 bp, Acinetobacter baumannii
atgtcagttaaaaaaatgaaaaaccaatgggttattgctctttcgctgctgattgcttgtcttgctttaagtgcttggttatttttctctggaaaaaaaacgtccaataccgagaacagtgaagaagggcatgcagaaggtgaagctggccatggtgagtctgaaaaagaggaaggaagtttaaatctcacttccaagcaactggttgaatatggtgtgaagttagagcaagtaggacgtggagaagttgagcagaatctctcatatcctgccaaacttgtagtaaatacagaccagcaagcacatgtctcttcaacattttctgcccgagtggatagtgtaaatgttgcgctgggacaacaagttgaaaagggacagacgcttgcgactttatttgtaccagatttggtcgatcaacaagctaacttaagcatggcgcaagaagcgctaatattagctcagcaagattatcagcgtgaaaaacaattgtgggagcaaggtgtttcagcacgacaagattatcagcgtgcttacaatgcttatcgtcaagcgcaaattcaggtacaagctgcaaatagccgtttaagtgccttgggagcgactcgctcaagtaaaggtcgatatgttttaactgcacctttaagcggtgtaatcagcagtaaagatattgttattggtgagcaaattggccctgaaaaacagttatttgttattgatcgcctagatcagctatgggttgagtttgtattgccaagtacaaataccaatattcagcctaatcaggaaattgaatttaaatcgctgcaaacgaacaatatttttaaagcacaggtacaaagtttaacgtcagaagcggatagtcaaactggtcgtttacaggttcgtgccaaggtgctgacaccttcaaaagaattacgccctaatttaatggtcaatgtattactcaaacaaaataatgcagcgactgtattacgagttaacaaggcagcggtacaacagattgatggaaagaatgtaatctttgttgcaaaaacggagaaggacaaaattcattttgctcctgttgctgtagagttaggcaattattcttcagatgcgcaatgggttgaggttaaatccggaattactgaaaagcagcaatatgtgactcaaggtagtttcttgctcaagtccgaactagaaaaaggggaggctgagcatggacattaa

SEQ ID NO: 69875 - DNA, 3159 bp, Acinetobacter baumannii
atggacattaataaacctgatttgccagcggctgaaggtttgtttgatcggatcattcagttttcaattaataacgccatttgggtcatgatgtttatcattgcttggattggtgtcggaatttatagctaccagaaactttcaattgatgccgtgccagatatcaccaacgtacaggtacaaatcaatagtcaggctaatggttttacagcaccggaagttgagcaaaggattacttatccgattgaaaatgctatgtctggtattccaaatctggaacagactcgttcaatttccagatatggtctttctcaggtcacgattatctttaaggatggtactgacatttactgggcaagacagttaattaatcaacgtttacaagaagctaagagtgctttacccgatagtattgatccacaaatgtctccaatttcaactggacttggtgagatttatcaatgggtggtaaaagcggaacctaatgctaaaaaagcagatggttcagcctatagcgcaatggatctgcgtgaaattcaagactggattattcggccccagttacaacgtgtacaagggatagccgaggttaatagcattggtggatacaacaaaacttatgtggtttcaccagatctaacgcggttacaacagttgcagattcctctcaccgatttacaagatgcgcttcaaaataacaatgaaaaccgcggtgccggatttattgaagagaatggtcagcaactcacagttcgtgttccgggtatgctgacgtcgatacaagatatccagaacgttacggtcgccacgaaaaacggtttgcctatacgggttgctgatgtggcctcagtatcgattggtcatgatttgcgtactggtggtgctacctataatggacaggaaactgttttaggtatcgccatgatgatgatgggtgaaaacagtaaaaccattgccaaagcgattgatcaaaaagttcaggaaatccaaagatcactccctcagggtgtggtgattgaaacagtctatgatcgtagtagcctcgtagataaagcaattaaaacagtagctaaaaatttgattgaaggagcgattttagtcatcgttatcctgttcatctttttaggaaactttcgtgccgctttaatcactgcttgtattattccattggcaatgctttttaccttaacgggcatggcagaacaaaaaatcagtgccaacctgatgagtttgggagctttagacttcgggatcattgtcgatggggcagttgttattgttgaaaactgtattcggcgtttagctgaagcgcagcatttaaaaggtcgcttactaacacgttcagaacgctttacagaggtctttctagccgctaaacaagcacgacgtccattaatatttggtcagattatcattatggtcgtgtacttaccaatttttgctttagcaggcgtagaagcaaaaatgttccatcctatggcaatgaccgtcgttttagcgttattgggagcaattattttatctgtgacctttgtgccggcagctgttgctttgtttgttacgggtgaggtgaaggaaaaagaaagccgctggatgatgaccttgaaaaaaggttatgcaggcttactcgataaggcttatgccttccgatatgttgttgtcacagcagcggtcagcatcttgattttgacaagtgcaattgcaacacgagtgggtagtgagttcgcacctcagttaagtgaaggtgattttgcactgcaactcatgcgtgcaccgagcactggcatagaagagtcgcttaagattcaggagaatgtggaaaagcagttattgaaagcttttcccgaaattaaagccatttttgcaagaacaggaacagccgaggttgctacagatgtcatgcctcctaatatttccgatggtattgttttattaaaaccacacgatcaatggccaaaccctaaagaaacgatagatgaactgcgtgccagaatgctgcagttcgtgaaccagattcctggtaataacagtgaattttcacaaccgattgaactacgttttaatgagcttatttcaggtgtacgtagtgatattggggtgaaaatttttggggacgatatgcaggttctcaatcaggaagcggaaaaaatagctcaacagctacgtagcattccgggtgccagtgaagtcaaagttgaacagactgacggtttgccattactaaatgtagatgttgatcatgcattggctgcccaatacggtctatcagtcaaatctattcaggatattgtggctgccagtattggagggcagagtgtagggcaaattttacagggagatagacgtttcgattttgtgattcgtttgcaggaaaacatgcgtacgcctcagcagttagctcagttaccgattcgcttaccaaatggtggtctgattcagttacaagacgtcgctaaggttgagaatattctaggccttgctcaagtaagtcgtgaaaatggtaagcgccgtgtcattgtgacagcaaatgtgcgtgaccgtgatcttgggtcttttgtacaagagatgcaaagcaaactggcacagcaaaagctacctagcggttactggttaggctatggaggacagtttgaaaatcttgcttctgctacagcaagaatgcaaatcgtcgtgccgatggcgctcatcatgatctttgtgttgctcatggctgtattcagtaattttaaagacagcttactggtatttagtggagttcctttcgctttatctggcggattagtggctttatggctgagagatataccactttccatgtctgctggggtcggttttatcgctttatcgggtgttgcagtattaaatggtttggtcatgctcacgtttattaaagagctgagaacaactttagatgttcatgcagcaacttggaaaggagcggtattacgattacgtccagtattaatgacagcatttgttgcttcacttggttttattccgatggctttggcaacaggaactggagccgaagtgcaacgacctttggcaacggtcgtaatcggtggcattatttcatctacgatattaactttggttttattaccggtcatttatcgatggatgaatgaaagcaaagcgaaaagcgctgagcattcataa

SEQ ID NO: 69876 - DNA, 333 bp, Acinetobacter baumannii
  misc_feature (142)..(151): n is a, c, g, or t
atggacaaattaacttttataaacggtgcaattgtttctgcgactgacattcgcaaatcttggagcaaaattgttcaatgtatcaaagatagccataaacctgtttttgtttgtacggacaatatgcccgaagctgttgttnnnnnnnnnnctgttgttttgagctttgaagaatttcaaaacatgcagaaaatcattgaagctgctcggcgtgaacagttagggcaacaaatgacttgtgatcttttgtatattgctcagttaactggtcaaccgatcaaacagatgcttttaaaccccaaaggtgtgtttgaagaagcaaaagagcaataa

SEQ ID NO: 69877 - DNA, 1227 bp, Acinetobacter baumannii
atgatgtttgttaaaagatttgtaatgagtagtggtgagcgatttgctgttcttttggatagcaatggtgttcctatgacttacccaaatttatatacgatcattcatttaagaaatcgtggtcaatcaatcaatacaatttcagctcttttagaagatattaagttgcttatccagttgttagataatttaggaattgacttggaacaaagggtaaaaagtaaagattttttgaaattaaatgaaatcgaaactatagcaaatttagctagtttcagtcgtagtcgattagatggaatggcttcaaataaaaaaattataaattttcgcaaaagtaataacagagagcgatctagagcaaaactggttgttactcaggattatgtgtccaaacaattaatatataggcgtttaactaattttgctgaatatattggatggttagagacgtattttcattcatcagcaataacaagtacaaaacgttttttaacatctcgtagacctcaaaagtccatggatactcagtctgaatataagtcctttgatagtgagcaattacataaaattttaaaggcagttgatcctaatactcagaatcgcatttgggtttcagattacattaattatagaaatgagctgattatctatttatttttatatcttggatgccgtaaaggtgaattattgaatttaaaaattacagatataacatctcatcaagatggcactgtatatcttactataagacgtaatgctcacgatgagagtgattctagattgtatcaaccattggttaaaactagaagtaggtcaattgcagttaatcaaaacctaaagaagaaattagaaacttatattttaagttatagatcaaccgtgtcgaatgcagaacttacggactatttgatcttatcacacaaagcacagccactctcgatcactgctctagataaaattttctctcaaatttcgagaaccgttttatttaatgtacatgcacatgcatttagacatacttggaatgataaattttctgagaaatcgcaaaatctagtgtcatcaggtagaactactgaatctcaagttgaaaatgatcgtgcttatctgatgggttggataccaaattctcaaagtgcgagaagatattctagacgtgcagaaaataaaagagctatagaagttggtttaattatccaagaaaaatttgaggatggaaatgaataa

SEQ ID NO: 69878 - DNA, 483 bp, Acinetobacter baumannii; identical to SEQ ID NO: 59882

SEQ ID NO: 69879 - DNA, 279 bp, Acinetobacter baumannii
atgcttagctctgcagcgatggcgaaaactaactctggtgtatattcacctcaaaagggtgtcatttgtgataaatacatttgtgcggacaaaaaaggcgtctataaagcgaataaagctttctctcaaggcgattttgatacttcagcatttacattctcaaatggtgtgttttgtgataccaaaacaaagctatgtcatgtcgatcgatactttcaaaatgggcatcgtagcaaaattgataaaaatatgactgataaattattcaaaaataaataa

SEQ ID NO: 69880 - DNA, 171 bp, Acinetobacter baumannii
atgaactggctctttctatttgggatttacttacccattgcgattttttaccgtgcctctcataaattaacagtcaaagctgaagaagtgctctgggaaacaagaaacaaaggctttttgaatgaaaaagtcattgatgatcatgagagcaattttcttttcagtgtttga

SEQ ID NO: 69881 - DNA, 723 bp, Acinetobacter baumannii
atggtgttgactccaattgtcggtattatttttaaacgatttactcaagctaaagcaaaggtttcattggaagacatcaatattgctgatggactaagcggtagtgttttaatgattggcttcgggcgctttgggcaggtcaccagtcaattactgttggcaagaggcgtagatgtcaccattattgataataataccgacatgattcgaaacgctgaaaagtttggttttaaaatttattatggggatggctgtcgcctagatattttacatgcttccggtgctgcaacagcacaggcgattgtggtgtgtgtagatagtaaggaaacgactaatcgaattgttgaattggttactcacgaatttcctttggcaaaattattagtccgttcatatgaccgtgagcattcactgcatttagtcaaacaaaaagtagactttatgatccgtgaaacgtttgaatctgcgattaagtttggtggagtgattttacaagaacttggtgtagatgaagacgaagtagaaagaattaccgaggaaatacgcgatcttgataatgaacgctttgagactgaaatcgcagcagatgacgtaaatgcaggagtaggtatgcaatatacccatacttatcatccaagaccaactgcaccattgattcgaccaaagcgggaaggacgtattctaaataaagataatgcctcagaaaatgagggaactgattag

SEQ ID NO: 69882 - DNA, 396 bp, Acinetobacter baumannii
atgaaaaatgatgatgaaaaaaccttatttgcaaatcgtttgattaaagcaatgcaagctaaaggttatgaagctaaggcttctgttttagaaagagagttcaatttgaactattcaggcagacccatgactttacatggggtacgcaaatggctcatcggggaagctattccatcaggtgacaaattgcttacacttgctaaatggctagacgtaccgcctgaagaattggcttttgaaaaagacatccaaaaagcgattgcacaacgtgatgcccgttggcaacaagacattggttatagggacaaggaagtatttgaagcttttatagcactatcaccagcacataaaaaagtaattcgggatatgattatcgctctatctcaaaaaacataa

SEQ ID NO: 69883 - DNA, 3015 bp, Acinetobacter baumannii
atgattagtaaagtcaatgaattagaacttgaaaaaagcattgaacgggtgttggtggggatttgtaaagaagatgctttagcaggggaaaccccacaacataatggcttgggctatgttatgggacaacccaatgactttaataagcaatatgccgttgatgaaaagtttttattccagtttttagaactcacccaaaaagacagccttgaagcatttaaacaatataatccaaatgattggaaaattaaactattagaccgttttgataaattgatcaaacgacatggcatcgcttatatgctgaaaaaagggatgaaaatggatgatttacacttccattttatgtatccatgtccattggcaagcagtagcctatcagtccatcaaaattttaatgccaatatttttagtgtaacaagacaattacgatattccactaaaaacgcaggcgaagaaatagatgttgttttatttttgaatggtttgccattggtcacaatggaacttaaaaatgcatggacagggcaaaatgcccgttatcatgcacaaaagcaatatcgtgaagatcgagatccaaaccaaccattattaagctttgcacgttgtctagtccactttgctgtagataccgatgaagtctatatgacgactaaattagagggtaaaaagaccttatttttgccatttaacaaaggcaataaagaaggacaaggcaaccccgtaaacccgtatggctataaaacatcgtatctatgggaagaaatttttattaaagaaagcttggtgaatatcgtacaacactttgtccgattggataaaagcgatgatgccaagttaaatacacgaacattgtttttcccacgctaccatcaattagatgtggtgcgtaagttagtcaaggatgtatcggcaaaaggtgtaggacaaacttatctgatccaacattccgcagggtcgggtaaatccaactcaattacatgggctgcattccaattgattgaaagctatcctgacaatgctttggttgcaggtaaacgtgctttggataagccgatctttgatacagttattgttgtcacagaccgcaaaatattagataagcaaatccgacataatattaaagatttttccgaagtcaaaaatattgttgcacatgcaaataaaagtgctgatttacgtttggctttggaaactggtaagaaaattattattaccaccatccaaaagtttaagtttattttagatggtattagtgatctaagtgagcgtaactttgccattattattgatgaggcacacagctcacagtctggtgatgcacataacaacatgaatcaggcaatgggtaaacaggttgatggtgaggatgaagatgtccaagacttgatgatccgtttaatggatgcccgtaaacaacgtaataatgtgtcgtattttgcttttacggctacacccaaaaatagcactttagaaaagtttgggatcaaagaccaagaaacaggtaaatttaaaccctttcacttgtatgccatgaagcaagcaattgaggaaggctttattttagatgtcttggctagctacacaacatttaaaagtttttatgaaataagaaagtcgattgaagataatccaaaatttgaatctaaaaaggcacaaaaggctttaaaagcatatgtcgaagcccaacagcaaaccatttatgccaaagcagatattatgcttgagcactttattgacaatgtagtgaataagaaaaaattacaaggtgtcgccaaagcaatggttgtaacccaaagtattgaggctgcaatccgatattatttatctttaaagaaactattggcattaaaaggcaatccttttaatgttttgattgcattttcgggtgagaaagaagtcgatggtgttaactatacagaagatagtttaaatggctttgcagaaagtaaaacaaaagatcagtttgatttaaatgaaaatcgtatcttggttgttgctaataaatacttaacgggatttgatcaacctaagttaacaacaatgtatgtcgataaaaagttatcaggtgttttatgtgtgcaagctttatcacgtctaaatcgtgctgcaccgaagtacaataaacgcaccgaagatttatttattttggacttttttaatgacgttaaagatattaaagcagcgtttgatgatttttatacgtcaacaaccttgtctaaagcaacggatgttaatgttttacatgatattaaaacagcgttagatgacacaggcgtatatgaaagacatgaagtcatccaattaaatgatctattttttaaagatgctacagccgaaaaaattagcccagtcattgataccgcagcagaacggtttaatatcacacttgagcttgcccatgaacaaaaagttgactttaaggtaaaggctaaacagtttgttaaaatctatgcccaaatgtcttcaatcttaagtattaatcaaattgaatgggaacagctttattggtttttaaagtttttgatccctaaattagatgtgcaagaccaacaaacaacgggcattgatgaattgttggaacaagtagatttaacaacatatgcattgaagcgtgagcatttaaatacatcaattgtcttggatgcaggggaaactatggttgacccacaaaacccaaacccacgaagcccatcgagtggtagtgaagaagacactttagaccagatattaagtaaatttaacgaaaagtggtttcaaggttggagtgcaacacctgaagatcaaaaagtaatggtgatttatttggttaagagcatccaaagtcacccacattttgaaaacaaatataaaaacaatcctgatccatatacaagatcattggcatttgaaaaaatcttaaatgagattatggtgaaacagcgccgtaatattatggagttgtataagctttatcaaaaagatgatgcatttaaaggtacatttagccaaactttggaaaacttagtgcaatag

SEQ ID NO: 69884 - DNA, 648 bp, Acinetobacter baumannii
ttgcaacagatcattaaagggattgaaccgatagaattaactgaatataaacgtaaaaacccaacccatagatatgatgacttaggcgaagacccagaacagatacgacttgcaattagacaagcatgtttaggtgaacagttatatttatgttcgtattgctgtcggcagattgggtcaaaagaccacgattgtatgaatgagcatattttgccacgacaacattacccacaacatagttttgattttaataatattgtggcgagttgtacggcaaaagggtcttgtgatgatgccaaaaaaaatcaagaaatcagcattagcccattatccccacgttgtgaaactgagtttaaatttaatatcagtggtacggttacaggattaaccgatgatgctaaacaaaccattgatgtactaaaactaggtgatagcttgcaacaaaaccaaaagctagttgatatacgtaaacaagccattgccaattttttgtttagtcaaagtaccacgatagatgacttggtcgaggatgatgagttattaacattattggttgaagacttacaacaaacaacagagggtaagttacaaccatttgccccaattattaccaaagcacttaaaaactggattgatggaaataaataa

SEQ ID NO: 69885 - DNA, 1419 bp, Acinetobacter baumannii
gtgtgcaatcagttgctcacaaatacgttccaagacctaagcgtgtctgtagcacctacacaagactacccatcaaacatcacggtttttattggtaataacggtagtggtaagacatcgctattaaagtcggtagcaacagcattgacttggtttgtagcccgtttaaaacatgacaaatccaatggcacaccaatccctgaaagtgtgattttaaatacggcgaatgcagcagcagtcgaaatcattgttaatgatcaaaacctacaacaacaaatccaagcttatacatggcgtataactaaaaaccgcacggcgagaaaaactgaatttagtacatatttgagcgagctaaatcagttaacagattattataaacaatggcttggcgatgatgatcaaagtagtttgcctttaattgcattttaccccgttgaacgtagtgtgattgacatccctttaaaaatacgggaaaagcaccagtttttacaaattgatggctatgacaacgctttaaataacgccgtggactttagacgcttttttgagtggtttagagatagggaagatgttgagaatgagcttgctagtcaagtgaacgattacgcagatattttaaaggaagaattggaattagtagcatctttaaaaaatctgaacaaaaataagacagattaccaagactttgaaaacttaaaaaataagttagataaaattattaacgctttggaagctaataatagacaagacatcgcaactaaagacttacagcttgaagcagtacgacaagctatttatacatttatacctgaatttagtaatttacgagtaagacgtaaaccacgcttacatatgtctgtagataaaaatgacaaaactttaaatgtcagccaattatcccaaggtgaaaaatccttaatggcactggtcggtgatattgctcgacgtttagccatgatgaatcctaaactggataatccattgcatggtaaaggtattattttaattgatgaaattgatatgcacttgcacccacaatggcaaagatcaatcatacaacgactacaaacgacctttcctaattgccaatttatcctatccacacattcgccattggttatatctgatacacaaaacattttggtctatgacttagacggacaggaagttaatgctttaccatcattgtatgggcaagatgccaacacagtattattgcaatatatggatacaagctatcgtaaccctaaagtcgctgagcaaatcagccaagcaatggatgcaatccaaaataatgattttgaacttgcaaaccaattaatccaaacccttaaattggaacttggcgaaagtcagttagacgttatgcgtcttgttgctatgttgaaaaaaagaaccctagcaaagcaggggaaataa

SEQ ID NO: 69886 - DNA, 1203 bp, Acinetobacter baumannii
atggctgatttttctgatgacgagttattgtcagagttgggaattgatctagcaccagctaagtcagtgacctatacagctaaagaagaacgtttaatctcaggctttgaagaaattattcatttctatgacgagcataaaaaagtgccatctaatacagctgatgcggatatttttgaacgtatctacgctgtgagattagctcaactcaaacaatcagaggaagctaaaaagcttttagctgattttgatcattatggcttgttggctgattctggtgaagaaaatgctgatgtagcaagtttagaagaagatgatttacttgctgaattagggattgaattggaagatgaagaaaatatttttgtcttacagaatgtgagaacccaaaaagagcgtgatgcaaatgagctaacggcaactcgcaaagtttgctcagatttcgatgtatttaaaactttatttgatcagattaattcagatattgaaaatgggcaacgtataacaaaagctttcggtaaagatgcaagtattgaacttaatgattggttcattgtagatggtcaaatcgtctatgttgctgaagtcggagagtattttaaagctcctaatggtgaaacagatgctcgattgcgagctatttattctaatggtacagagagtaatttattaatgcgctctttgaagaaagccttaaatagtgataagacaagtcgacgaattttagttaaaaacaatgcagggccattatttcattcatctgagtctcaagacgaggagaatcacatcgaaattaaaagtggcactatttatgtcttgcgaagtaagtcagataactcattcattaaagagcataaagatgtcattcacaaaattggtgtgaccacaagtaaggtcaaccagcggattactgatgcaaagaatgatcctacttatctactcgcagatgttgagcttgttgctagctatgggttaccagaaaatattgtgccgcataaattagaaaagttgattcataaggtcctacaatcagctcagttggatattaatatcgaagatagatttgggaaacctgtaaaaccaaaagaatggttcttggtttctcttaacatcattaatgacattattaatcatattaaaaaaggctctattgagactgtttactacgatgcggaaaaagctcagctaatttccacatcttag

SEQ ID NO: 69887 - DNA, 273 bp, Acinetobacter baumannii
atggaacgactgacagatgatcaaattctagatgaacttgaaattcaacttgagttaaaatcgccaaaggtcttaacgcctttacaggaacggttgatttctggatttgaagaaattaatcacttctttgaaacccatcagcgaattccattacatcatgctgatgcagatatttttgaaaaattatgtgcatctcgattagataaaattaaacagaattctgagatgaagtctgatgttttattcttagataaattcaatctcttaggttaa

SEQ ID NO: 69888 - DNA, 816 bp, Acinetobacter baumannii
atggcctctggtaataaacctgttgatggtggaaatttattgcttacttcagatgaagtacatcatctgaatttaacaaaagaacaaaaaaataaatttattagaaaagtttatggatctgccgaatttattagagggatacaaagatattgtttgtggattaaagatgaaaatttaaatgaagctttacagatagctccaattttcgaaaggatagaaaaggtaaaacaaatgcgtttagctagccctgatatgagcgctaacgaaatggccagtaagtctcatcaatttagagaaatgtatacatctaataaacatacaataattgctccagtaacttcttctgaaaacagagaatatttacctgttggattaattcaaagtaatgaaattgttttgaatacagcttgtgccgcttatgatgcacctttatggaatttatctataactgcttcaagacttatgcaaatttgggtcggaaccgtttgtattagaatgagaacggattttagatttacaccaaccttaggctggaatactttccctgtcccaaagctaacagagaaaaataaagcagatttaactaattgtgctgaaaatattttgttggcacgggaagcacatttccctgcaacaattgcagacctttatgatccagagaaaatgcccgaaaacttgcgtgctgctcatgaacaaaatgatgaggttctagaacgcatttatattggtcgtcgatttaagaatgatacagagcgtcttgagaaactattttcaatgtataccgaaatgacttccaaacaagtaggaaagaaataa

SEQ ID NO: 69889 - DNA, 531 bp, Acinetobacter baumannii
atgttagaggtccactctcaaacattacgtgatcttaacagccaagatgatgataactacactattagttgtactatttttggccgttgtcgcaatagattttcacgtgtaattcgtaatggtaatgcgcctgtatcaacctctttggaagattcatcgaataaattcacatttaaaatcgggaatacatctggaatccgttttttcaaagaatctgattatttaagacctaaaagacccaacttttttaagcaaagtcataatctcgagctctttgaaatcgatgataacttaccagttttttggcgcttcattttagttccagctagaactgatgaggaagaaacatttattgcttttgttggttttaaccaaaaactacagccgataactgcttggacatcaaataatacttctagatttatttttgatccagaagctattctgccagaaccagcagatttgaagtcctacaatattgatgatctattagctgatgatgatttagacaacacaagtgaaattgaataa

SEQ ID NO: 69890 - DNA, 189 bp, Acinetobacter baumannii
atgaatacttattttaatggcctagaattacgactcttaagacaattgaaccatttgtcactagaggatttatcaacccatgtaggtaaatctcgtcaatttttgcataaaattgaaatgaatcaagtcgctccgacatcagatttaatcggtgttctgagcaacttttttaatgttaaaaacaaataa

SEQ ID NO: 69891 - DNA, 660 bp, Acinetobacter baumannii
ttgggtttaggtcctatcagtgacatgactaaactctgtgaaatgcttggaatttttgttactacatttcctagcgtttctaatgaagtagatgcgctttctattgcatcaaaacgtccaattttcgttaataatgaagatagcagtacgtgccgccaacgatttaatttagcacatgagttagggcatctagtattacatgatggttgtgtcactggcgactctcttacagaatcccaagctcaccgatttgctagtgccttactgattcctcaagaaatgatgaactctcatttccgttattgtttcaatggcagatttaactggaataagttaagtaaaatgaaaatggattggaaaatcagtaaagctgcattgctttatagagccaaatcattggggcttatagatgacgtaagttatcgaagtggctatattcatttaaaacgtacaggtgaagcactcttagaaacagaggacaaggatattccaagagaaattcctcacttactagaaaattgctttaaagcactaaataaaaaaggaatatcagctaatgacattgcaaatgagctcaacatttctttagatttattgaataaaattactcaactcaatcatcagatgccaaatacctcaaaactacaactagtaatttaa

SEQ ID NO: 69892 - DNA, 267 bp, Acinetobacter baumannii
atggttgatccgtctttacatcgaccattttcactggcccatcattgtagaccgttactttacagccttttacaacatattcctgttcaataccaccgtacctttcatcatcagaaacgggagctacagaagttacaccataacagatttcgtccttgcttgccttgtggttgtgcataccattgcgtcttaggatcaaaccagattgaaatatttcctcgcttgattaaagcttggttatacgaggaccaattggttgtacgatag

SEQ ID NO: 69893 - DNA, 339 bp, Acinetobacter baumannii
  misc_feature (316)..(325): n is a, c, g, or t
atgcaaattcaaaatcaagtacagcttaagccattcaatactttaagtttagatgtaacagcttctcattatactaagattacgtctgttgaagatattaaagaagctttggattttgctaaacagcatgagctaaatgtacttgttttatctggcggtagtaatatgttgctgccacagcaaattaatgcgttagtcattcaccttgatattcaaggtatacaagttttatcagaagatcagaattttgttcgagtcaaagtaggtgcaggacaggtttggcacgattttgttttatatagtacacagcagaacnnnnnnnnnntttacaaaatttag

SEQ ID NO: 69894 - DNA, 585 bp, Acinetobacter baumannii
atgagccatcgtgatcggcgccacgcgcaggctgccgcggggttcaccctgctgctcgaaccggcggcggcttccgggctgaccctgcggctgtatggcgcacgccctctgcacccgaatgaagcgcccgatctttgggctgtgttgcgcgaactggcggcgcgggccgggttgcctgccgtgccggtaccgcactacgtgcccagcggggtcgtcaacgccttcgccaccggtacgaagcatcacgcggccatcgcgctgaccgacggtctgctgcgtagtctcacgctccgcgagttgaccggcgtgctcggccacgaaatcgcgcatattgcgaacgaggatttgcgtgtcatgggcctggccgattccatcagccggctcacccatcttctggccttgttggggcaaatcatgctcctcttcagcctgccggccttgctgtggggcacagtcgctatccagtggccggcgctgctgttgctggccgtttcgccacagctcgcgctgctggcgcaactgggtttgtcgcgggtgcgcgaattcgacgccagagcgcatccaacgcttgcgggaattggctga

SEQ ID NO: 69895 - DNA, 501 bp, Acinetobacter baumannii
gtgaatgtagatggaacttttgattttgttgagcaaggcgaacaacacaatcaaggtattgagttaggtttaacaggcgccttaaccgatacacttgatgtaagctctggcattacctttaccaaatctcgtcttgttgatattgatactgacagctacaaaggtcatcaaactcaaaatgtaccaaaggtacgcgcaactgcacagttatcttataaagtaccgtcagttgaaggattaagattactcagtggtatgcaatatagtagcagtaaatatgcaaacaaagagggaactgcaaaagtaggcggatatagtgtctttaatattggtgctgcctataaaacaaattttgctgggcatgacacaacttttagattcaatattgataacttatttaacaagaaatattggcgtgatgtaggggcatttatgggggatgactatctgttcttaggtaatcctcgcacagctcaattttctacaacttttagcttttaa

SEQ ID NO: 69896 - DNA, 219 bp, Acinetobacter baumannii
atgcaaaaactaagactaacaaaaaatgaagtgtgccatattttatcaatcaaagcggacaagttggctaaactaatacaaacagatgtatccttcccacgccctataaaagacggcattgctagacaagcacctgtatactttgatcgtcaggacgtggagagttggtggagtaataaaaaagcatctaatgaccctaacgccgtgttaagtgcttaa

SEQ ID NO: 69897 - DNA, 1080 bp, Acinetobacter baumannii
atgcttgaccgtgtaaacgatgcacaaaatagatttaataagatgccaagcttgccccaaatcatagatcaagtacaagaaaaggttttagcaagtagtatttatagtacaaataccattgagggtggtcaatttactgagcaagagactgaggaaattttaagactagaccctaagaccatacaaaagactgaggaacgccgtttaactaatctgaaagaggcaattgattggattaagcagtttagtcaaaaaagattacaacctgtagatgggcaaagtatatctttaacatccgtcattaaattgcatagcttggtatcgcaaaacctagaagaacaacataatccagcagggcagtttagaaacaatcaacctagccaaaaaacagtggttggtaatagcgcacatggtgggacatatcgtccgcctaaatgcattgaggatattgagtatcttatacaggcgtgggtggagtggttaaatagtccaaatgtgatcaatcaacctgctattgtccgtgcatgtttggcacattattactttgagttgatccatccattttgggatggtaatgggcggacagggcgtttgattgagatgctattgcttgaacagtcgggctatagatttacatcgtcagcgatatgggcatattaccaaatcaacatccatgagtattttgcattgtttaatgcatgtcgtaaggctgctgataaaaaagaacctttggctaaccaagcttttattgagtttgtattaaaggggatgtttgagaccatcaataatttgcatgatcaaagtaatggcttgattagctttttgctgtatcaaacagctttgaatgatgctaaatttagtaagcgtatatcggatagacagtttaatttgatccaaacgattatgcttgtggcaggacaaaccaagaagtttttaacccaagctgaactgtatcgaataccacaaatccaagtcttgtatacaggtaaaacggaacgtactttttatcgtgatattgcgagattggttgagcttaactttttagatgatcaagatggtttgattattgtgggcgactaa

SEQ ID NO: 69898 - DNA, 642 bp, Acinetobacter baumannii
  misc_feature (6)..(15): n is a, c, g, or t
ttgtcnnnnnnnnnntcccttgtcgcagaacaaagtcaaatcaagcacctctctacccgactatttcgtcctcaaacattagtattgtcacaaagcactccgtttgaagtaattggtgaattcaatcaaacccgtgttcgttactatgcggctacccagaagcgttttaaagaaccattagtatttgttgctccgctagcaattaatatggcgatctatgatttatatccttatcgttcgcttgtaaaatattttcaaaatgcaggttttgacgtatatctagtcgattggggacgtttgggctttaaagatagacatcttaactttttatcatttatagaagattttattcctaaagctatagaacttgttcgcacccattcaggcagtgaccaaatttctctacacggatggagtatggcaggtatattcgttactttatatacagcacataatcaaccaaattatgtcaaaaaccttatagtattaggtagcccaattgatagttatgcttctggttatattggaaaactctaccgaactataaataacactattgctcgcaataagaagctacaggaacgtatctactcaggtttaccgaagcgtttgattcatacacctggtattttaaattcttga

SEQ ID NO: 69899 - DNA, 141 bp, Acinetobacter baumannii
atgcctttaacaaagttcaacacagatgagttgattattgcaggtgataaggtcggtaggtttggttcatatcgagatagtttggaaatttatggacgagcacgttcagaaaataaagagcttgtgattgtagaaggttag

SEQ ID NO: 69900 - DNA, 963 bp, Acinetobacter baumannii
ttgaaggcagcgcttaaaagaggagtagaaattacaattttatttggtaaagataagccagatcctgatgatttggcggaagatgaggatgaaaaagtcaagaatagactagttaaatcattagatgaaatttataagattgaaaaattatttgataaatttaatgaagaatgtattttagaaaatatcacacctctacaattaaacgaccataaaaaaacaggttcccattctaaatatataattactcatcattctgaatgggggccaaccgttctgataggttcatgtaattttttctatagtaatttcgatagatttgaagcttctgtaataattaacagtaatcaaatagtgcatgactttctaaagatatcaagtattttgtgtagtgctaaggactttcattctaacgatttatataactatttttctgatttagcaaaagaaactttattaagaaataaagagtttgatagtagttctaggtttgttaatttagcaattgtttttaaaaatcagcattatagtttaattgacaaagctaaagtaaatgccagaaaattaattctgatcacaagtgataagctaagcaatatttccagaaagccagtttttgaggctattaaaaataatcaaaatgctaaaaagactgtattcttttcagagaaatctgaaatctttactcataaagatgagttggaattaaggaaattacttaaacaggcagaatataaaattgatatccagttacatactcctaagactaatcctcgaaaaaaaaatcattctaaggttttagcttgggataaagatgatattgttattactagccttaattggttgtcatctaatgcttcgcctaataatgcagcagatccttaccatgaaattggtatttatattcaggcggacaatatagccgaagatttccaaatagcttttcaagattcattaaaataa

SEQ ID NO: 69901 - DNA, 852 bp, Acinetobacter baumannii
atgaagcagtatctagatttgtgtcaacgcatagttgatgaaggtgtatgggttgaaaatgaacgaactggaaagcgttgtttaaccgttattaatgctgatttagagtacaacgtaggggcaaatgaatttcccttggttacgactcgaaaaagttattggaaagcagcaattgcagaattattagggtacctacgtggttatgataatgctgctcagtttagggctattggctgtaatacttggaatgcaaatgctaacgaaaatggagtctggttagctaaccctcatcgtaaaggtgaagatgatatggggcgagtatatggagtccaagggcgccattggcgtaattctgaaggtaaagagtttgaccagcttcgtaagatttacgacgacttaagaaacggtactgatgatcgtggtgaaattttgactttctataatccgggcgagtttgaaatgggatgcttacgaccttgtatgcatactcataccttctctttggttgcagatacactttatttaacatcatcacaacgttcatgtgatgttccattgggtcaaaattttaaccaaattcaagtcttcacattattagccctcatggcccaaattacagggcataaagcaggaaaggcttatcataaaattgtgaatgcacatatttatgaggatcagttagagcttatgcgtgatgttcaacttaaacgtgaaccttatccagcgccaaaacttcatatcaatcctaatattaagactcttgaagatattgaaacatgggtgacattagatgattttgaagttgaaggttatcaatatcatgatgcaattgcttatccattctcagtataa

SEQ ID NO: 69902 - DNA, 588 bp, Acinetobacter baumannii
  misc_feature (12)..(21): n is a, c, g, or t
atgttgtttcannnnnnnnnngtttcagattggttccgattaccgaatcatgctgatgatgaagattttcagttacctgatgctattaatattgcacaagcagcaacacaaaatgtttacagagcattggatgcaaatttccaccatcaagatactattaaaatttctctgacaactacagctctagccgttataacagattgtctatttgtgatctttgaaaatgcttggaagcattcaggtctcggatcagatttgaaaaatatcgacattgaaactgaatttaatgattcaaataagctgttaactttaatagtctatagtgatttatcggaggataaattacgtgaattaacacagagtgaaattgatcgtttaaaagagaaatacattgctaataccttgcctattcacttagtcagtaaggagggaggttctggttttcctaaacttcgtaaaattgtcagatctgtgaaaaaaacacagtgtccaaatccttttgattttggcttaaaaaattcgcgatggtttgtgcagataacaattcaactttttgaacgtgaaggacgtttcgaagctcatgtataa

SEQ ID NO: 69903 - DNA, 489 bp, Acinetobacter baumannii
atgtataatgaaaaaaacgtactagttattgaagacgataagccaaaattaaactcgattctatcatttcttagatcgatattaagtccagatgtccagataataacggttgaatctttatcgagtgcaattactgaaatatcgaatagggaaattgtgctcgctgtagtagatatgtcaattccgacatttgatatcgctaaagaccgattgggcggaggtcggccactaggttttggtggagcagacgttttgagatttattgatagtgaaactgaagatacatatagtgttgttcttactcaatatgaagaattcacgttacctcaaatcaaagaaaaacgtgatcctagaggattgcaagaaatattggaacaggagctagatcaacgatttttaggggttattcattacactggacaatatggaccatggcaaactgctttggttgaagttttagaaaaaattaatttggtagctaaaaaataa

SEQ ID NO: 69904 - DNA, 819 bp, Acinetobacter baumannii
atgggggtaagtgttgaatattttgactctaccaatcttgaagcattaaccgaaaaaattaatgatcgtaccactgcggtgtttattgagtcacctggttcaatgacatttgaattgagtgatgttgcagcgatttctgcaattagtcatcaatacggcgcaaaagtattagtcgataactcttgggcaacgccattactttttcaaccattaaagcacggtgctgatatttctattcagtccgtaaccaaatacattggtggccattctgacatactcatgggtgtggctactgcaaatgccgaaacataccaacaactcactaaaacaggtcatttgtttggtgagaccacaagcccagacgatatttatttggcatcacgtggcttgcgaagtttggcggtaaggttaaagcagcatcaagatagtgctttaactattgcccgatttctagcaacacatccggctattaaagaagtgcttcatcctgctttagaaacaagtccttatcatgatttgtggttgagagattttgatggttcatctggagtatttgctttttacttaaaagaatctgaaccttcatatgtgcaaaaattctttgattcgttgcaattatttcatattggtttgtcttggggagggtttgaaagtttgattttacctgttgggcaagcttatcgaacacataccaatttacctaaagatggctatttagtgcgcttaaatattgggctggaatctgtggtcgatttacaaaaagatttgcaatacgccctacagtgtgcagaacaaatgcgtgttgaaaatgttatatag

SEQ ID NO: 69905 - DNA, 363 bp, Acinetobacter baumannii; identical to SEQ ID NO: 54898

SEQ ID NO: 69906 - DNA, 543 bp, Acinetobacter baumannii
  misc_feature (190)..(199): n is a, c, g, or t
atgcttaaaaaattgttgtgttggggcttgatggcgacatctttatattttgtatggggctgtagcgaatttaataatgagcaagccgtaggtgcagaaacggcgcaagctgaggttgatgaagcaatgacagcagcatccgaggctgaaccatcaacaaatgcggatgaggaagttaaccataattacnnnnnnnnnnacgaacatgcaggagacgtgagtccaattgagcaattagtagagggtgtacctattgatgtcacctttcctgtcaatacaagcatgtcccaaatatatgagcggttagcctatgatattgtgatccagtctaaagttgacagtatcgtgattaataacgtgactattaatcgtggtaataattgcaatatcaatgactattcccgtgataagtatttacctgccaacttaaagtttgggcgttacactaggttgtcgatagattgtgatgttaattacattaaggaggtcgaagttgagactaatttaggtaattacacatttgatcaatttgtgcaacgttaa

SEQ ID NO: 69907 - DNA, 480 bp, Acinetobacter baumannii
gtgttgcacgtctcaccagatcaggagcagtggaaaaatgctcttcaacagtttgtgcaacgagtattaagaacagagagtgagaatacatcatttaattatgatgtagtgattttaaatgctctaagaaaacctgaattagaggctgtttataaaaattggccacttagtctctcagaggaaaagctactcggatcaaacatcaactataaaacagggcaattgaatttagttagtggtaaaacattaaaaattgcatgtgcccatctcaatcaaatgggaccaattgcagcgacacattcaacggaagttgtgttaaaaagcttcaaaccgagagtgttaatcatgactggtatatgtggtgggtttgcagatgcagtttcagtaggtgatgttgttgtagctgataagagttgggattggcaagcaggaaaatggacagaagatggggcattacaatctgcatctacaaaaacctga

SEQ ID NO: 69908 - DNA, 237 bp, Acinetobacter baumannii
atgagtgagcagcaaatccaaactctttggaatgaatttttaaatcaatggtcagtagaaaaagttcagaaaatgactctgccagagtattcccaggtaggtaatattgatacatttggctattggcttgaacataagactaaacttatcgctaatattttaggtgggtctgcatttaaatttggtattgatcctagccaaaataatggacagtacttccctctaaagataacgtaa

SEQ ID NO: 69909 - DNA, 261 bp, Acinetobacter baumannii
gtgaatttacaaagtgtattgttggctgggtttaatgtcattcttatgccagttgtgatttttgggttattccttttattaccaaacgtcagtcaagagatgttatatgccggaacattaattgcggcacttccaatgccaattgcttttggtatttttgggcaagcatatggtttaaatgaaagagcattaacacctttaatgataagtaccattattggttttattggggtaagtggacttatcgctttgtggtggtaa

SEQ ID NO: 69910 - DNA, 171 bp, Acinetobacter baumannii
atgtggggtgataaagatccggtaagtccagtttcggtgggccaatatttaaatcgaaagtttgaaaagtcgactttatatgttgtgaaagatggggaccatcaattagcagaaaaacatgccgatgaagtagcagtcaaaatagaaagctatttaagaaacctaatgtaa

SEQ ID NO: 69911 - DNA, 3462 bp, Acinetobacter baumannii
  misc_feature (3407)..(3416): n is a, c, g, or t
atggggaatatcatgaaactacatttcaaaccaaataaattatggtatgccatctattcaacttcgatgacatttacatggcttatgtcaagttctgtagtgcaggcaagtgatttacaaatttatgcctcacctacagcaggtaaaaaaacaattgttatgatgctagatacttctggatcaatggggcgtacgatccagtccggttatagtatttatgatgattacggtattacaagttgttcaactacttatgtaaactcaacaactactcctagttatcgtcggtattattgcggggtttcctcaaataccactaatagcaaagtaactaatttagcaaccggatgtgagaaacaggcagataatagttatcgttgttatgaccggttaacgcgcctaaaagatggtatgttttcttttttagaaaataataacccgatatttaataatgtaagtgttggattggggcatttctctacatacagtagtggtactactggtgatggcagtagcggcgaaattttggttccagcagcaaatttgggcgttgtaggatctgcacaaagagttgcattaaaaaatgctgtagctggattagaagcaagtggaggaacgcctactgctaatgcttatgctgaggcagcagcttacttaatgggaacacgaacattaagctcgactacagcaaatgtggcaatgtattttaaatattatccagttttaactcagacgtcacaaaccgtttactatgcctgtggtaataattcagctagtggttcaacagataatacaaagtgtacatatacgccgaccacaattccaagccagtctaatttatctaactatagtagtaatactacaagctcaacaaatggaaatataacgacttacaccacttattattataaaacgactggatggttttatcctacaacgacctattactataaaactacttatagtgaaactaaagtaaccagttcaacacctaattatcaaagctgtacagcatataactctaatggatgtactacttggagtgcggcttctttaactaatccaacaacagatacctatgatacgcaatgtacagttaatacagtggctggtacatgtgtctatcaaactaaaacaattttaggtacaaacagttatagtggatttaatagctccgttcaaagttcaaaagatccagataccaactacactacatataaatcaccattacctcccgttagtcagcgtcaaagttgtgatggacaaggggtttatattttgtctgatggtgaaccaacgaataacgtaaactcttctgttttagcctctgcattgaaccttagctcgtttagtaatagtggtggactgagcggtggtacaaactgggattatatgagtaacttcgctaaggccttatttaatggcggggtaattcaaagtgatgctaataatgctacaaacccagctaatgtatctatacaaactgcttttgttggttttggttcagcattaaatgccttgagcactacagatgcgaagaacgcttgtaaaatgagttctcgtactcaaatagatagaagtggagatgatgcatgttctccaaatcagggaacaaatgctgtatctgccccaggttatggtaatggtggattttttcctacccaaagtgcgcagggagtaaccgatagcgtaattgcatttattaataacttagggaaggtgcctttagagcctcttactactggtgcgatttctgtaccttatgatgcattgaatcctaaaaatctacaggaatatggttatttacgggcttttgagccagatccggcaaatgcttatctgacttggcgaggtaacttaaaaaaatatcatgtggttttatctggttcaaatgctggtgcatttgaagcgaactctggtggactggtctatgatgcaaatggagcattccgtagtggtacaaaagattattggaatagttctagttataatgatggcggaaaagttttcttaggaggagcctatagcaatgtaccattaccaactttaggtcagccagaagaggtaaattctcaaggtaatattactaaatattattatgcagcaaaaaataaaatccgaaatctttttactgatgtttctaccgtggctacagatggtagtttaactaaaatatcaactacaaatactaacttactgaaaattcctgctgcacctgctgtaaatacaaatccttttgatacagcggctaatactgcaagttatgtgctaggaaaatttaatagctctacgggacaagatgttttgaaggcatttcctgtgagcttgaaattaaaattattaaattacttgggttatccgacagatattacggcgacagctctaccaagcacattaaccacatcaaatgccccttatttatcgatgggcggaagtatccactcttttccggtacagctgacttatagtggtactttagatcaaaatggaaatttaaccagtgcacgtgagcaatctattctttacggaagtatggaaggaggattgcatatcgtagatgcctcttctggggttgagcaaatggtatttatcccagccgatatattaaatgatacggtagcgtctaaagctttagtggtagggcaaagtgattcaacagcccctgctcaaggtatggatggagcatgggtatcggatccagcatataacattactactacaggttcaggtagttcagcagtatcaaaagttactgctaaacaaatgaatatttatggtggaatgcgtatggggggcagtagctattatggattaaatgtattaaatccaagttccccacaattaatgtttagaataggtgcagatcaatctgactatagccgtatggggcaaagttggtctaagcctgtacttgcaaatattcgttataacggtgcgattagacgtgtcatgattgttggtggtggttatgatcaatgctatgagaaaccaaatatcacgttgagtgactcatgctttagcaatggtaaggcaaaaggaaatgctgtctatattatcgatgctaaaaccggagagcgtttatggtgggccagtgatacaggttccaataatgataacgctaatatgaagcatagtattgttagccgtattagtactttggaccgagatggtgatggcttagtagatcatttgtattttggcgatttaggtggacaagtctttcgtgtagatcttaataataatcagactcaaactaactcgacttatagtagtttcggtataagagttgtgagattggcaaatctggcaacaaacgatacaacaaatgatagtggaaatgattacacaggtggaaatgcccctcgtttttatgagccgcctaccgtaacaattcatgattatggtgnnnnnnnnnnattatggtgttcgctcatttattacggttggtatcgcttctggtga

SEQ ID NO: 69912 - DNA, 750 bp, Acinetobacter baumannii
atgtttaagattattctattggggtgggttggcggtattgcattgatgggaatagatttccctttaatcatgcaatatgaaaaagtgggcgaggctctactgttacttgcctttattttttatctttataaacgctcagtattcgttagccgaccatttttaaaggcaatgtattctttgttatgtgcagccagcctttttgttgtggggtatcaatatgccgagaatgcgttggtcgaacgcttacaacaaagagaaatggattcaaaaaatctcgatattattgtttatataaatcaactaagtgaagaaaaagacaataaagttcaacaaaatgctcaagtattaaacctatctaaagatccggtaaattggctactgtatttaaaaaatgataatcaaagtatgttgaagagcaatcaagaacttcaattaggccattactatcgactatctggaaaaacaaaacctgctcatagttacgccacagcaggagcttttgatcaggaaaagtggtttattcagcgaaatataatgtctggttttattgttcagtatattgagcctttaagccttgatgaaatttatcgattgggatatcaacagcattcaagagaacagcagtccttttttaatagatttcaaataaatatagaaaagctgcgcttaaattttagactggtgatgaaagccttttatcagatgagacccaaatacaatttaaacaattgggaattgctcacttgttag

SEQ ID NO: 69913 - DNA, 1155 bp, Acinetobacter baumannii
  misc_feature (1083)..(1092): n is a, c, g, or t
atgagcgtatcggaaatccgaccgattgccattgaggacgaactcaagcattcatatttagattacgcaatgagtgtaatcgtatctcgtgcattgccggatgtgagagacggtcttaaacctgttcaccgtcgtgtgctttatgccatgcacgaattgggcaatgactataacaaagcctacaagaaatctgctcgtgtcgttggggacgtaatcggtaaatatcacccgcatggtgactcagctgtttatgaaaccattgttcgtatggctcaagactttagcttacgttatttattggttgatggtcagggtaacttcggttcgatcgatggcgatagcgccgcggcgatgcgttataccgaagtccgtatgactaagctggcacatgagcttcttgcagatttagaaaaagacacagttgactgggaagataactacgacggttcggaacgtattcctgaagtacttccgacacgtgttccaaacttgttaattaacggtgctgcgggtattgctgtaggtatggctaccaacatggcaccacataacatgactgaagttgtgaatgcatgtttggcttatgctgacaatccgaatatctcgattgaaggattgatggaatatattaccggtcctgacttccctacaggcggtattatttacggtaaatcaggtattgttgatgcctaccgtaccggtaaaggtcgtttgcacattcgtggtaaataccatttcgaagaagatgaaaagacaggtcgtacaaccatcgtctttactgaaattccatatcaagtaaacaaagcaagagtgattgaacgtattgccgagttagtaaaagagaaaaaacttgaaggtatttcagaacttcgtgatgagtctgacaaagaaggtatgcgtattgcaattgacttgaaacgcggtgaaaacgcagaagtcgttgtaaataacttattcttaaatacccagcttgaaaactcattcagcatcaacatggtttgtctagacaatggacaaccaaaattgatgaatctgaaagatattattgcggcatttattcgtcatcgccaagaagttgtgacnnnnnnnnnncacgccgtaccatgttcgaattacgcaaagcgcgtgaacgtggtcatatcttggaaggtttga

SEQ ID NO: 69914 - DNA, 1083 bp, Acinetobacter baumannii
atgaatacttattttaatggcctagaattacgactcttaagacaattgaaccatttgtcactagaggatttatcaacccatgtaggtaaatctcgtcaatttttgcataaaattgaaatgaatcaagtcgctccgacatcagatttaatcggtgttctgagcaacttttttaatgttaaaacggaaattttttttagttctcatcctattttgcaagaagaacaaataaacttccgaagtaataaaacagcaaaagtatttacaaagcagtcggtcattgcacaaggtgagtacttaaaaaggttagtagagtttatagaagctaatttaaggctacctagatattctattccttcagttgatcctgtacaaaacttccaagatattgaaaatgctgctctgcaatttaggaaacattttaacttgggtttaggtcctatcagtgacatgactaaactctgtgaaatgcttggaatttttgttactacatttcctagcgtttctaatgaagtagatgcgctttctattgcatcaaaacgtccaattttcgttaataatgaagatagcagtacgtgccgccaacgatttaatttagcacatgagttagggcatctagtattacatgatggttgtgtcactggcgactctcttacagaatcccaagctcaccgatttgctagtgccttactgattcctcaagaaatgatgaactctcatttccgttattgtttcaatggcagatttaactggaataagttaagtaaaatgaaaatggattggaaaatcagtaaagctgcattgctttatagagccaaatcattggggcttatagatgacgtaagttatcgaagtggctatattcatttaaaacgtacaggtgaagcactcttagaaacagaggacaaggatattccaagagaaattcctcacttactagaaaattgctttaaagcactaaataaaaaaggaatatcagctaatgacattgcaaatgagctcaacatttctttagatttattgaataaaattactcaactcaatcatcagatgccaaatacctcaaaactacaactagtaatttaa

SEQ ID NO: 69915 - DNA, 885 bp, Acinetobacter baumannii
atgcagatcgcttctcgtaatatgagtgcattggctcaacgtgactatcaaaacacaggtttaggtgcgttgaactggttaggcgagcttgttactaacattactcaagacgatgctgcttatgatgccctgattgctgaattgaagcatatccataccaaactattgcaagcgcctaaacagttcttgcttgtatgtgaagagcatcagtcagagcgtttagttgaagaaattcaaaacgtttgggataaattaaacgttgatacagcagcggctgagttaacccaagtcgagcaagaaaatgataatgaacatgaagcttggttaattcaaaccaatgttcagttctgtgcttcggcatatcaagcagttgaagtgtctcatccggatgcggcacctttaatggtgttagcagcatacttgcgtaatggtttcttgcacagcgctatccgtgaaaaaggtggtgcttatggtggtggtgctagctatgatggaaatgcatgttcattccgtttctttagttaccgtgatcctcgtttagctgacacgtttaaagactttgaagcgagtgtgcaatggttgttaaatacagagcaacaacctcatcagcttgaagaagcaattcttggtttggtggcgagtatggataaacctggttcaccagctggtgaggcaattacagcgtgttatgcactgttacatgcaagaactccaactttccgtcgtaccttacgtgaaagattattgcatgtaactttagatgatttacaacgtgttgcacgtcaatatttaattgaacaaacacctgtaaaagctgtggttgcaccttttgcaaaacgtgatgaattgcaacaactgggctttacgattaaacaagttaattaa

SEQ ID NO: 69916 - DNA, 2094 bp, Acinetobacter baumannii
atgaaacgttctattttatttatttcatcagttggggttataacaggccatgtatatgcagcagagacagactcacaggctgtaaccaaccttccaacgatttcagtaaaagctgagaaggaaaacagtttaaaacaagaggtaggacaagcatcaagtgccactaaaggacttatgcaattaaaagatgttcctcaaattgtaaatgttgtaccgaaacaaattctaagagagcagacagtgacttctatgcaaggtgctttgcaaaacgttgctggtttgagctttagtgtgggggatgggcaacgtgatcaggtcatgattcgcggtttctctgcaatcacagataattatgtagatggtattcgcgatgatgctttgtattttcgtgatatgtcgaatgttgaacgagttgaggtactaaaaggacctgcttctgtattatatggacgtggttcggcgggaggtttagtcaataaaattaataaaaagccaatggatcaatccttgcgtgaagtgagcctgattggcagtactacagggcaacgtcgtgcagaagtcgatgtaaatgaaaaagtagccgagaatgttaaagttcgtttaactggtgcagttgaagactcagatggttatcgcgatcaggcatttttaaaacgacaggcggtggctccatctgtacagtgggatattactgataaaaccaaacttttacttcaggccgactacttgcacgatgatcgtctagctgatcaaggtttcccgacagatccaattacaggtaaaccagttaagacaaatcctaaaactttttatggtgcattaaacggtaaagaagttggggatgtcgatactgaaatctcaagccagactatcagcttagatcatgagtttaatgatcaactcaaatatcatggtgcagttcgccactataactactcattagatcgtcaatatagtgttgatacacatcctgctgataagacaaaaattactttgactcaaaataaacgcctgcgtaatgaagatggtatatatgttcagcaagaattaagtggtttatttaatacaggtttcttaaagcacaataccttaattggtgctgaatatagcaaacagcataaagatgagatactttggcaaggtgctaagacaaccactgatttatataatcctaaattagactactgggcacctattaataccggaacaacagttgcacgcaataacaatagtaatacctttgaaaactatggtgtgtatctgcaagatttaatgacagtaacagatcagcttaaagttttagttggtttacgttatgacaatctatctcaagatcgtgatgataaaacgagtacgaatttagacttaaaccgtactgacaatacttattctccacgaattggggtggtctatcagccagtaaataatctttcactttatacttcttataatcgttctttccagcctttggctgattcatttgttttttatcaaaacagtgatgatttaaaaccaacaaaaactgaaaattatgaggtgggtgcaaagtgggatgtgaatgatcaattgaatgtgacattggctttatttgaaatgagccaaaccaatattcaaaaccaagatccagctaatccaaatcaagcactattggcaggcgagcaaaaaacaaaaggtattgaactttcattaacaggtcagttgactgatcagttgtcagtgctagctggctattcttatatggatggtaagattgaaaagtcgactgttggatttacgggtaatcactcagcgcttacgccaaacaacacagctaacctgtggttaaaatatcaaattaatgatcattggtatgcagctgtaggtggtcgtggtgaatcatcacgctttagtgcgccagataacaaaaacgttttaccagggtatgcggttgtaaatgcagctttaggttatcaaagtgaacgttatgatgtgaacttaaatctaaataacttgtttgatcgcgattattttgtttcaggccatagtggagcaaatgattcaaatatgatgggcgatcctttaaatgctcaagttgcacttcgctatcgtttttaa

SEQ ID NO: 69917 - DNA, 1071 bp, Acinetobacter baumannii
atgagctcagaagcacattcaataagcttagttgctccagtagtgttattggcagctgctgtcattgcagtccctatttttaaacgcattggtttgggttcagtattaggttatttaatcgcaggactgattattggcccatttggttttgcattttttcaagattccacagcaattttacatattgccgagttgggaatagtgatgtacctctttgtgattggtttggaaatgcaaccatcacatttgtggagccttagacgtgaaatttttggtcttggtacgctgcagatcattatttgtgcgttagctttgactggcgtagggctattgtttggtttcacatggcaagtcgcttttattggcgcggcagggtttgtattaacctcgactgcaattgtgatgcagttattgggcgatcggggtgacttgactcaaccacgtgggcaaaaaattgtagccatcttactttttgaagatttattaattgtgccactactggctattgttgcttttatggcaccaaatcatgtagtcgaaagcacatctgtacgcctggaaaacattggaattggtttactggcaattgcaggtctcattgcggcaggctattggttacttaatccgttatttagactcttggctgctgctaaagcgcgagaagtcatgacggccgcagctttactggttgtgttgggtgcggcgttgctcatgcaagtcagtggtttgactatggcaatgggagctttcttggcgggtgtacttttatctgaatcaacgtttagacatcaaattgaagccgatattgaaccattccgaggaattttactgggtctctttttccttggtgttggcatgtcactggacttatcagtggttgctcaaaactggcaactcattgtaagtggcgtagtggccctgatgtttgttaaggcgctcatgatttatatatctcgctcgagtaaccaaaagtcctcatacagaagcattagatcgcgctttactgatggctcaagggggagagtttgcgtttgtacttttctctgctgcattaagtgcccaagttattga

SEQ ID NO: 69918 - DNA, 723 bp, Acinetobacter baumannii; identical to SEQ ID NO: 69881

SEQ ID NO: 69919 - DNA, 204 bp, Acinetobacter baumannii
ttgcaggatttgcttacgcatatgcaaaaacataatttacagcatgcgttagttgttactcatgggggggtgattaagctattggcttgtttagccgagcagcaacctttagatgacttacttaaaatgtcggcagagcttgggaaattatattcttttgaattttctgaagcagatggtcaattaacttttatgttgagatag

SEQ ID NO: 69920 - DNA, 246 bp, Acinetobacter baumannii
atgtctattatatttttttgtatttttttcacagctttattgatatttggatatttggctgttaaatcaaaatggaagattaagaatttagcatttgtgtgttttgtaagtgtgtttttatttgtttttagtgtttttctattaatacttcatatagacctattttttgttgcaggtatgtcttcttttttagctacattattacttgttattgtagtgtgggctgtgcgtaataaagtattctag

SEQ ID NO: 69921 - DNA, 165 bp, Acinetobacter baumannii; identical to SEQ ID NO: 58491

SEQ ID NO: 69922 - DNA, 1092 bp, Acinetobacter baumannii
  misc_feature (1074)..(1083): n is a, c, g, or t
atggtgccatttgatttttcaaacttatctcctcaaattgtttggcagcattttcaaacactttgtacgattccgcgtccctcaaagcatgaacaacagcttcgtgagtatctaaaaaactgggccgaaagtcggaatttagaaacttacgtagatgaagttggtaatttaattatccgaaaggatgcaactacgggtaaagaacatgtatctggcgttattcttcaaggccacttagatatggtcacacaagctaacactggcacggtacatgatttctttaaagacccgatttgtccagtcctcgaagatggctggttaattgccaaagacactactttaggtgctgataatggcataggggtggctttggctttagctgttttagattcaaatgatattgctcatggaccaatagaagttcttttaacagtcgatgaagaagcaggtatgagcggtgctcgacttttagaagccggtatattaaaaggaaaatggttatttaatattgatacagaagaatggggtgagttgtatctagggtgtgctggtagtattgatattgaggtagagcaaccgcttagctatgaaccaatttctaaagatttaaatattgtgaatattcaggtggctggtcttaaaggcggacactctggcatagatatccatttaggacgcggcaatgcaaatgttattttggctcgttttttaaatcaatatttaggctcacttggtgggcatcttgttgagtttacaggtggtacggcccgtaatgctttaccgagagaagctgtagcgactattgcaatttcatctaaccaattgcctgaattagaaaaattactcgatgaatatcaaacagcatggaaaaaacagctacaaggtgttgatgacaatctgcaattaacaattcagcctaatagtgctgaagtgactgaagtgattgctcaacaacagcaaaacgagtggttacaagctttagcaacaagtccttatggcgttgcaagtatgagtcaagctctcccagatgtggttgaaacttcaaataacattggagtggtgagactaaatagnnnnnnnnnnactaaatag

SEQ ID NO: 69923 - DNA, 327 bp, Acinetobacter baumannii
  misc_feature (312)..(321): n is a, c, g, or t
atgaatattctgatcgttcatgctcatccagagccactatcttttacaacatcattaaaaaccacagcccagcaaacttttaaaaagttgggtcatcgtgtagaagtttctgacttgtatgcaatgcaattcaaccctgtagcttccaaagaggattttttagaactcaatcaacccgactatttcaattacgcattagaacaacgtaatgccgccaagcaaaaccttttagcacctgatatccaagcggaaattgaaaaggtaaaacgagcagatttgatcattttaaacttccctctttactggacttcnnnnnnnnnnttttaa

SEQ ID NO: 69924 - DNA, 609 bp, Acinetobacter baumannii
atggaggaatttagccagcatgactcaattacttcagatgataacgaaacaaaatgtgataaagattcgttgattagaccattaaatcgtattttatttggtgcagctggtactggtaaaacttaccatacaattaatcattcactcagtattttattgaataaaacttttgaagagttagatgaactttatccagatcgtactgagctaaaaaaaatatttgatcactataaagaaattggacaaattaaatttataacttttcaccaaagttttagttatgaagattttgttgagggtattcgagctgaggctaatgataaaggactaagttatgatgttaaacctggtttgtttaaagaactttgtgatgatgctcgaatggagtatgaagctaagcgctcaaatagtattcaaatagaagatgaaagtattaatcaagctattgaacgattaataaggaaagcaaaagagaaaaaacttgtttttcatactaaagcaggcaaagaaatacgagtttttgcaaatcagcaaggcactttatttgccttaactcaaaaagatatagatatcagtttgtcgttaagacatattcgtaattacttatag

SEQ ID NO: 69925 - DNA, 633 bp, Acinetobacter baumannii
ttgattacccaaattgaagattctaaacgtcaaggtaatgatgaagagttaagtacaattttgccttactcaaaagaagaatttagtattcctaataatctttatattattgggacaatgaatagttcagaccgttctctaactgggctggatgttgcgttacgtcgacgttttgattttattgaaatgccaccaaaacctgagttgttaagagatcaggaagagaacgacatagagattgatggtattaatattgtgaaattactgactgtaataaatcaacgcatcgaaatactattagatagagaccactgtattggacatgccaatttcatgcctttaatagtagaaccagaaatccaaaaattagctaaaatttttcagcaaaaaatcattccacaattacaggaatatttctttgacgattgggaaaagattgatgcggttttaaatgggaatggaatgcttcataaaaagtatgagctaagttcgcaaaatagattatttaaagatcaaagcttgattaatcgtaatatttgggaaattaaggctgaagcattcagtgatgtgaagaagtatattgcaatttatgatgaaacatccgaagtcagaaatgagttaagtggattgtga

SEQ ID NO: 69926 - DNA, 300 bp, Acinetobacter baumannii; identical to SEQ ID NO: 59183

SEQ ID NO: 69927 - DNA, 435 bp, Acinetobacter baumannii
ttggttaatgtggttgttacagttactgctggtgcaaccgcatctactgtgccagttgatggtgctgacgggttacccgctgggtcagttgcaacaactgtaactttgtctccatctttaagatcacctgggtttggtactgtccacttaccatccgggcctgcaactacagtcgctgtcgtaccatccgggaaagtgaccttaactgttgaaccagcttctgctgtacctgttacaggattagttgcattgattggatcaattactggtgcatttggcgcagtggtatcaacagttaccacagcattagttgtacctacattacctgccgggtcggttgctgtcacagtcacggtatgcggaccgtctgtcaacactggaagtgtattgtctgcaagggtccaggtgccatcaccattattggttgccgggtag

SEQ ID NO: 69928 - DNA, 1701 bp, Acinetobacter baumannii
ttgattcctatttttgagaaagggttaacatttattaatcaaatattcatacaaataagtcaagacctaggttatgaatttgttcaaacacagattaaaacactctccgaggtaaataccgagcattaccatgaagctgccaaaaactacgaacatgtaaaaggtagagaattagatcaattttttgaatacttacgtagccctagtgctgttaaatatgtatttgataagcctctagcttatgttgaactaaatagtttaaattggaagaaacttccaagtactgaaaaaaagaataaggaaaaagttttacccgataatgtatttgaaaatttatccaaaatagcatctttaatcgtagtggactttttaaatgcgacaggtcaaaaatcaaagatcttggatatcaattctttagaagctttatactctagtaaatattcttcttgggcaaatcaagtaggagttaatcatgaaattttgaatgcctatattgcagttcgattgagaaataaagggtactcatcaagttccgttttaagcatcatcgagccctatgattggatgttaaataaaaatggcctagcatgtggattaacactgaggaaagccctaactagtcgcaactaccaattagataaactccgtgaatacttcaatctagtctcatattcatgcgtgtacttggtggctcaatatacaggtatgaggccatctgaattagcagaagtaaaagtaaaagattgctcatgtttagtagaggagcatgaagtctggctgattaaaagtactgtaaaaaagcatcaacaagagattaatacaggtttgtttgatgacaaatgggtggctatacctattgttagagatgcaatattagcagcatcatatatagcaaaaattaaatcatcaccttatcttatctcaaatatggacacagtgagctctagtaattcacctataccgatgggcagtactggcattacccatcagatgaataattttattgtgaaaattttggatgctactgtagctaatcaaattaaattttatccatatatgctacgccacactctgacctatcaattgtttagagcagaagtcagtttacctttaatatcttttcaattaaagcacttcgtagacagtgtgagtaaattcacctcacttggagcaacttcttcagttacgttaggctatggagagattggtgaaatgctctcaaaggatggaagccgaacaggtaataaatcattgcgacgctctgctgaattagaagctgttaaaactgttcacaatccaaatggtacatattatggtggtagagctgttgagcataaaactaatctgataaagttgtttcaaggctatatggctgaaggctacaccgaagaagaagtgtatgaagcaatggctgaccaaggaatggctattgtgtatgttggacaaggcatttgttatggtaatagaaatgaagaatacgatacgactttaccttgcatcggcagcctaagatgtaatcctgccagatgttcacaagctattgtcaccagtaaacatgctccgaaatggcgtgaagtctacatcttaaataaagcaaatcttaataaaccagaatatgctcataatagggagcaaattcaggcagcaattgacgaagctgtaatggttttaaatagtcttggtgaaatggttgaactatga

SEQ ID NO: 69929 - DNA, 948 bp, Acinetobacter baumannii
gtgctgaccttaaatgatctattttatatcagctataaccatgatttaggaggtggaaactctggtaaacatggtactgatggtttttatgcaagctataccattccatttgattactggttattttcaactagttatagtcgctctaattacctgcaaacagttgctggaagtagtgaaacttatcaatatagcggtaaaagcgaactcattaatgcagatttatctcgagtgatttatcgagatgcacaccgtaaaacagccttaggttttggtgggtggtaccgtgaatcacaaaactatattaatgatgtagaaattgaagtacagcgccgtaaaactgcaggttggaaagccactcttgatcatgttgaatatttttctaatgccactttaaacggcaatgtgacttataagcgtggtacaggctggttgaatgcaatgagagcaccagaagaagactttggggaagcttatacgcatgtcgggattctacaagcgaatgccagtttacaagtgccttttaaagtgggtcagcaaaatctgcaatatctagctgaatggcgtactcaacacagcaatcaacctttaactcctcaagacagattttcaattggaaaccgttataccgtaagaggttttgatggtgagcaaactttattggccgataacggtttcttagttcgcaatgaactaagtggctcaattatgaataagccacactcttggtatgcaggtatcgattacggagaggttggtggaaaaactgcacattatccgaatcctttaccaggcacgagtttattaggtgcagttattgggttacgtggacaaattgctcccttgcgtttgaattatgacgcttttgtaggagcaccgttgaaaaaaccagatcacttcgaaacagatgattacacgactggatttagcgtgaattggacctattaa

SEQ ID NO: 69930 - DNA, 342 bp, Acinetobacter baumannii
gtgcgtgttcgtgttattcccggacgagtggatcagattaagtttgctgagggtacttctaaacgtgcacatttatggaatgctttaccgatgaagtcgggtgagctgttaaatattcgtgatatggagcaaggtttagaaaactttaaacgagtacctacggttgaggctgactttaaaatccagccagcagaacaaaaaaaagaatcaggctatagtgatgtggttttagcttggcaacaggctaaaccttatcgcttacacctcggaattgatgattcagggagtgaggcgacaggaaaatatcaagtacagcgactttatcacttgatcatgtgctga

SEQ ID NO: 69931 - DNA, 759 bp, Acinetobacter baumannii
atgaagcaaaagaaattgctcaagtatattgtggttgctattttattaggagtattgacaggttggatctgtcaccacttctttaatgaaggtgagcaactgaagcaaatcgcttcttatttcaatatcgtcacagatatctttttacgtctcatcaaaatgattattgcaccactggtatttgccacaattgtgtctggcattgtatctatgggtaaatcaacttctattggtagtatcacgcttaagtcaatgacttggtttattactgcgtcatttgtatcgcttgcaatcggtatgggtttagtcaatttttttcaacctggcgcggcattaaatttagtattaccaacagctcaagaactcagtagcgcctctctcccagcgactactggctttacactacagtcatttttaagccatgtttttccacgcagtattgcagaagccatggcgaacaatgatattttacaagtgcttgtttttgctattttctttggttcagcactcgcatatgtcaatcagggtaaagaaaaagactccgttattattcgtctaacagatgaactcagtaaaattatgttccgtattactgattacgtcatgaaatttgcacctatagcagtttttgcagcgattgcttctgcaattacagtacaaggtttaggattaattgttgactacggaattttaattgcagaattctactttgggcttttattactctgggttgttttattctcggtgggtgcaatctaa

SEQ ID NO: 69932 - DNA, 453 bp, Acinetobacter baumannii
atggacgccctaaataagttcggtgtgcctaaaaaagtgacgagcttcgttttacctttaggttattcatttaatcttgatggttcaatgatgtataccacctttgcggtactctttattgctcaggcttaccacattgatttgagctttacccagcaaatcttaattttgttaactcttatggtaacaagtaaaggtattgcaggtgtttcgagagcttctattgttgtaatttcagcgacactcacgatgttccatttgcctgaagctggcattttgttattgcttggaattgaccaattcttagatatgggccgcaccgctacaaatgtggttggtaatagtattgctaccgcagttgtggcaaaacttgaaggtgacaaagttgctgatattgaagagtcgccagaacctgtattaattaaaacaacacaagaacaaacgatcgcttaa

SEQ ID NO: 69933 - DNA, 963 bp, Acinetobacter baumannii
atgatctcgaccacagttaaaaaatcactaaacaaactcaaattttaccgtgaaatcgagttaccagattttgccagtaaaggatctattccaatccgtcatttaaatatcgggtttgatggtaaagagattgatgttgaattctatatgaacaatcaatttgccaccttgttttttgctacgctttcagtatttctaacctatggtgaagatttggtgatcgagactgcccgtcaccaccgtgaatttattcaagacccagtgttaaaacagcgtgttacttcccttattggtcaagaagcgattcactctaagttgcataatgaatataacgatgcacttaaagatgttgaatatccggtcgatttataccgtttcttgggcgagaacttctttaaatatgtgtttttgaaatttccgcaaccgcttaaattatcaatgatggctggtattgagcattttacggctgtacttgccgaatacatgatgaaacatgagaagaatttctactattcagacgatgccaaaagccgtgcgctatggatgtggcatatgcttgaagaatctgagcataaagatattgcttatgatgtctatcaggttttaaacggtaattatccgttacgtgcaaccggctttttaatggctttcatcactattttaggacttattccaacagcaactttatttgtacccgtactacgtaaaccacaagaaatgctaactaagaaattctggaaagatgcacgtcgtggcgtcaacttaatttttagtccaaaagatggtgtatttggtagcactattggccagatttttgattacttacgtcctaacttccacccaaatgatcatgacacgaccgaataccttgagtactacaaaaacaaattacttaacgagggcggtgctatagcgccttactttgtgaaggaatttacaccaccagttcgtgcagtttcataa

SEQ ID NO: 69934 - DNA, 960 bp, Acinetobacter baumannii
atgatctcgaccacagttaaaaaatcactaaacaaactcaaattttaccgtgaaatcgagttaccagattttgccagtaaaggatctattccaatccgtcatttaaatatcgggtttgatggtaaagagattgatgttgaattctatatgaacaatcaatttgccaccttgttttttgctacgctttcagtatttctaacctatggtgaagatttggtgatcgagactgcccgtcaccaccgtgaatttattcaagacccagtgttaaaacagcgtgttacttcccttattggtcaagaagcgattcactctaagttgcataatgaatataacgatgcacttaaagatgttgaatatccggtcgatttataccgtttcttgggcgagaacttctttaaatatgtgtttttgaaatttccgcaaccgcttaaattatcaatgatggctggtattgagcattttacggctgtacttgccgaatacatgatgaaacatgagaagaatttctactattcagacgatgccaaaagccgtgcgctatggatgtggcatatgcttgaagaatctgagcataaagatattgcctatgatgtttatcaattactcaatggtagctacccactacgagcttctggcttcttcttagctttctttactattttaggtctaatcccagcaactaccttgtttattcctgttttaagaaaaccacaggaaatgctgactagaaaattctggaaagacgctcgccgtggtgtcggacttatctttggtccaaaagatggcgtattcggtagcacgattggccagattttcgattacttacgccctgacttccacccaaatgatcatgataccactgaatatctagagtactacaaagacaaattactgaaggaaggaggtgcaattgcgccttactttgtgaaggaatttactccgcctgtacgcttgtcttaa

SEQ ID NO: 69935 - DNA, 282 bp, Acinetobacter baumannii; identical to SEQ ID NO: 69814

SEQ ID NO: 69936 - DNA, 564 bp, Acinetobacter baumannii
ttgacctttgatcagacgttgcaaaaaggtttaaaaacaattaatcaaacaagggtttttgttaatgaatcagcaatcaatagatgggcagaatcagaaattttaactgattttaatcgttggattgctacgaaaagctcgtcttctggtacacgttttatagatgatattgtcagtcaattctcagtggatgctaagcatcttcaattacttcaagatgtatcggatggtcagccaagtatttcatctgcaatgttaatagatattattgatcgattatataaacgttttttaactgatcctacagatggattagattgttatctaagcttaagaattagacatggtagtttaaggggtactattcttggacctttggaagaaaaaagactgctatatttttcaggtgatatatctaagcgtgagttcgttaaagaatggtctgacagtttagaatttaatcatctaactctagaggaaattttagctattcttgaggatttctctaaaataaagaaaaaccccgtggagcatttaaatattggtttaacaaggaatttttga

SEQ ID NO: 69937 - DNA, 294 bp, Acinetobacter baumannii
ttgaaatttcaaagttctttttataaacaattcctactgttttatgaatggcttcatcttttaaatcaatcagtacgttatgttccttatcaacgtgtttggcaaaatgtcttggaattgcacttactccaataccgtaagccacaaaacttgagagtgatgaaatttgatgacattccacttttaaatcgagcgttatattatttcgcaaacaattttgctccactaaatatcgaacaattgaaggtttctgtaaggtcacaaatgggtttgaacaaagctcatgccatgtaa

SEQ ID NO: 69938 - DNA, 273 bp, Acinetobacter baumannii
atgcgcattattaaagctaagggcgatagcatgactgactacatcaaagatggagatttggtcggcattgatatttctcagacagaagtaattgatggagaaatctatgctgtttatttcgctggcgagggaatgattaaacaaatttttaaagaagctgatggctctttaattttgcatagtttaaatgaaaaatttagagaccgccgtgtaactgaagagaacgggaaaaactttaaagtaatgggccgtcagttctggcgagcaggttaa

SEQ ID NO: 69939 - DNA, 630 bp, Acinetobacter baumannii
atgtttttaccaccgatctctttattttttattgtgaaaactagtctatacaatttaaaagattcgttttctgttctttctgatataagtaaattgtttttttattcaacattttataagctttttgatttaaccttatcttcttttgtgatcatattttttattaaaaagtttgagctaactcttgagttttttggtgtggttaatactattttaccgctacttgctgttgtattttgtggttatgcttggggacggatgagtagtaaatttccagcaaattatataatgttgttttctttgttactgaaatcattaaccttgttgttctttatctatgtaagtttttataatgaaattaataaagtttatttacttgtcttgttctcactcaatattgtttcatctagctttgttacttattctttttccaattatttaatgcaagctgttaatagtgctaggtcatcatttaaattttctattttaacatctttgtctatgcttttaattttggtatctgtaccagttgcatcttatttagttgataattataactggatttcattttttacctttatatttgctcttcaagtattaagttatatatctgtttttaaaataaaataa

SEQ ID NO: 69940 - DNA, 708 bp, Acinetobacter baumannii
ttgatcgacgataaagttacaaacattaaaaaggatgatggacttttttgtgaatggaatgatgctttacagcaaattatattctatcgttcagatgatattattacccaagcaggcgattataactattgtaaatatacaattagcagtaaagatggcactactcaatcatctgggttattagaagcccgatttgataatatcccaccagttgctggtgatggaactgtaacttttaaatatttagcaaatgaagtcattcctttgaatttattacagtatgcgaatgatgatggagatggtcctacaagtacacttaagacaaagccaaataaacctaaattttgggtgaatgatcagggtgtagagttaccgatttatataccaagtaaaacttcaaaggatggtattttcaaggtagtcaaagcagatcgagaagggccatgtcctaaagatgatagcggtaatacttgctatggtggtaacatctatattcaagcgagtaacgtatttaacaccttcaatgatacattgacttactatgtttatgatgcagatggaactatttcagctaaagcaggaacgattaatttagtaagtacagcaactacaacagatgattctcgaagtggaggtggaggaagtattggaattttctctcttgcttccttactaagtttaattgcctatagacgttaccgtaaataa

SEQ ID NO: 69941 - DNA, 396 bp, Acinetobacter baumannii
gtgcaacaaagcccttgtacgattgaaacaggtgataaaaaccttacagtgaatttaccaacagtatcatctcaatctttaaaaaatgtaggagatgttgctggtcgtacaccttttcaaattaatctaacaaattgcgcttctgctggaaaagttgcgacttattttgaaccaggagcaacggttgattttaatactggacgtttattaaaccataacgcagtaattcctgtacttgctaaaggggtttccggtgcacaagataactctcaatgggtaaatgtttctgctggtggtaatgcggatcttaattattatgctgaatattatgcgactggtgtatctactgcgggtactgtaacttcgcaagtaaaatacacgattatttatcaataa

SEQ ID NO: 69942 - DNA, 1833 bp, Acinetobacter baumannii; identical to SEQ ID NO: 48601

SEQ ID NO: 69943 - DNA, 246 bp, Acinetobacter baumannii; identical to SEQ ID NO: 63561

SEQ ID NO: 69944 - DNA, 720 bp, Acinetobacter baumannii
atgacattaaaagagcttgaatactatatcgtgtattggattactaaagtttatcaccagaagaaacattccgctttaggaacatccccaatcgttaaatgggaagaaggtgtttgggggacgaagacgacagcaggtacaggtttgaaagaacgtgtatcagatgaagataccttgtttattgattttctacctgaatttgaagcgactattcagcgtacaggggtgcaaaaagataacttattctattttgccgactgtttaagacaatgggttaattctattgatccagaggacaataatcgaaagcgcaaaagaaaattcttgtttaaacgtgatccgagggatatttcacagatttggttttatgagccatattctaatacctattttaaagtacctaccgcaaagcgagagataccaccgattagcttatttgaatataagcaggttcagaactatctcaaaagtgaacgtcaggatgttcagaatcaggatgagatttacaaggcgattttgcatctacgtgatcaacttaatcaggctagaagcttgactcgaaagcaacgtcgctcaaaccaaagaaaaaaggaaaatgcaaaagccattactcagctttccgaacagaatcagtctaaaaaggctgtagtttctgaaagtcttcagacaagtgatgatttgtggagtactcctttaactgcatttgacgatttaaggtga

SEQ ID NO: 69945 - DNA, 183 bp, Acinetobacter baumannii
atgcgagatgaagcagccaaagaaaaggctgaattggaagcccaacgccaacgagagcgtgagtcagaagcccgactcgaagcctaccgagccgaacgtgaccgcaacgcccaaactcaaaagcctgttaatagggatgaaccaatacctaaaccacgccctaaaaatgattttgaaatttag

SEQ ID NO: 69946 - DNA, 195 bp, Acinetobacter baumannii
atgggtatctatttaatacatcctttactaatactagcaataaaaaaaattatgccaagtcttttgcttgagcaataccctatttcagcatttgttttcattttaatgttaacaatatcattatgtttaactatatgcttttttatatcaaaacttagcttcgccaattttattattacattaccaaaaaaataa

SEQ ID NO: 69947 - DNA, 270 bp, Acinetobacter baumannii
atgaaattcaaagttgatgtggatgcattaaagctcaccctgcaatggcaagggttctttttgaagggttggtttaaggatcaatggtatgaccttttggactatttggaggtaactttaaaaatactcttgatccttctacgggttctgtattctccaattttaattatctatgtcatttggcaaaccaaaaaaatgtacagacaaatagcaagtggagaagtcaatagagaaaaagtcagaagtcacatcaagagatacggtaagtaa

SEQ ID NO: 69948 - DNA, 513 bp, Acinetobacter baumannii
atgattcagaaaaaaattaaaccggaccttgatttggtttttgcgagatttgccatttttggaatgttggcaattttatttgcagtgctatctactaatggcttgccatcatggtttttatggctcgttctgttatggggtgtgttctcaatgtttgagacagcgattaaagcggatgaggttgcagtggaagcagaagcaacgcagggcaccatgaatcaactcaagtggctggtgaatcatcaacacaagatcatcaagcagcatgatcaatctttagagcgaatgcttgagtttaagaagcgagttaaggaccacactatcagcttaagaagtgaatacaacctatggagcaatgaggagattccacagatagaagtacaacttgatcacttggatggtttgatcgaagccaatagccagaaatgtgattgcaccaatctaccagaaccaaggaatttctttaacaagctgatcgtttgccatcagtgtggaaaggagcatttgatttga

SEQ ID NO: 69949 - DNA, 474 bp, Acinetobacter baumannii
atgaaagaacaaatgacttacaaaaaaatgatgtccttacgcagcgcttatggacaaggggtaagagatgcggaaacccgtgcagcaaattgtttatacgtaaaattaagaaggtcaaatttgatagaaaagtttaaaaaagaaagcgagtcgggatatgacggagtaatcagaatttgcatgaacaatcaggaggtaatgaacgttatagctggtggagatgtaaacgctaattcgctacttaactggattaatcctaactttgaaaaacaatttaaagaactagccaaaggttttggaaggttgatgaaagatattcgcaaaagctttccagatgcaaattaccttattgttggtgatgggatagctttaatgcttggacattcacatagcgatacaggggaagttcaaagagaattaatagctgtccatggtggtttggtggatatgtcaagtggggagcgcaaggcatga

SEQ ID NO: 69950 - DNA, 885 bp, Acinetobacter baumannii
atgcattactacgagcgaaatattggcgactattaccgcaaggctggaaggttaaatatcttgcagcatggggtatataacttgctcatggatgcctgttatgaccgtgaatcatttccaacgcttgaagaggctatcgaatgggtatgggctgaaactgaggaagaaattgacgctgttaaatttgtacttaagaaattttttaaattaaatgacgatggagtttatgtgcaaactcacattgaagaagagttatgtcgatacagagagtattgtgctaagcaagcagagaatggcaaaaagggcggtcgtccaaagaaaaactcaaacaatgattctggtaataatgggaatgcatctgataattctggcttagaaaacgaaagccaagaaaacccaagtaaaacccaaaataacccagaaaaacccaaagaaagccaatcaaagcctaaaccatctaaccatctaaccaacgaaccatctaaccaagaaaataatatatgtccgcctaacggcgaacctgtacccgctgaaaaaccaaaagagaatttcaaaaatgagattcaagaggttttcgatttttggaaagttacgtttaacaaaaacgatagaaccgttctaagcaatgatcgcaagaataagatcaaagctcgactcaaggaggggtatacatcccaagatttgaaacaggctgtgataggttgttcaaaatcctcatttcacattgagaagaattttactgacattgagttaatttgtagaagcgcgaagcatgtagatcaattcttggatattgccaatagttctcaagtttctgatgagaatgtgcagcaaggagaaacagcaccacctgctcaatacaaagtaattgaagggagatggtaa

SEQ ID NO: 69951 - DNA, 744 bp, Acinetobacter baumannii
atgaaccaaatcacagatactagtcaacaaaacagtattaattcacaccttcgttcaaccaacaaaagtagaactcttgaaaaattgcttgctcaaatagatgcatggatggttgatgaagaagtctgccatcacttttcaatccaagcagaaggcaaagaaatttacccatttggaataattaatcgccctttctttcatcttgatcaagcagaaagaaagctagaaagcttgaaaagtgaaaatccagaagtggattactacattaccgcaggtgcctttgatacctcttttttaaattttgaagatgaaaacgtacctatgtgggagcgagtttggcttaaccagcatgaattccgcctcacaaacttacgcatcaaaaaaatgtctcagaaacagttggtggaacttgtaccaaattatgaagaaatgatggtttggcaagacaagttaaatactgctgatagttgccattattactatgcacaggcaattgatgctactggggagtgcatcccaatgtcatctcagttttattttgatttgcgagatgctattagcgcaagaatccactttcaaaaaaccatgcctaatcgtcaagttgagatcctatcagcagtcatgcctacagcaagtttaatggcgatagatggtagaacaagtgattgcttccaaaacttgattgatgaccacaaagagcgtttagcagcattaaatgaaaagggagtaaacaaaaatgcgtag

SEQ ID NO: 69952 - DNA, 480 bp, Acinetobacter baumannii
atgcgtagttcttcacaactttatccagataatcaaaatgtaactattgatgacctcattactgcgcgcagtgaagccaaaaatgatatgggtgacataaacgccctactctctgcaattgaactaagtcttgctgagaagttaaaagaccttgatttaagcaagttaggatttgataaaacctttcgcttgattgagattgctaaaactcaagcagatttatctcaagattatcacaacggcgaacttgctcaattaactggtgggcaatatcaacttgatgagctgaaactttctattgggaatttaagtttcgaccaggatgcagtcaaggtaaatcaaaatcatttagcacctgcgaatgcggctatctctaaaacattgaataccaattttcagaaattagatataaatggttttcctgaaaagcaacgtttaagcattccagaaaaaggatttaaatatgaaaagcggcgttaa

SEQ ID NO: 69953 - DNA, 435 bp, Acinetobacter baumannii
atgagtaatgtaattcgctttagacaaaatgggcttgcatacaagatcagcccgcaagatgtaaaacaaaggctaatcaacccaagtaaagatgtggatctaaaaaaggccgatcagcttcttggaattgattttgaaagcttgccacatgatgagcttttaaagttggctcgcgtggcaacaatcgatcttcttgaaacggatgcacgttacaagaaaaccaatagtgcaataaagcaaatcattcacttgttagggaatttccttgagcgccgatctaaagaggaatggaaaaagtatcacgattctatgactttggacttacaggcagcagcaagagcaattgcatttgaggaagcaaataacatattaccagagatagcgggtagcacgtttgccaatgtctttgcagacaataaagaggtgaaatcatga

SEQ ID NO: 69954 - DNA, 276 bp, Acinetobacter baumannii
atgatcgatattgaacagttaaaaattcggtgcggctataaaggtaaacctcagcagtggcaattcggctttgatttggctgttagtgagttaaccaaagctcaggcggtgccaaagggttgcattgtagttcctagaactagagaggttgtagtggccattgaaaacatggttcagcaacaatgtgatgccagcggagtacaagagccacttcatagattagatgggtggagaattttagaggggattgctgaaaaggttgaggagactaaatga

SEQ ID NO: 69955 - DNA, 258 bp, Acinetobacter baumannii
atgacagaagttaaatttgtttctatgcctgcctctgaattggctcaggttattgaaaaagcttgtgagaatgcagtggctaaagttttagcagcacaagaagatgagctgctaacgattaaggaaatttgcaaaagagtacccggcttgtcatatcacacatttgtaaagctccgtaagcaatacaatatcgctgatataaacggaaaatattcgtctaaggctgtgaaagccttgctgcaatctcactcgaagtag

SEQ ID NO: 69956 - DNA, 960 bp, Acinetobacter baumannii
atggcaacctatcaaaaacgtaatggcaggataactgtaactgtcagaataaaaccacacccagcgaaaagtgaaacatttgacaccaagagagaggctaaagcttgggctgactctttggagttaaaactcagaaatgagaagaagggtaaatttaatcatattatttttaaagatgcctttattgaatatagagatgttgtttcagcaaagaaaaaaggcgccaaacgagagtatacaagaataaattatctcatcgatcatatgaactctgaattgccactttcggaagttgataaggctttattgatcgaatggcgcgagtatcgtctagagactgtttctggatcaacagcaaggcgcgaattgcaagtattaggtgctttctttacatggtgcatcaatacaaaaatgtatttgtcagaaagcccaatgaaaggtgttgttttaccttcggccaatccgcacagagaaaaagtaattagtgatgaagaaatagaaatattgctgccattcctaaaggatgaattaaaaagtattttctttttggccattgagactggcatgcggctttcagaaatatgtgaattggagtggcagagagtcagacttgatcaaaactttgtatatttgaaagacactaaaaatggaagagcaagggaagtgccttgtaccgtggcggcatgcgaaatcataagacagcgtaaaggatatgatgataagaaggtattttcatataacgctaaggatgctagccatgagtttatgagggcaagaattaaagctggattatatgactttacttttcatgatacccgtcatacagcagcgactagaattgctcaaaaaatcccgcttttggatctatgtaaaatgttcggttgggtagatcctaagcgggcaatgatttactacaatcctacttcgagtgagattgcagcaaggctttcacagccttag

SEQ ID NO: 69957 - DNA, 381 bp, Acinetobacter baumannii
atgaaaaagataattttattaggtttggcagttttaatgagtgggtgtgctacgactgcaaatttctttgaactattaccaacacaaacaagtaatgatggatattggactggtgcgcattctaatatttcggttgcaactttaaaattaaataaagatggcacaggtattatttgtcaagactatcaaggtgaagcaaaagttcaatcaatcaaaaaagtaggcaataaagtttatacacaagatggatctttttggacagttaaagttgaaactaatacgaacctagaactagcttatggcgcaggtggtagctacaagttaatcaaagatgaccagaaaactaatatttcaccagcctgtaaggctaaattagactaa

SEQ ID NO: 69958 - DNA, 234 bp, Acinetobacter baumannii
ttgacttttaaaaagctactttgtattggtggtggtgataacggtaagttcgttgaatacaaggaatttcaccagatttttatagatggcatgtttttagaacctgaaacttataaacctacttatttgattaatcctttaaccaaacaagaagagttattttttgttctaacagacttaacagcgtctgaggcagaaaaagttttagcaaaattattgaaaaagaatagctag

SEQ ID NO: 69959 - DNA, 147 bp, Acinetobacter baumannii
atgaaattatcacttaaaaatagattaatactttgctggcagatctggactacaagaagtggacataagcatccagcttcagaaaaagatttaaagatctttcaaaatggctatagagcaggttttgcagatggtaaacagcactga

SEQ ID NO: 69960 - DNA, 408 bp, Acinetobacter baumannii
atggacaaaccaatgacatttattgagtggtgttctagtggcggaaaaattccatattcagttggcatagaagaggcatatgaagctggtcagcagtcacaacaagcgaaagtggaggagctgcaaaagcaattaagtgaatacatattcgtggcggaaactcttgatgaaatgtatgtgaaagaagtccagaaaagtgacgagctgcaaaagcgggtggatgctttaacgcttgcgttagatcagatcgcttacccgattccacatatgcaaaaagaagcggaactcaatggatgtgagttgaatggatattgggcagtaaagatgtcagaagaccatacatattctaaagacattgcacgcagagcattagagaaagagcaagcgctcaaggatggtgaggcatga

SEQ ID NO: 69961 - DNA, 315 bp, Acinetobacter baumannii
atgaaaccagaacagtttattcgtgagtacggggtggagaaggcgagaaaggttgttgagggggcgcctgatggtcacaaaggatacaacgatgttattaaccaatacacaagaggggtttggtttagtagggatgtgatgctttccgacctcaagcgtctcgttgagagtgttgaactggttgaagtatgtggaggacttgttgaagcaaaaaagaaaatgaatagtgaatcccttcgttctgcaacgattgagtatgttttatataaagccatccgcgaccacgaatcaatatacggaggcggggatgagtaa

SEQ ID NO: 69962 - DNA, 369 bp, Acinetobacter baumannii
atgtggattgttgtagctgcaaaattctgtcgagaaatcattattggttttctcgcttttttattggtcataactttggccgtacttaatcacaaagaaggccagcttaaagaagctgatcaaaaatgcttggcacagatccagaaaattgaaaagaaaaatttagaggcccttgcagaaaagcaaaatcaaattaacaaagtgagcgcagactatgaacaagtcaaagcagagcaaaacaccaaagtcgaatatattgagcgtgaagtgcaaaagatcgtggagcgtcctgtttataagtctagctgtgttgacgatgccggggtgcagcaactcaatgaactcattaaagccggtaataccagctaa

SEQ ID NO: 69963 - DNA, 246 bp, Acinetobacter baumannii
atggaaattgcagcgagattggctaaagttactgcgctgattatcagccgagatgtcgttattgattatgccttatacggaactccagaattagccctcgttgcgaacaacaaagccagaaatcctgcagttccgcggacgctgataagtagacagattcctgacacggaatactataacttacatcacttaaataggatgcataagttatgcaagttacgccacttaaataagttaaggcgctaa

SEQ ID NO: 69964 - DNA, 1032 bp, Acinetobacter baumannii
atgtggcaaattaatgaggttgtgctatttgataatgatccgtatcgcattttggctatagaggatggccaagttgtctggatgcaaataagcgctgataaaggagttccacaagctagggctgagttgttgctaatgcagtatttagatgaaggccgcttagttagaactgatgacccttatgtacatcttgatttagaagagccgtctgtagattctgtcagcttccagaagcgcgaggaggattatcgaaaaattcttcctattattaatagtaaggatcgtttcgaccctaaagtcagaagcgaactcgttgagcatgtggtccaagaacataaggttactaaggctacagtttataagttgttacgccgttactggcagcgtggtcaaacgcctaatgcattaattcctgactacaaaaacagcggtgcaccaggggaaagacgttcagcgacaggaacagcaaagattggccgagccagagaatatggtaagggtgaaggaaccaaggtaacgcccgagattgaacgcctttttaggttgaccatagaaaagcacctgttaaatcaaaaaggtacaaagaccaccgttgcctatagacgatttgtggacttgtttgctcagtattttcctcgcattccccaagaggattacccaacactacgtcagtttcgttatttttatgatcgagaataccctaaagctcagcgcttaaagtctagagttaaagcaggggtatataaaaaaggttcatcgcactttgccgggaaatgcagcacggatcttgaggaagaagtagtccgtgtcgcggtatccgtaggccatccgcttaatgactttgatccggttgttcatgccctccagcacgctggtgttcagccggtggagggcactggaaacgataccctccatatatggctccagcttcttggcaaatcgtaccaaagcatcaattccgctaccgagggccatgccggcccattccagccaggcgcttctggccgtcgtctcgctttccgcaaaccatag

SEQ ID NO: 69965 - DNA, 438 bp, Acinetobacter baumannii
gtgtttgatctgtctatctttagacagcaattaggcgttgaatctcaccaatacaaaactatgagcaatttcaaaacctatgttttagatttcgcactcaatcaaataaatgagctaaccgatataacagctaagtatgaacaacataagaaaggacgtaccatttcaggattttcgttcacttttagacagaaaaaaaatgcctcgaaaaaagaaattaagaatgaaaatctctcagattttttctcaaaaataactgatcctcaacgtcacctatttgccaataagctctctagactatctgaaatgagcatttactctcaaggtacagaaaccttcgaacagtttgctgtccgcatagcagaaatgcttaaagacgctcaaaaattcgaagaattattcccttatcttcaaaaagttggctttgcatctgcctaa

SEQ ID NO: 69966 - DNA, 1629 bp, Acinetobacter baumannii; identical to SEQ ID NO: 61392

SEQ ID NO: 69967 - DNA, 126 bp, Acinetobacter baumannii
atggctaaaacagcaatcagactatttaatcaagaaagctacactactgtcggcatggataggatttttgccgagtcaggtgtatcaaaaatgacagtttataaatactttataatcatcttataa

SEQ ID NO: 69968 - DNA, 198 bp, Acinetobacter baumannii
atgagttatcatatttttggtaatttgtatctcggtttagttctgtttctcgatacaactctacttgtgttccatctgttggtgcagttgcaaacactacttttagagcattcatatcaactgtatatgtccccacaacaggaatttctttattcactgttacgatcaagtactctggatcatgaagatcaaaagtaa

SEQ ID NO: 69969 - DNA, 408 bp, Acinetobacter baumannii; identical to SEQ ID NO: 55364

SEQ ID NO: 69970 - DNA, 327 bp, Acinetobacter baumannii
atgaagaatagcctattttactgtcttgcattagttttaattataggatgccaaccattagaaaagaatggatatatttctattaaaaattggaccaatgccccaatcacagatcttaaaataacttatatcagtgctcaaaaaacttatagcttaggtactctttatccttattcggaatataaatacgccatcaactatgagcagcataatgaggattcaataatcttttcatatgtagataaaagtcataaaaagattaatcaagaagtagctacatatgcagccaaatatgataggagaatttatgaaataattattcaatag

SEQ ID NO: 69971 - DNA, 1020 bp, Acinetobacter baumannii
atgttaaacaaagatattaatcaacttgaagaaactgcaattaaatggtggccagctgaaatacaggaattagcgcaacaaatcagcattattcctaaactactagaaacacatgatcgttttataagtattcttaagttatctaaccctcatgaaccacaatcaatttttgcattaattgaggcatccaattttccagctaatgtctttgttaagcacttatcaattttaactgattttggtggagagttactcaaaagattatcaaatacttatgaagatatttttttcagaacttctgagggtaagctttattttaagtatgagttcgagggtgatgaaaaaatatatttcttcaaaaacaatacatttaaaggtctcagtaatagcaaactaaaaattgatggagaatctttttcaaaagattaccatctaaatggtttatatgaagatattattatgatcttcacctatggtgctttctcaggtcacgatgttttttttgagtgtgatattgcaagtaggattaatgatgcagatgctttagatacttacttaaaacagcgctatatttctgtaagtaaaattactagtggagctaaatctaattcaaatggtcagatcttacagaaacgccttcaatcacaactacagcaaagcttaggcgatgatttcgatgtaaaaagtaatggaaaagttgttttaaaagatcaagaagaaaaatatttaaattttgatttagttataaataaaaaaggaagcaaatcatcaatagggcttgaaatttcctttcaggtaacaacaaatagtgttattgaacgaaaagctgtatcagctcagagacgattaaatatgatgcactcagaaggtcattatgtaggatatatcatcgatggggcgggtaactttgaacgtagaagtgctgttagtatattatgtagctatagtgattgtactgtgaattgtagtcaatccgatcttcttcaactttcctcttggattcgaaatacacttgtttaa

SEQ ID NO: 69972 - DNA, 1278 bp, Acinetobacter baumannii
ttgtttaatttcattgatttattttgtggcactggtggtcttcgtttaggcttagaacaagcattggcagaattcggcattccctctcaatgtattatgagtgctgaaacagataaaaaggcttgtgaaagctataaattaaactttcatgaggatccttatcgtgatgtcaagtcagtatcgaatcttcctcatttcgatatgctattagctggttttccttgccaggctttttcttatgccggtaaacaaaaaggattcgaagatactagaggaactttattctttgaagttgccagaattcttaaagaatctaaacctaaatttttctttcttgaaaatgtgagaggcctagttactcacgataatggaaaaacttttgagactataaagaagactctagatgatttaggctatggtattaattatttattattaaatagcagtcactttggggtaccacagaaccgtgttcgtatttatattgtcggtatcttgaaccaagaagtgaaactaactctatcttcagatagtggttctagtgactctcacaaatttaaagatgatttacaaacggatctcttttctcaagatcgtgatattacgttgattaaagatattcttgaagacaacgttgatacaaaatatctatgttcaaaggaatttacagataaaatttctcaagcattacatggagatctaaataaaattcatgggtatagactgactgactaccgtggaggaaatgctatacattcatgggaattggatctaaaaggtaagtgcagtgaagacgaaattgattttatgaactctcttatttctaacagaaggaaaaagattttcgggactcataaagatggtaagtctttaacaaaggaacagattttcacattttatgatgctgaaaagtttgaaaaagttactccttcattaattgaaaaaggttatctacaaattacctctgaaggatacaagcctgtatgtggaaatatgtcatttgaagttttcaaatttctagatcctaatagtattagcatcacccttacagcgtccgatagcaatcgtttaggtatttatcaccaaggtgttctaagaaaaataacacctagagaatgtgcaagaatacaaggctatcctgacacttataagttaataaatgatcaagctgtttataagcagatgggaaatggtgtttcagttccagtaatcaaaaatgtaattcttgatttttttaaatcaaataacatttttgaatgtaaaaagcttacagcttag

SEQ ID NO: 69973 - DNA, 213 bp, Acinetobacter baumannii
atgatttcactagcaacgcaggttaatgaaagatttggaaaatttaaaaatccttttaaatcaaaagccttattctttttggtcggtgtttggtttgctattgttggctttaattacgttgatgttataccgaatgacgattatgtagtgatctctcagtgtttagctgtattagcaatttttgggtatttatttgaatctaaaaagccttaa

SEQ ID NO: 69974 - DNA, 870 bp, Acinetobacter baumannii
atgatttatttttgtgtcaaaacagatgaatttttagcatcaattttggataaagttagtcttggagcacaatattattgtcaatttgatgtgccactttctagagctgaaatgatcattgaaaagcttaaaaagcgttatgttcttgatcagactgctcgacagcggaattatcgaatgcagcaaaagttaatgccggtggttgatttggtggtgttgctgaaccaaagtttatataaagtagagatggtccggctttgcttactgtgtacgatgccgcttgagatgcgtcctatttcgttaaaatgtagtgaagtgctacgaagttcatatcagcttgaaaaatctgaacttgattcatttcattctcttttagatcgaaataaccgtctgatttttatgagcgttgctaatcctgttttactcaaatctgcaaaagaaaaattgaagtcagttgcagtgtatgagcttgtacgaattccatataccgctgaacagcgaaaacaaaagaacataccgcaaaacaaggcggagggatggacgtggcgacttcataatgaatttatggcattaaaaaagacacagatcaccgatgtttttaagcgacaacaacagaataaaaaacatcatcatgtacaagacgaggctgtgaaaaaagaactgcaaaaattatggagtttgtgtggttttaggggggtcaggcagtgtatttttgagttaaatcgtcgtgtcccaaattggtatttctcttatttcaaccgaaagtcatctactgagctggttgtgccacgctataaaattaaatccaaaagacttgtttcaagtttcaatgaagcattgatgtttcataaaaaagaggtgcaaacatga

SEQ ID NO: 69975 - DNA, 576 bp, Acinetobacter baumannii
atggctaaactttcactgagtgaggtatccaaacagtttaatatagatagatcaacgatctatcgagctgtccgtaacggacgcttatctcgctctagtgatggtaactttgatgtttcagaagtcattcgatgctttggagaaccggagccagcagttcaaccaaatcaacctgctaagcaaagcactgatactacaacacagaaattaatcgctcatttagaaaatgaagtaaaaaaataccaagagcgagaagagcgtttaatgcaacaaattgaccgtatgcaaacactaattgagttaaaaagtgtcgcacctgctacggcaacgccacaacaagatgccacagcatgcgacacagatatgccacagcatgcgacaacagatcaagatactgataatgaaaagaatattagttcatttattgcagaaaatgttgcatcaccacaacaagatactacggcacaacactacaaaacgctacagcatgcaacactgcaaaatgaggctgtgccacaacgtaaaaaacgtagtttatttggacgtgtaattaatgcggtatttgataatgaatag

SEQ ID NO: 69976 - DNA, 234 bp, Acinetobacter baumannii
atgaatgatcaattaagtgagcatgcaattgctatagccgctgggcatatcctgcagcaaaggtttattgcagtggccagcactgaatccgtcctttatgcggaaaatgatgtcttgctacgaaaagagccggatcagcagccagtatttgtgaagtacttggttggccgtaatcccgatttagctaaacgcctgcttaaccggagagcatttaaaattaaaaagcgtacttag

SEQ ID NO: 69977 - DNA, 732 bp, Acinetobacter baumannii
atgggctatagatctggtgggatgatatttccctttaaaggtaaattagaagaaatagttgacttaattaacaattggactgaaaaagactttgaaattttagaacctaattttaaagcaaatgaagctattgaattagagtttattaaagataatttagtcattattcataaccacaattttttcttttctgcttatcaagataaagatttatggaatgaaaggcttaaaaagtcctcattgaatgattgggtaatattttttgaatgtgtagatagttctaatgcagctagttatttgatatttaaaaataacatagaagttagaagagttactgaatgtgaagatcaagctttttatcaggatggagaacctcaagactttgaaaaagaatggcttaacgcctcaataggttatgaacatgaataccaagaaggtgatgaatggaaagaggaaattataacggatccaaaattttccttggatgacattgaagagtgggaaaattattataaattttattatgttggctctatagataactccaccaaccatttagctagacagttactaagtgacttgtcaaataaatatctgggttttgatttgattaatgatttttatgaaatagaaaatagaattaccctaggctatggggagattgctgaaaaacagttaactcccaatacacaagaaaaaagcttttttcagaaatttttattttggaagtaa

SEQ ID NO: 69978 - DNA, 1050 bp, Acinetobacter baumannii
gtgaagactagccacttattggctccttttcctgaagccatgatcgattcagcattctttgatcgctttcatgcctatatcccgggttgggaaattccgaaaatgcgcccggaattctttaccaaccgttatggcttgatcgttgattatctggctgagttcttccgggaaatgcgtaagcgtagttttgcggatgccattgagaagtactttaagctagggaataacctgaatcagcgtgatgtgattgccgttcgcaagacggtttctggattgatgaagctgctctacccacatggtcaatttaacaaagaagatgtacggcaatgcctggaatatgcgctgcaggtgcgccgtcgggtcaaagaacagctgaaaaaaattggggggatggaattctatgatgtgcattttagctatatcgacaatgacaccctagaagagcattttgtttcggtaaaagagcagggtggaggtggacttattcccgaaggtcctgctaaaccaggcttcctgtataccattggcctcagtaataagggcatgccaggcttataccgcttagaacttcaagtcactaaaggttcaggaaaattggcgacatctggcttatggaattcaagtagtgccaaagaacaggtcaagattgcttttgattacttcaaggccaatgcatcccggatctcgggggggagtaaggtgctggaacatgatttccatttacatgtggtggaattacagaataccggcccgctcagccatcttgctctgccaagtttagtggctttcgcttctggcctcttaggacgatcggttcaaagtcagatggtggtactgggtgatatgagcttgggtggttcagtgacaccggtggaaagtattgccgaatgtctgcaagttgcttttgatgcgggtgccaagaaggttgctttgccaatgagtagtgcggcagatatcccaacgattcctgtggaactgtttaccaagttccagaccagcttttatgcagatccggtagatgctgtgtttaaggggctaggggtggattaa

SEQ ID NO: 69979 - DNA, 420 bp, Acinetobacter baumannii
atgcaaaataagcttgataacattattcaagaattaaaagaactatctgggaatagtcgtctaaacatagaactacctgatgatattttcatatctgcttatgaacgaaaaataggttttatttttccaaaagattataaaaaagttttgaaagagattagcaatatcttttatggaacaattgaattagcgtctcttacagatgagaaagaatgctatcgagggctatctcagatattaaatgatgctagggagcaaggtctgccagaagattggctacctatttgtgaagataatggtagttattattgcctatctcctaatcataaaattagatattggacagcagatggatatagcgatgagcagtgggaagatttagcagattggatcaagcaagtttggatagatggaaattaa

SEQ ID NO: 69980 - DNA, 531 bp, Acinetobacter baumannii
atgactttaaaggggttagatattcaagaagattgtatcaaagctatttctaatgaatctttaatatttgatattaagaataaagagtttttagaggatatagaaaatcttttattacagtattttcaaaattttagtaatgatttaaatggaattgagtttgataatttttctgtggagttttggttcgatgcaggacaattgattatttatcctgaaaaagatttattagatcgtaaaccctttgaatctgaatatgatttagatagattagacccttatttttatctagtttgtgaagaatataggatatattttgatgacttaatatctcgaaaagtaagcgatcaagtatctgaaaaagaagctatttctaaaactaatgacgtaattgattgtgtaagcaaagctataaaaaatataaatgatgaaaacaatcttttaaagatgttaggcaggcctaaattagaaataagatatttcggtgtaacgaaagaagaacttttagcaaaagaaattctcgtgaaatga

SEQ ID NO: 69981 - DNA, 900 bp, Acinetobacter baumannii
atgtctagtttagcactaagctttaatgatgtgaacttttcgcctgttcaacacaacaaccaaatttggttaactgcaagtgaacttgcaaaggctcttggttacgccaaatctgatgcagtaactcaaatctatgaacgtaataaagatgaattcaatagcgagatgaccttgacactcaaattgagtgtcaagggatttggtaatggaaactcacttaaagaaactcgtatctttaatccgcgggggtgccatttaattaccttctttgcacgtacttctgtagcaaagcagtttcgcaaatgggtgcttgatgttcttgataaagaaattggcgcaccagttgctaaaactcataaatcagaacgtgaacccctaaccaatgctgtaaatcttcttgtagctaaaactaagcatttgaattacagcgatgcttataaattagttcatcagcgtttcaatgttcagcatattgatgaaattccatacgatgtaatacctgtggctgtggagtatgttcaccacttaattgctatgtacagcaaggctgaaaaacaaggttctttatttgatgaagatcaatttaagctgctcaagaacctaattgatgcaattatttcccaaaactttgctaccagtcgaatctatcgagcagtacatatgcttaacaacgagcaaggacactacttagctgaatatgcttttaaaactaatattgcagttctaaaacttactcgggcaatggatttaagagggccacttaatagaaaaatcattagtgatgatttaaaaaccataagctacacaacaggcaatcaacattatagcgaccgttggtttcatccattgatggaatcgggaatgctagctggtgctttgcgaatttctggtggttggtag

SEQ ID NO: 69982 - DNA, 2655 bp, Acinetobacter baumannii
gtgaaacttggaggtaatgaagcacaaaatgcggcaattcagcatcaaaaacaagcggatgctttaggaaatactgctactgaagcagaaaaggcaactaaggctttgcaagattatcaagccaagcaaaaagatagcgttattgattcaatctataaatcaggttggcttgataaaggttacactgttgctcaagctaatgccattttagaactgcaaaaagctaaaggaatgagtgcaattttgtctaaagatgaaattgatagcgcacttagaaatctcaagatcatcgaagaacaacaggagcgagaagataaattaactgaagctaaaagaaagcagacgcaggaaattgaaaaacaagcaaaacttactaaacgcttggtcggtatttccggtcaatccggtattggtactggtccacatcttgacgtccgatatggtggctcattgtcaggtcagaaagtttctaatgaacatctggctcgattacaggcgggaggaaaacctttaacttcctacaagatcagttctaattatggtccacgaaaagccccaactaaaggggcttcttcatttcataaaggtattgatttttcaatgcctgaaggaacaccaatcacgaccaatgttgctgtgaaagatatcaagacatggtatgacagcaagggaggtggttatgtcagtgaagtgatctttgaggatggagtgtctcttaagcttctacatcaatctcccaagatgcagagcaaggtgaaaggtggtgcaagtaaaggaagtgataaagcagctggtgatattcaatctcaacttgaacgtcaacaggatttgcaacggtcacttgaaaatgaggtggctagtgaagtcggacggattaacaataatagaaaggcaagactggaggatgttgataaagcaaactttagcccggaacgtactgcagaaataaaggcggaaataaatcgtcgtgcagataatgatattgctatagctatagccaaacaagcccttagaacgaaattggaagactataaggagttccagaaaaccgaggaacagttactagaagagtcctttaaccgtaaaaagttcaatgcagctcatgaccttgaattaagtaagtttgagcagaagcaagctgttgaattgctggaacagcaaaaacagcaagagttagggttattaaaactagctcaggaacagcggttgtttcaagcccgtttatctctgctttctgaaacgcaagccatgcaggaacgttacagactcgaacgggaggaaattcttaagaataccaagctttctatagaagagcggcaaaagctaatcgcattatctaaagccaatcaggataaagagacacgcgataaagtgaataatgctgctcaaaactggggtggtatccaagcggatatgaatggtaccggagaatttttcagacaggatcaggaacgatttagccgtttaaatgctgcaaatgatttagcagatagtcaatttgctgctaccgacctgaatgagcaaaactctttagatggtttgaatgctcaattcgaagctggactaattaagcagcaggatttcgaaaaccagaaaacagcaatcattcaagctgctcaggaccaacgcaatcagattgctgccgaatatgctcagaatgctcaggatattgaagataaatatcagcaagatcgtttgaacacccaaattgcatttggtggccaaatgatgggttctcttacatctatgtttggttcaatgtttggagagcaatctaaagcttacaaaatcatgttcgctgcagataaagcttatgcgattgcagctgctggtattgcgattcagcaaaatattgcagcagcttcaaaagctggttttcctcttaacttaccgttgattgctggggcagttgctcaaggggctagcattattgcaaacatccgggcaatcaaagatcaaggctttgctgaaggtggttacacgggtcgaggtgggaaatatgaagttgctggagctgtgcacaaaggcgagattgtatggtctcaagaagacattaaaagatgggggggagttggtttagttgagaaaatgcgtaagagtacaaaccctgaagcttttctcaataacaatgcttcagctgatagtgtcatgcgccgtgcaatgatgagctctagtgcctttatagaaagccaaaagcaagctgatatctttaatcaaccggttcaagattctcagattatttataagggtaatagaagcgtacctatcgcttcttcttcggccagttctgatctataccacgatggcaaggtctacttctcatccaatggtttagttctggatcgctcaaatctggatgatgttcaggactttacttcaggacgtgcttcacgccctcaagctgagattaagccttcaattgagccagcttcatcgataatcaatttcaaaattgaagtgattaatcaggtgagtggggcgacagttgaagccgaacaactggatgagcaaacagtccggatcattgttaaagatgaaatggataagcagcttccaagaacggtaccgaagcttgtaagtgatcaaattggtaatccaaactcaactattagtcgatctttgactgagaataccactgtaaggcgtaaccgttaa

SEQ ID NO: 69983 - DNA, 1095 bp, Acinetobacter baumannii
ttgattggagattcgattacttatgggtacggagcaactgataatggggcggggccaacaccaccacatggcccagcaactaccaaaacatgggcaaatagtgttcgcgactacttgggtactgcattttgtacgagtgaacgttttgatgacactatcttggaaacgggtgaagcgtattatacaagcgatggtacaagcgtattaagtgcagaactatcaaattttacttttaaaaacagtgctacaggaaaagaattcacaattgcagaaatgcaagcattagttgggatacttccaacttcacctgtaggcacctatattgatctacgaagtccttcgctaacctctgttattgcgccaacggatatggagtttctttttaatggcaatggctttaccattaatcacgcgcgtcttagcaatggtagcgcaacagaatctattatcgatgtttttgttaatgatgtgctgcactctagctttaatgtttatagcgccacgcctgattttctcggaaagcatgaggtcagcgatttagttgatggtccgaagaaaatccgcatttctaaccgattaactaatacacttatttatgctcgtttattatcaattacagcaacacgtaaaatttccgtaattaacaatggcgtatcaggatcaaatacaggttcttggttaactggcaattggataccggatcgcattagcaacaaggataactatgttattgttatgttggggactaatgaccgacacacaacccaaaagattggcaccttcaagaataattatgtacagttgcttgaccgaattagcgttaaaaaccctaaagcacaaatcattgttatgtcgccacccgctgtaactcagagcgaggacccgagtactggacgtttattccgaatcgcggatttgaactatgcactcagtcagattgcacaattaaaatcagtttcgtttatcagcttatttgaagcgacttcaaagttaaaggcgcaaggtactttgtttttagcagatcaattgcaccccaatgattacggttatggtgtgattgctgaatacatcattaatcagatattgaacgcataa

SEQ ID NO: 69984 - DNA, 771 bp, Acinetobacter baumannii
atgattgaatactcagaaaatttaaataaattaaaaaataaccttattacacataaggattatcaccctcttttacaaaaaatcagcttacctttcattccagattttttagatagttcttttgaccaatccaaaaataaagtagtaattgttggccaagaaacttctggatgggggaaattgaaattagatagctttatattaggaaatttaagtacaaatgaattaatttctgaaagtaaaattagataccgtaatctttatgaaaagccacctgtgagatcacaattcttaaaattcttaggtaaagtcaaagaaaaaaataataacgagtatatacaatggttaaacttctacttctttgattataataaaaaatcttttaacttattgaattcaaaaaataaaagtatagatttgtatgagcatcttaaagatatatcaatagaaaacttagtaaatcaacttgatagattagaacctaaaaatatttttttcttaggtgcatatcatggaaattgggaacagttgaaactcaattatgttaatgacgaagatattcttaacttcaaagaatctatagaaggatttagcgtaagattctggaataaaaagactttagtaattcgactccctcatcctgcttctcgtgttccaaataaaggaaaaattcaacaacaagctttaacttactttgatatttttaataatcaagcggagcaaaatcctgaaaaatttaaagaattgataagagataaattacttaactaa

SEQ ID NO: 69985 - DNA, 339 bp, Acinetobacter baumannii
ttgaaaataggtatattttggttttataaaaatcaagttcttggtatttctcatgagtttgatattaatagctcagattctttaggtatgattgatagtgcctacaaccatgtatcttattgggatgaattacgaaataaattttctgagctaagggaaattgaatatgacgatgtacctcggggaagagtaatattcgataaaaataaaaataaattgatcatctatctagataagaaattattaattaaaggtaaggtatcaaaaatttgtgatttttttgatgctgaatatgatgtgaatacagtattacgcttagatccgcactatagaacttaa

SEQ ID NO: 69986 - DNA, 405 bp, Acinetobacter baumannii
atgaaaaaattagaatttattttattaagtttacttgcagcctgtagtccagttacagaaaaaattgaatcaaatatagttgttccacgtattcaatatacggggggagcagataatgcaagttatagtgaggctaagcttattagggaaggtaaatgcctatacctagaacatgctgatggatctaaagttctgccaatttttgctacaaaaactctagattgggatatggaaactaagagcctaaaagtagattcggatacttattttttaggtgataaagcagcatatggaggcggagaatcctatcctctagaaaaaaataattattcttggataactgaagtagatcctagctgtgatgtaagcatccggctaacacagccttaccaagcgatcctataa

SEQ ID NO: 69987 - DNA, 288 bp, Acinetobacter baumannii
atggaacagtattttgaatgggatgaggctaagaatcgaaagaatcagaaaaagcatgatatctctttcgaaactgcaagccttgtttttgaagatccattacggatctcaatccaagacagacataccgatggtgaagaacgttggcaaaccattggacgagttaaaggcgtactaatgttattggtggctcacaccatttttgatgaagatgactgtgaaatcatacgaatcattagtgcaaggcaagtgactaaagcggagcgaaacaaatatgagcatggttag

SEQ ID NO: 69988 - DNA, 351 bp, Acinetobacter baumannii
atgaaacttttaattttagaaattttatgtttaagccttttatctggttgcgcttccgcaaaagaagctgaatgttacaatacttcaaaagctctaattactgatttatataataaatttagaaataatggggtttgtaatattgattttaatattttaattcattctcaagatactcctaataaatataaaatattacaggatacggataatttagtaacagttaaagttgaatatcatcaatattcagaatttattaactttgttattaataaagaatcttcttgtaaaaaaataggaaatataaaatatgatgatggaagtgatttaattaaaatgctgcggaaataa

SEQ ID NO: 69989 - DNA, 1029 bp, Acinetobacter baumannii
atgtcaggattacgttcagaacatatcagtaatcgactgtttttcttcatgttggtcattattttgtccttactgtttatggcggttccgcttattgtcagcagttatcaagagtacttaaaaactaaacaggctttggttgaaattaaaagcttaagatcaattgctgaagtcgcaaataaagtatctaaagaacgtgcgcccgcaaataaattaatgtcgagtaacgctgccgactttttaaaaaatcaaaaaaacttaaaagaatatcgcctctctgttgatcgccaacttaatgaaactattcatattttaaaagaagaaggttataccgatttagcaaatactttagatactaaatttagagatgatttaaaacaggctcgtgctgtagttgactattatgttgcaactcctgaacaagcgagaagctctatacaattcgataatgcaattttggctatgtttggagcttgggatagctgccgagaagttttacaaaatttgatgctacagttaaaaagtaaagatagccaaattaacaattactttactttgattgtggtgttgaccgatatgcgggatcaagctggtcgtaccgcatctaatgttattgcgcctgtgacctttaaagaaaccatacctaatgataatcgggcgcggtctttgcagactcagcagcaagcacgctacttatgggcacttgtagacacactacagtcagagcaagctaaaactccggaatatcatcgcctttactcaagggttaaaactgaatttttagataaaggcgtacctattgtgggtcagcttttagatgaaagccaaaagcaccaagcctatcatttaaacggaacagaactgacagaccaaatcgttgataaatttaccacggttattgatttgcaaaagtttttacttaataaaagcgtcttgattgcatctcaagaaaactatttggcaaaaaagaagtttttccttactttgctcatttcaagcatatccttagcagcagcgttacttacataa

SEQ ID NO: 69990 - DNA, 348 bp, Acinetobacter baumannii; identical to SEQ ID NO: 55311

SEQ ID NO: 69991 - DNA, 567 bp, Acinetobacter baumannii
  misc_feature (527)..(536): n is a, c, g, or t
atgaataaaattagctcaatcttaaagataggtgctaccttaatagcgatcgtgcttctacaagcatgtgcgaccgcaccactacccaaaataactaataaacaggcaaaaggagttttggaatctataaaaccagatgaaaaactgaatcctattgtactcagtattagttttaatagtggaataatttatccttctttaaaaatagaaagccttacagaaaaaacagcaatacagaaaaataataaaatctatgaaattaaagtaataaattcagatgtctctcgctctacatttatttatagtgggcaactaccagccggtgaatatcgcattgttgaattgagcaactatcaaccttccccaaacccttttctttcaggtaaaatccaatttattaatttaaatgataaggataaacttcatccaatgggtacttttaaagtactagaaaataccacaactgatttaggacgtattaatttaactcatgctaatgatgcctatttcatagcaagatctgcaannnnnnnnnntctgcaaaacatttttctaataaggatttaa

SEQ ID NO: 69992 - DNA, 192 bp, Acinetobacter baumannii; identical to SEQ ID NO: 45978

SEQ ID NO: 69993 - DNA, 171 bp, Acinetobacter baumannii
atgcgtaagctcgctcgccatgaaggtatcagtgctggtacatcatcgggtggtgcagtgtgggcatctattaaaatcgcagaagaaaatcctgacgcagtgattgtatgtattatctgtgatcgcggtgatcgttacttatcaacgggattattctccgtacaagattaa

SEQ ID NO: 69994 - DNA, 1278 bp, Acinetobacter baumannii; identical to SEQ ID NO: 62422

SEQ ID NO: 69995 - DNA, 819 bp, Acinetobacter baumannii
  misc_feature (787)..(796): n is a, c, g, or t
atgattgcgcaaatttttaattttgataaaaatcattttgatggtagtgatattaattttaagacattggctggtaagaattttaaatcgagttttagagaacattttagattttcaaaaacttatgacttacctggtactatggatgtagagtttgaaatctttgatgcatattttaaaaaaataattccagatttaaaattacgtctttatggttctgaagataggcctcaatcaagaccagttgtaagagataatttaaaagttgatgctgaggacaactcgagcagaaacgttactcatcctcttatttatctaagtttaaaaagattaatgccaattgcggagagaagtaaatatagtcttaattcagaagaggtagaatattttacaagaatttctagagagttcactatcactaataatcgcttgttagggaaaattagtggaactactgtatcaaaaacgactggtacaatcgaatctgctgtagttcatggaaataattatgatcatgagtctgtttcggttggagaggataatactggtcaaatcttaatggctcttttttcatttcaaaaattaaaagaagaatatgttgattatcatggtggaattctcctgattgatgaaattgatgcaggcttatttccagctgcacaagtagaattaataaaaattctagaaagttttgctaagagattgaatttacagataatttttacaactcattctccgatagtaattcaaaatactgtctcttatacacatctgacgctgccgacgnnnnnnnnnntacttatggaggtgttgaagtag

SEQ ID NO: 69996 - DNA, 771 bp, Acinetobacter baumannii
atgaaaaagtatgattatgatatagcagtaattggcgctggatgtgcaggtgttgttgcagcacgggatttaagtaatgcaggtcataaggttgttttattagaggcacgtgaccgtattggtggccgaacctatacaggtgaagcatttggccgacaagttgaatttggtggtggttactcacactggactcaaccttatatttggagagaactacaacgctacggaattggcttaaatcctcctacagaagttgataaaacggtttggtttgcagacgggaaactacacacgggaactcaagctgaatatgctgctattgctgaaccattattaacagctttctttaatgacgctcgtcagtggtttcctcttccttatgatgtaaatgctatcgatacgagtgatattgaaaaacaaacattaagagatcgtcttgataccttaaatttatcaacttatgaacgtgacgttttagacggcctattatcaacacttgttcactcttgggatgagcaaggagtcgcacagctcttattctgggcagctacctattttggaaattggggtgcgttctttgaagtagcagggtcttggccaattgccggtggaacacaaaaactcgtaagagctatttataatgattcaggtgctgaattacgacttacaacttcagttgcagccattgatgatcaaggtgagcaggttgttattacgactcaatctggtgaaaagattgtgacaaaaaagccctcgttgctgttccattaa

SEQ ID NO: 69997 - DNA, 1017 bp, Acinetobacter baumannii; identical to SEQ ID NO: 51504

SEQ ID NO: 69998 - DNA, 390 bp, Acinetobacter baumannii
atgaatgtagatgcaattgatctaaaaattttgaagtatttacaagacaatgcccgtttaagtaaccaagaacttgctgatcttgttaatctttcagcatctgcttgtcacagacgcgtcaaaattataaaaattgaggcgatagttgaaataaaacttgctcaactcaccgaaaatgaccacaacttttttttaagccaaatcaagaattttgatgaagtcatcaatgcctatatcattacaggtgaatctaattatgtactgcacgttgccactaaagatctaaactctttttctcattttgttattaatacactcaataaaattaaaggtgtggtaagcattaactcaaaaattatcttacagaaaattatacaaaagccgctgtag

SEQ ID NO: 69999 - DNA, 957 bp, Acinetobacter baumannii; identical to SEQ ID NO: 56988

SEQ ID NO: 70000 - DNA, 405 bp, Acinetobacter baumannii
atgaacaaacttttcttaatatcaaaagttggtggatatgccaatgctgaaagaatccttatggcactaaagaaagaaggccgagatgtttcttatacagtggccttggattgtggatttacatttcatgcttcagagctttacgaggcatggtcaaaccctaaatttgattataatgatgggataattatcggttcatttgatagaaatcaaaaattgattctttctaatgctcatggttatttaggttgttattggggttaccactcatttcgtccgacagtccatttaaaatcagttcagaatttaaatgatctaaaatctgaagcaattaataatggcgcaaaaattgattggaatacataccaatgggtcttgaataattttgagttaatttccccttaa

SEQ ID NO: 70001 - DNA, 831 bp, Acinetobacter baumannii
atgaagaagtccaaatttttccgtgttgctgttgctgggtccacaactgatggtcgagtgattgaagcgacatggattcaacagatggctaaaaactatagccaaaacacatatacagctttgggaaacctagaacatattaaaggtttaagcccgagcagcgaattttgtaactatgcaaaagtagaagctctcaaagctgaagaagttactataaacggacaaaaaaaattagcgctatttgtccaagtcacggcttatgaagaactgatcgaattgcataaaaaaggtaaaaaactattctgctctatcgaagtgaatccaaactttgctgacactggtgaagcttacctggtcggtcttgcatttactgacaaccctgcatcgcttggcacacagattatggagttcgctgcaaaaacaccagatgcaaatatattttccagtcgtaaacaagatgcggaaaatttattcactgctgctgaagaagctgaactccaatttgatgacagctcagattctgaaccaacaaaaggactattttctaaagttttggattggttgaagccacaacaagaacaacaagaaaataaaaataaagaccaattcaaagaagtgtctgactcacttgaagcgattgcaaaaacgtttggtgaaaatcagaccaaggtacaaaaagtcgaaaccgagttttcacagctgaaaacaaaatattctaaattcgaaaaagacttcaatgatcttaaaaccaaattagaaggtgaagaaaacccaggtaccccacctgcacctgaaaacactggcaacttctctgaacaaatagagtgctga

SEQ ID NO: 70002 - DNA, 204 bp, Acinetobacter baumannii
atgacaaatttccaaatctttttcatcgttattcttgttttttccctcattattttttggatgatgctggattatcaatttactcgatacatccgagaaatgaaggctttttataaggaagaagatctccaaaacaaaagtcaaactaaattaaatcaacaggtccataatgggaacaataaatgtggctatacccaatcttaa

SEQ ID NO: 70003 - DNA, 501 bp, Acinetobacter baumannii
atgagcaataccgaaccatccatcattaaaattagccctcatctcaagcaatgcaatgctttgagcgaggttgactatattgaaaaagtaactccttttactaagttttcaattcccttggctatagaaaaggttgcagctggctttccgtccccggcacaagattatgtagataaaaatatagatatgaatgagcacttaattaaaaatgagtgtgcaacattcgtggtccgggtagcttctcaatcgatgttaaatgcaggaatagatattgatgacgaactgattgtcgaccgtagccttgaagcaaagcataacgatattgtaatagctttagtggataacgaatttaccgtaaagcgtttgatgatagacgcggatgaacgctggttaaaagctgaaaatccagaattttgcgatatccatttaaaggatggccaagaactttttatctggggtgtagtgactttcattttaaaaaatacaagaaaaagtaaatga

SEQ ID NO: 70004 - DNA, 324 bp, Acinetobacter baumannii
atgaaaaaaatcatctctttattaaccttaatttctttaacagcatgcactagtgaacctgaattaaagaagcaagaagtgtcagcggatcagtacaaagacaagtggccactagtggttaataaaggtaccctaacttgtgaacctccttcacgaatagtatttacagatcctgatggaaataaatatggcgtgaatggcagtgctcaaaatgactatcgaactatttttgatataacaaaagaagctgagaatttaggtgctaaatttaagatgaatatagcaccacttatagaagatggttcaaaattatgtattaaataa

SEQ ID NO: 70005 - DNA, 405 bp, Acinetobacter baumannii
atgctcaggagtctcgtgggctcggagatgtgtataagagacagctcaagtcatgcagcccttacctttggcaatgctgaagaaggtcaacttaaagtaagcggtactgttcgagccaaatatgtttatgatttcgactctgaaccgtctaccagtaaattttcctttaatgacgcggtcttatggctggactacaactccccaaaatggattggccgcctagattatcgggtttatgaatattatggacgtttaggcgatgccaattggctcaccgatgcgtggttgggttataaaattaatgacaacagtaaaattattgctggcttaaaccccgttccttttggcttgggtcgcttttggggaaatacttattatttaggcattgccaatagtgccggttag

SEQ ID NO: 70006 - DNA, 264 bp, Acinetobacter baumannii
atgaaaaaattactaattacttctatggtagctttaacgatagggttaaatggctgtgcaagcatcattacaggttcttcacaaacacttacttttacaagtgtgcctgagtcagcaactattgagattaaaaatcgtaataaataccagccactaagagtacctgtaacttctaccgttagcttaaaaaaggtgccggttatttcaaaccagaaagttatcaagtatctttcagtaaacctggttatcaaactaaaacggtag

SEQ ID NO: 70007 - DNA, 942 bp, Acinetobacter baumannii
gtgaaatcaattaataaagaatttatattaactacgataaaaaatattatttcttccactgactttcatgaaagcttggaagagatcaatgaaaactttttcaatttgaaacaagaatctcatatacgaaatgtcttactaatctatattaataatttttttaaaaaaaactatataaattacaaagcattatctgaatatccacgcattaataatacaagagttgatctatcaattgttaatttagactgtcctgatgaaatttttaagattgagttaaaatttcaattagtaggagactataaaccaaattaccttatacatagaaaaaatgaaattgcttatgattttgaagaaaagaggtctgacttatttatacttattatcatagagtgggatgattatgagaaattagcttttgataaaacatgtggtttagaaaaatcattaattcattataacaaaggaaatttagttaattggagggaagatattttcctattatttcagagttttcagaatacaacgcttcatatgcacaaaaaaattgagatatcaaaaccatataaaacagcttaccaattttattttttaactaatgagaataaagtagaacacccatatgatgagcttttagagcttataccaatcttggaaaaattatatgatttcaattctaatgattatgatgatttcattcataaatttttaaaagcaatggatgaacatatgtgtcctaattattttgaaattttatcccacattgatataaataatgaaacattacagaacttcaatgaagagcagttattagcatttttaacagaatctattcggaaagatagatttattgattggcacttaagaacggttattcaatctggatatttacttttagccttgaacaaactatggctgatagtcaatcaggaaatacgctaa

SEQ ID NO: 70008 - DNA, 474 bp, Acinetobacter baumannii
atgtcgtattcattgaaaatagtcttaaatcatgaagaagatacccagcgtttagctcaggcattggcgcagcatgttcaagctggtgtgatttatctgattggagatttgggcgccggtaaaacgacattgacccgttattttttgcaagctctagggcataaaggctcggttaaaagtccgacgtatacgttggttgaaccatataaaatcaataataaagaaatttttcattttgacttatatcgtctcaatgatccgtacgaacttgaattaatgggaatccgtgattatctagatattcaggatgcactatttttatttgagtggccatcgaaaggtggagacgaaatccctgaagcagatatcatcattgatattcaaaaatcagatgatgaactcaatcgtttcgtcaccttaactttaccaacagagcatttgtaccagactttgcaggaacagcttcatgactga

SEQ ID NO: 70009 - DNA, 141 bp, Acinetobacter baumannii
atgagcactactaataatcaagcaaatcaacgcaataatcagcagcaacaacaacagcaaaatgataaccgcggccaacaacaaggatctaatcaaaaagattctggccaacaaaactcaaataacaaccaacaacgttaa

SEQ ID NO: 70010 - DNA, 150 bp, Acinetobacter baumannii
atgagttattcagaacattttagacgtaaaattttagctaaacttgaggaaggttattctattcgagcggtagctgcacaatttgaaattaataaaaataccattgttgaatggaagaaacgtatagagattaaaaaaactcgagtatag

SEQ ID NO: 70011 - DNA, 540 bp, Acinetobacter baumannii
gtgacggtattagtttcaaagaatggtgaagttattggacatatttttggtaatgaagagatgatcaagctgaatactccggaggggtgtgtagctttagatgatcctccttatccaaatatgttttatcagggtgggtgggtagagatgcctgctcagccatccccgtaccacatatttaactatgacataaagcaatggattgacccccgctcactcgacgaaattaaaacccagaaatgggccgagattaaagtcatgcgagatcaacttgagtttggtggttttgagtttgagggcaatatttatgactcagatcaagtgtcacaaggtcgtatcatgggtgcggctgctgcggaggtagatcaaacatggacacttgcagataactcaacagttgaattgacagcgcagcagcttaaagagctttacgctgctttgcaggcacatattgcaggcgttcacgaaagagggcgtattgcacgacagaaaattgaaactgctttgacatatgaagaaattgaagcagtaaatttttaa

SEQ ID NO: 70012 - DNA, 975 bp, Acinetobacter baumannii
atgactaagcaagttattaatgttggttcagctgcaaatgacggatcaggaacaccagcccggacagctttccagtatgtgaatgccaacttttctgagctatatgatttcctaaccggaaccactaatgcaaccacactccccacagctctaccaattgcaaaaggggggacaggcgcaacttcggcagcgggtgcacgaactgcattaggtttggggactgccgcaacaagcacagcccagacatcaaaaactgatactacacaaaattcattaatgcgtaatggagcttttggtcttggtgattctcttgctactgggacgggagcttatgctttaaccgagtcagatgcatcggattatccacctgtgaatggttttgtttggtctaataccactgcttcctcaacaataccagcatattgttgtggattgactatgactcgcggtggtggtgtacacgcacagattctagctgccccaagtagtcatgaaatttattaccgagtaagacattctaatgtgaattctggtgcatattcactttataaaatgtggacgcagaaaaatacgactgtcgatggtaatggatttattaaagcagcttcaccaattgttaagttatttaatgatcatatcgaattaaataatgatgctgaaaagcagcaaattacttttgacaagctaggtgttggtgattacttaattcagggttcgctcggttttgctcaggaaggttggtacatcgaagtacctaaagatgccaacggtaatacggtagttgctgttgaatactcaaccctagaaaatggcgacatttcaatcaagacatacaagcgtaagtttgatattgagcttgctgcaatcgttggtgatcatgaaaatccaatggacattcctgatggtcggtggatagacgttcgattacatgaagagctagttttagaggagacactaccagatgacgctgaatag

SEQ ID NO: 70013 - DNA, 399 bp, Acinetobacter baumannii
atgaaaaaattatttttatttggactagcaattttattaaatggttgtgccgcgacttctgacatggtgaacaatcaatatatgtccataacacccactcatacggagttgaatgggttttggacaggagttaatggtccatatacagttacttactcatttaataaagatggtactggattgatgtgttcaagttgggcaggtaataactcacttgagaaacttaaaattaacggatcagatgtggtgcttcaatcaggtttgaaacagacaataaaatcccaaactgaatcaaaacttgaactaagagctaattattatggcggggcaacttatgtttacactcctgacccttcattaagtaatgcctcgccttattgtgaaaaagccataagataa

SEQ ID NO: 70014 - DNA, 984 bp, Acinetobacter baumannii
atgaaaaaattatcaatagttattcctgcatttaatgcggaaaattacattataaatacactagtctctatggttaatcagcctgttgattttaataatattgagttaatagttgttaatgatgggtctagtgataaaactcttgagtcggtggagcaattttctaaaggagttcctggtattacattaaatatctattcaaaagaaaatggaggattaggtagtgctagaaattttggcatagaaaaagctaaaggtgattatatttggttttttgatgcagatgatataatggagaaaggatctctatctaaggtgatgtcaaaattaaatgatgatttggatttattgggttttggtgtaaaggaaacgtacgttaagactaataaaattaaagtggtaaatgttaagaatagaccaattaatgtagttgtaaatggtagaaattatattgaaaattatgatattgggcattcagcatgttgttttatagttaagaaatcaattttaatagagaattctatttattttttagaagatgtacttagtgaagattttgattttgagttgaggttatttgaaaaatgtaagaatattacacatatagatgctatttgttataattatattattagagaaggttcattaagtcgaagaaaaaatagtgaatattatacttttcatcaccgaagtatgataaaaattattgataatttaaatttaaattttaggaaatctaaggatttagagtataaaaaaagtgtagaaatttatattacacgtattaaaataattgctcttattaatttattaaaatctaccttaccaaaagatgaagtaaatttattttttcagcagtttaagcaaggcggttttttagaattggcggattatcgtaagtctaagctaggttggaagcactatatagtttttactctcgttaattttaatcttattgaattatttcttttttttaaaaaataa

SEQ ID NO: 70015 - DNA, 189 bp, Acinetobacter baumannii
atgaaaagaaaaatatttactccacgtccagactggcaagtggagcatcaaaatattggttttgattattttaatttaccttcactcgatggctcaatttactggtcagaaggggttgcgtatgagtttactcttaaacagattgaacaactcgaagatgcggcaaatgaactgcatcagatgtgttaa

SEQ ID NO: 70016 - DNA, 1491 bp, Acinetobacter baumannii
atgacaaatattgaaaatgatcaaactccgaaagtttttatttcctacagttggactacgccaaagcatgaagaatgggtgttaaatttagctaatgatttaaatgatagcggtatttttgttgttctggataagtgggacttacgtccaggggatgactctataaaatatatggaaagtatggtgctagaccctgaaatcactaaaataattatggtgatagataaaaaatatacagaaagagcgaacgcaagacaaggaggcgtaggtacagaatcaacaattctttctaaagaactttattcgcagaaagataataaaaatattgtcgcagtaattgctgaaccagaatgtgtacctcctgtattttattctagtcgtatttttattgatttatctaatactgaaacatacgctgataactttatgagtttagttagatggatctataaccgtttccaatacgagcggccaaaaacaattggtagtcgtccaagttatattacagatgacgttaatgaaaacgtaatgtttaccaatgttgaatttaaatttgctcttgatgcaatcgaaaaaggaaaacctaatgctagtggtacaattaactcatatttaaataagctagccaatgaattaaaaaaattatctattcaagcttcagaagctacaatagaagatgtcaaaaaaggttttctacaatttcaaccacatgctatcgagtacaagaaacttttgaatgccgtttgtatgcattcaaacgaattgaaaatctataaacattttcgaaaatttttagaaggtttacttatttttttaactgatgaaaatatacatcagcacaaaacaaatgatttccttttatatgaaactataatttatcaactgtttttaagcacgatagcaattttattgaaaaatgaggaacttgaagcattacatgaatttattgatgaggtttatattcatccacccacacattttgactttcatcgaggtgaaagaacgtcaacatttaaaatctttgctccatatcatcatgaaaattataaggcactatatccacaaaaaattgaaccgattgcagcattactaaatgaacatgtaaatcaagatataatctcttttaatgatttatgtgaagcagatatatttttatatctaaaatcagttgctcaaacaatatttgaagcaaaagaatatatcatgtggtggccaattttaggattatatattggctaccgaccaactcctcttaaaatatttactaaagcagaacgtccaagtgtttttgatgaagtagtgaaattgtttaactcagaagatttaagctttattgatacattatacactgaaacttcaagtactagttttggctccctttatatacctagatggcaaaatggtataggaaacttggatgttatggctttaactaattataaagaattgaagaaatttaatttatctgaaagattagcaaaattaaaataa

SEQ ID NO: 70017 - DNA, 5226 bp, Acinetobacter baumannii
atgaatacaagtaatctaatacaagttaaagtactccaaaatgaatctagtggatattttttcaaatcctatgatgacaataaatcatttgtcatcacatcaaagcatagtatttgcgagttcagaagtacttgtgatcttattgagagttcagttaaagattgttgcagaacgtgtccactagagtttgatactcaaaaaattcaattacttagtaatggtaatgatgtttctcttcacatagaaaaaatctattatgagaaagcaaaagatttagtaattatacatgttattgaaactgctaccaataaactaatagttaatgaaaaaagttgtagcaatctctatttagcttctggatttaataacttagaatcaggggtgaccaacttaatattggatacgcctagaagcattaatacgcttatatattataatttacattcaaatccaacaccaaatttgatagaaaaagaaagaaattttcagggaatttcgggttctgtagtttttacacatcataaaaattacccaacagcaaaagcactaatcgtccataatgaaaatcataatgattttggagcagaatgtcttgatactttaaatttcagtgaaatcaatcaattttttgaatgcaaggtttttgatcaaagattttacatttcagaaatacagaaaattaaagatattagtcgacaaagtttagaattaattccgaagataattgatggggtggagttatctagacctgcattacataaagagtttgaagataaattaaatttaggcagatttatacaaattacaggtttgtcaggtacaggtaaatcagttctactaagacaaatcgcagagtcaaaagctaataatctaccatctttattcattaaatcagatcaacttacgggaagtaatacttggttggaatatctatctagagttggactacctagtttttcaatttcagagtggctaataagtttggaagccgttgggggagttcctattgtctttattgatggtatagacagaattagtgaaaatagtaaaccaatcattgaagagttaattactacaatttttaataatcacgatttaaccaattggaaaatcgttactacgttaagagacactggacttgaaccattaaaactatgggtcggtgctctattgaagaatatagctatccaaaccttaaacgtagatcttttaagtgatgatgattgttatacattagctcaacaaattcctggcattcagaagctattattcagtgatagtaaagtcagagagatcattagacgtcctttttttgctaaagttttaaccagtttaaaagccaataattttgaacctgagtcagaactagaattaatagatgcatggtgggaacgaggcggatttaatgaaactggtcaatctacttataatcgacaagattttttaaaaacactttctgaacttaaatctcaaagccttagtaagagtgtcaagcgtagagagattcagcctattgatgttttagatagcttggttgttgacgggatagttcatgtaaattctaaaagttctactgttgattttacacatgacatattttatgaatggtcattactttatcttcttttagaagaagaacaagactggttgaataaaatagaaagctttggacaacctccttatataagtagggttgtagaattgcttgctcaacgagaatttattgacgatcagtggattagtcatttagaaaacccaaaatttaaagagctaagatcacaatggttaagagcatgggtgattggaccaataggatacccaaagttcattgagttgagtattggatatacacaagtcttactcgaaaatgattttgatctctttaataagttattgacatggtttcaagcagagaagactaaagcaaatcctgtattattaatacagtctgataaactagagatggctattcaatatccttggccatctgatgcttcactatggcgaacacttttagaatatatttttaagctaatcccaagcatacctcccaaagtatatcctcaaatactgaagatttttgaagtttggcaatatttaggtattcatataccctcaaatcaaatgtctaaaatgcttttggatgtatcaattcactggcttttagaaatttctcaaaaagaaagatctaacgactggggacaaatagttaacttaaaagattttaagttgggtctaattaacttaattttggtttcaatacattcaaatccatcctatatggaaaaatatttaaattttctacttttggaaaatgaagtttctagagatacttatgcacatatagtaggtgcttcatcccttatttcacaacatcatccaaaattacttgctgatttaacgctaaaatttttattagatgaactgcctaaaacacgtatagaacgtgaggaaagaagctatcaaagaacaaagcaatattatcaagagttactggctaaacctgaagaagaaagatcaaaagaagaacaattaatgattgatcgtcgtgccttattttttcatcaagcaccatatcaacaaattcagagaaaggattgggaaaatttatcaattaaatatgaatctaaatacttttatcctagctcacctttaaaggagccatttttttcactattgaagcattcagaagataatgcattacagctcatacgtgatctatctaaccatgctattaaagcatggaaacaactatgtgaaatttctgaacaagcacctataccaactactattgaatttccttggggagtacaagaattttggggaaatgaaaagcaatatatctggaaaaaaactgtttggataaataatgcgatttcatcggcctttatggtcttagagaactggtgctttgaacagctagaacaagggcgagattttgatgaactcattcataaaattacatcaggaaatgagtccgttggaattctcggtgtagtaagtgttttagctcttaataagcaagtggtttctaattctatattgccagttgttactaattttaaaattttagaattagataaatatcgttttcagcaatgcttacaagaacctagtacaactttattctctcttcaagataaatcaaaatatcaaaatgatattgaagctgtcagacacaacttcaatagacaaggccataaattaaatttagagtttttattaaaatattattttataaattctgagttcagggaacttacaaaagataagttatctaatttaaaagttgatcttccttttaattttgaacatcagaaggtagatgaatcaataattaattttttagaacagcgagctgcttattacgctgaatatggcaatttcgaaaattacttttctcaaaaaatagatgagaatcaaataggtattttctttaatcatcctcagtatagaaagcaatctgaatcgaaagagtataaacaactgaatgagtttgccacatattttggagtagcatattgggctgaaaaatcattagaagctaatgcaattcaaaataattacaccatagattcagtcattaagttattcaaagatttagaagaaaaagacttatttgaagatgcttgtgatgtgcaagaaagctcatctacgcataaaagtatgaaacaaaatgcttttagtgcattagctacgatgatcttagtctttagagcaaatagtaaagaagacgatctagagtgggctcgtgatattttaaatcaagcagtccaactaccttatagttcttatgaagtagggtgtccacaagcttccttaacttttcatccgaagaagtttcttgctcaggctttagcaagtgaaattattcataacactatgaataatttcacttttatgaatcttctagatattgtagtgagcccatgtcatgaaatttcattaatctctctaaaagaatgtctgaaattatttgatataaatcctaaattcacttggacagcaatttatttttcatttgctctatgtaagaataatttaaaatatcgattttatcgattggataagtatcccgaagcaaaacaagaagtagatcaagtatatgaacatctgaaaaactacttaaaatcagaaaatgattggtgtgtactaccaatacctgatgctccttgggtagaactggatgaacaaacaattcaaaacaaaagagaaagagataaaagaattactgatataataaataagcaaagagtgggctataagcctagattaggtcttcataaaaattattcaaagtgggtaaaatcagataatcaatgggattatcagttctcagaaaaagttattcacttactacctgagaaactacttcatgatacctctcgaacctatattctcaattttttaaaaagttgcttagaatggactatagaaaaacaggaaccttcttggcttgaagaaaatcaaagggttgatgacaaagatattattcatgaatggaatcatagcatatctagagctttagtaagagttgttggaatattgcctacagaagaaatcaactcacaattccttataccaattcttaatcttagaacagatacttgttgggagttgcttaatccattcattagtaattatatttgtcgctatatttatgatgcacagaacattcctcacaatgcgttagatgttttagatttatgtttggatcgttttttaaaagtatcgtgttttgataaaaaaagttatagaagtggaaaaatttcaggactcgacttatctgaaatcgcaaaatcactgatgtttgtgtcactagatcaagatgcgcctttagccaatagattcgtaaatggtgattggactgaaattggtacaattttacctttagttgataagtatgttagagcagtaggttggattaaagatgttattcttctattcttgaaattgtgcgaacgatcaatccaaaattatccatcatatttatatgctgatcaaattttaggattaatctcttcaggtgaagtattaaattgggacgactacgtatatcaaaggatatctagccttatccaaatttttatagataaggaacaaatgatgccaatagaattacgacaaaaatttttaagaattattgattggctagttgatcatggtgatcgaaaaagtgcagcccttcaacaaagtaactttttccaaaaagtaaaaagttgctga

SEQ ID NO: 70018 - DNA, 1023 bp, Acinetobacter baumannii
atgttaaaaattcatgtaatagatgcgactcatggagattgtcttcttcttgattttgatcattcaaaaattttgatcgattgtggtccaaaattattcaaagctcgtagagatgtactagctaatatagaaaacattataggtggaaatagtgttgttgatatagcaatagtcactcataatgatgatgaccacatcggtggatttgaatttttgcttgatacttctattaaaattaacactattatttttaatagcctccaagatattcctgacattataaaaagctcacagaaacaaatctcatataaccaagataatattcttagacaaaaattattggaagaacgtggaattcaaattcaatgtttgaccagaaattctactcctttaatatttaaagatattaagttaactgcaataacaccaacagctgaaatcctagagcgaatgttaaaggacgctgatgctaaaaaagaaagagaagaagaaaagaaaaggcaaaaacaaatttcaagttcgaaaactgaagaaataaaacttgcagaagctttacaaaaaatacaatctggtcaagatagttttgtaaaagatacatctattacaaatagatcaagtataggattaatcattgaatatggaaacttctcggggctttttctaggggatgctcatgctaaagatgttatagaaggtttaaatatcgcaggttttataaaacatcgatttgatgtggtaaagatttcacatcatggtagtgaacataatacaaatatcgacttactagagcttattggaaaaactgaatatatcttgtgtgcagataatgaaacaaaaaataagcatcctaataacattaccttagctagaattctaagtttcgataataatccaactattcatttaagctcaaatagctctgatctattagtaaaaattgaagagtgtaaaagtctaggttttagtattaatgaaacatatccgactaatggagtgaatacactttattatgaatacaagtaa

SEQ ID NO: 70019 - DNA, 3582 bp, Acinetobacter baumannii
atgagtttagatcaggaaaatttacttaaagcttggcaacgtttcatagagattacaggttgtgaaaagtccaaaattcctgtgatcggtgttaataactgccaaaatattatttttaagggctctgatttaattgagaatgttgacagccatggtgtatttattgaattgcatccaatgcaaattgcacatctcaaagaaaaatatgtaacttttgatgaagatctaaatgcagaggtcgttcgagaccaactttcttttgcatttcctttgcttacgatgcacaagaaccgcgagacattttatcttcccttattcatcgtagaacttcctccggattttttggtgagagatggattcactgggtttgatatatcttcaaatctacccgatagcattaaggtgaatatctctgtactgctgaattattttgatgttgatatagatcaaattgatgaaactcgtaatttcattgatatgattaatttgctatgcgataccaaacactcagactttaaatcagtatatgaaggtttcttaagttgggcaaatgagcgcctgcaaatgaagaacaataacttcaatcaaatctttttggctccaaatataagtggactaatcttttcagttattaatgatgatttgagcagtaaccgcgatctcgaggactttaaatatttattatcagaaatagaaaaaactgatcaaagtagcgaaaactatgtgtcaaaaaattatccattactaaatatctatttaagtaaaactaacaagaaccaatcgattatcaaaagctgtccagtgcatgagaccaaaatttatggcctatttgagcatgaatactcattaggacgtggacagtttcaatcaatacaagcagccaatataaaacctgaattaccattgattgcagttcaaggtgctcctggtactggtaaaaccactctattcaaatccttaattgctcagcaaattactgctcgtgcactttcaattattagtggtgaagataaaaatcataatatgttggtatgctctacagcgattaaagctgtagataacgtcattgccgatctaagagcagatgaattcacaaaagaattaagttggctttggtttcatggcggttcaaagcaaaaaatagaaaatgaagtcaaaaaccgattagagccctatatttcgcatcttgaagcgaatgagtttgatcaaaataaatatgattctcttaaagcgaaaattattgccggtagcatcgaaattaataagattgccaaccaatttcaaaaagattatcagttgctccaagaaaaaaaagcatctgttccattcattaatcctaatagcgacttagatcccacagcacttcgtgaggacttgagtaaatatcagatggagcttggtgaaaagttagatactgaattaaaagataaaggatattcagatgcaatacttgaacagcgacaaaatcaacttagttttgaaaataaaaaattgtctgaacaaattgatgaaatcaatgttgctatggagtgtgtaaaaaacttattggcatattggccaaaaaaattctcaccttcacaattcgcagattggatgctgaataaaaaagtacgtggtaagttcacattatcttttggtgacttcttcaaacttcaatttttaaaactggttacaatgttttctccagctagaattaatcttttagcctcttgtgaagtattgagtcgatatgatgagttaagtgaatttgaaagaaaactcaaccatggaactgagcaacttaaaatattgaatatacttcaccagacatcaatcaattttaatgcttttataaacgctcataagcaatttaatgaaagctttaaaggatgtcaggacttatcagatgcattacgtttaaaggcggttgagttaaatcgcaagatgtttgaggattctgtacaattcctttaccaagagcaattgaagcgtaaacctgaactcattgaggcattatctcattggtcagccatgttacttggtggaaatacccctactcctaattttggtaaattcatcaagcaaagtaaaaatttttataatctcacttcattggcgtacccagttgttgcgtctacattagcttcagcacacaaaatgtctggttataagaaacttgatcatcttaaaggcataaaaccttggaacttggtattagtcgatgaggctgggatggtttcagtagaaaatctagttccagtattgtcacgtagtaatacagcgatgatcgttggtgaccccttacaactagagccaatccgcacaatctcaaaaccatctattcaaaaaatctacaatgagtatttccttaatcatgacgaggaatacaaaatgcttggtcccggtcaggttacagcatatcaccgagcagctggaaccttaactggtgaaatcagcgatataggtgatgggatcattttagatgagcatagacgatgtcaagctccgatcgcgaaattgtttattgatattgctgaatataaagatctcagtgtcactactttcaagcctaaggaatcaatcgaaaaagccttcaatgcatttggtgggcatcatttgatgttctaccatgtcgatggttcaaggtcgattggaaagacaaacctagatgaagttcgtgccattggtgaattattaaatcaactagaaaaggctggttacaacctgaaggctgatgtcggtattattacaccgtatgcggatcaaaaacgcttattgttgaatgcttatggtaaacgccttggatgtgaatttgaaactcgtatcggtacagtacatcaattccaaggtactggctttgacgtgattatttatagcccagtgatctttgaggaattggacagtccatcttttcaaaacacacgtccaaacatgcttaacgtagccgtatctcgtgcaaaacagcagtttattgtggttggtaactaccacaagcttaagcaaacaaatggtccattaaaaatagtcgctgaacgcacttcttcagatttctatctagagcttggtagccagagcccaagttaccatgatctttcaataagctttgctgtagaaaagaacatctatgatgctcaacatatcaaagcatttgagtactaccttgataaagcggagaaatctgttgtgattgtagttccatggattcgtaaaccacacaacgtacgagtccaaaaacaattggatctaatcaaagcagctaagaaacgaggtatcaaggtgacgatttattatggttacagcaacttagaaataaatcaaaaagatgacaatgatcaacagttggtccaagagtacatcaaagcactcggttcagataatgttatccgtattccacaaggcactcatgagaaggttctactggtagatgatcgattattagtgattggcagttggaattggctttctaacgcatactacaaatggtatgaaactcagaataccacgcagaccaatttagcgatacgacgtgagactagtatcataatcatggatagaaagatcattacagactataaggcaaataatctgctcaatgtgatctaa

SEQ ID NO: 70020 - DNA, 132 bp, Acinetobacter baumannii
atgtatatcaaaaataatgaacaaaatgataggtgttatttatttaacttatgtttacctaaattccagtttttaagtgaaattattaatatctttataaaatttaatctattacaaagtattttagtttaa

SEQ ID NO: 70021 - DNA, 1206 bp, Acinetobacter baumannii
atggttttttctctgcccataaatgacttatctgttcatttagatgagctgcatactcaatttccaaaacagcctttggctattagtgaatatggcgcgggagcagcaatttctcatcatagtgataacccattaggtggccagactaataattttgattcaagtaatggaacagaagttaattatcagactgaagagtatgcaagttatgtgcatgaacaaaactattctacaatgctcacgaagccgtatatatggggcacttttatttggaacttgttcgattttggttcgggcgtacgtaatgaaggagatgtcagaggagtaaataccaaaggattgattacttttgatcatcaaataaaaaaagatccgtattatttttataaagctaattggcgcacagatattccagttattcatattacaggtcgacgttatataaatcgtgcttatccattagtagatgtgaaagtttatagtaatgctgataatacaactctaagtttaaatggaaaagtatttaaaacaatgagtaaggatgaatgccattatacgatgacagaaattcctaatgcttcgaaagtaacaaatacctgtatttttaaaaatatttctttagggcctggaaaaaatgaaattctagcgtcaggttcgttagccggaaaagtaatttccgatactgtgacatggaatctgaatgaaaataatatttcaaatattaatattgcagctggccagatcaccacaggctttcaacagaaatctacaggtttatcatttggttcagataatttctttaaaggcggttttggacgtaacttaactcctttaggtgctactgatacaaatcaagaccggacattggcaagtggttttcctgatggcgatgcagcaatatggaagtcttatcgtactggaaaagattttgaatattcaattccagttccaaatggttcttatcaaatcaaacttggttttctagagcccttaaacacaactactgaaggtggaagaacatttaatgtactggaaaataataataaaatttatagtaatttagatatattggcggttactgggtcgtatcgtaaagtactgattaaatcgtttaacgtggacgtaaaaaatggggtcttaaaattacatttccaaggagtaaacggagaggccgtcgtttctaatatatctataaagaagatataa

SEQ ID NO: 70022 - DNA, 519 bp, Acinetobacter baumannii
atggacctatatttttattataatgaaaaatatttatcggctcttagtatccgtgaagcttttttagcaagagatttttttgttatgaaacaaaacttacttttttttagacatatacaattaagaaaaattaatatacttaatgaggttaaaaatatgacctgggatgtattacattttagaaatctagaagaggccccgacttttaaactagataaagaggtgaggtatttttttcctgcaatattgacgtttgatgtgaattttcaaaaaataattgaaaatttcaaagttaaggggttagtttataataatcttggtgatatttttccattttataaaaaagaaattagcgatattgaaggtttaaccacagaagaaaataagatactcaataaccgttatttctcagatgaggccaaaatactacgatatatagggcttgaagatacgaaaatacagatcgagcagaatgtaaaaaaattagaatttgagcttttagaagctgtaaatatttaa

SEQ ID NO: 70023 - DNA, 462 bp, Acinetobacter baumannii
atgttaataatgaaaatacgcccagcaactgttgatgatgttgaagccatcgctgctgttattgaaccttttgtcgattatgttgtcgtgactgaagaaggacgtgaacgctttaaacctgatatgttgaaaaacatcttccaacaaccacttattcattattttgtggcagaaattaatgaagaaatcgttgggaatttggcgtatatcgctccatctcatgtcatgcattatttcttaaaagctgaatatcacggtcaaggttatggtcgacaaatgtgggactttttagagcaagaaatacttaaaaatgatcccgatataatcacaataaattcaagtcattatgcactcgatatttataaaaaatatggatttgaagtggtcggtgcgctaacggagaaatggggtattcaatttattccgatgcaaaagctgctaaagccaaaaaatctagaatag

SEQ ID NO: 70024 - DNA, 309 bp, Acinetobacter baumannii
atgattcctggtgaaattattacgcctgattcagacattgaaatgaatgtcggacgagaaacactgaaaatgcgtgttgctaatgcaggcgatcgaccaattcaagtcggttctcattttcactttgctgaagccaatgatgctttgcaatttaatcgagagcaagctagaggctatcgactcaacatcgctgctggaacagcagttcgttttgaaccgggccaaagtcgagatatcgaattggttgcacttgcaggtaaacgtgaggtgtatgggtttgcagggcgtgttatgggtaaattggattaa

SEQ ID NO: 70025 - DNA, 903 bp, Acinetobacter baumannii
atgaatgatctggtattaagcgaaacaaaatttatatcgacacaacagcagcataacagccaactgtggtatgcctgtttggaacttggttttgcctatcaagtacagtcaaatcgaaccgtattacagcatcgcaagcatcatgggcctgtacgcgttcagaagatgttgtggcctgaaaaaactggtatttgccatgcaattattgtgcatccaccagcaggaattgctggcggagaccatctgacttttgatatgaaagttgaggcgaatgcgcatgcgttagttaccacgcccggtgcaggaaaatggtacaaaaccaatggcaagcaagcctatcagcatattcatatacatgtcgcagcacaggcgacatttgaatggttaccgcaagaaaccatgctttttgatggtgccaatgcagactctgaaacacatattcatctagatgaaatggccagttttattgggtgggatatgttggtcatcggtcgacaagcacgtggtgaaatttttcagcaagggcaataccaaagcaaatttaggctgtatcgtgcagacaaattattggttgcagatagtttaaattttaaggggcaggatcggtggcttacatcctgtttaggtatgaatggacatgctgtgatgggaagtttctgggcagtagcaccatcgcgtttaaggcaaacaacattactggctgaacatatcgaattaatccgtgaattgattatgcggatgaatctagcggtgactttaaccctgttagatgatgtgatttgtgcacgttatttaggcgatgatgtacgtgaatgccatgatgcttttgcagcagtccgtgcccgtttaagacgctattggtatgacctagcagaagaattcccacggatttggcgcacttaa

SEQ ID NO: 70026 - DNA, 573 bp, Acinetobacter baumannii
atgaagttattattgcaaagaattaccttcacatcgttggcattctttcccttggtagcaatggcgcatccaggccatgagcatagccataatagttttatcagcggttttgtgcatccatttacagggcttgatcatctaatgatggcgttagcatttggcgtattgatttggactgcacaccagcgctggaaatgggccggattattcggtttatctgccgcaatgattgtcggttttatgatcggtgcacaattcaacttagcaacagcaattgctgaaaacggcattattgcgtcgttaattgtattggctgttgctctttggaccaaaaccaataaagccgttccttttattgctgcacttttggccggttttcatggcatcgcacatggtacggaacttggccaaagcggtcaggcagttttactggtcgttggtatggttacagcgatggcatctatatacgtattcggtttgctcgtcggcgcatttattcaaaaatatgtgccttatggtaagcaaatgattggtgctttgacagctattgttgctgtaattggtttagcttga

SEQ ID NO: 70027 - DNA, 666 bp, Acinetobacter baumannii
atgttcacacctaatgcttcacagcttttaagtctgttgactttgtcctcaacggcactaccaattggggcgtactgttattctcaaggggtagaaagtgcgattgatcagagcttaatttttgatgaaacctcgagcattacttattttgaagaagtgcttgaaatgcttttggtacggtttgagctgcccgttttgaaacgcctaataatatcttttgatcagcctgagcagtttgaatactgggcgcagttatatagagcaagtcgagaaagcaaagagttattggctgaatcacagcaattggcattttcattaaatgcgtggattcgtgatgtgctgaaaaagcctgtgaaattaaaaaagcagatcggtttcgtacccatctatgcgcatctttgtgggcaactcgaacttgatgttgcagaggttttgactgcttatacctttaccgtacttgaaaatcaggtgttggctgccgtgaaaactgtaccacttggacagatgagtggacaacggattttatggcatgtgcatgggctgattccagaggcaattgaacgtgctttagcactgcaagatgctgaactcagtagcgccttacctaattacgccatgctcagtatggcacacgaaacacaatattcacgattatttagatcttaa

SEQ ID NO: 70028 - DNA, 483 bp, Acinetobacter baumannii
atgaaaatctatacggaaagacttgagggtaatgtcgtacaagaaaatgttgagatagttgaactgacatttgatacacgacaaaagagccgttttcgtgcaactttagctaacgggcacgatattggtgcagatttaccccgtaccggcattttaaggcacggttcatatatcgcaactcaagagggtgatgtactgcgtgtcgatgccaaagcagaaaaactcatgaaagtagaagcaccaagcagctttgatttattaaaagcagcgtatcacttaggtaatcgtcacgtccctttaatgctcacaccaacggcgctgtattttgagccagatcatgtattggctgaaatgataattggacttggtttaacggtatatgaaaccatgcatccatttgagcctgaaagcggtgcttatacacagcatcagcatgatcacagattaagcccaattaaggctttgcatcatgttcacacctaa

SEQ ID NO: 70029 - DNA, 984 bp, Acinetobacter baumannii
atgtctattaatggaatttatttctttaatcacaatatggcaaatctaatttataaagacaataacttgattgaagcatcttatgcattgactctgtctgaacaacgcttaattttagttgcaattattgcagctagggaaattgaaaaagagcttacatcggatacattgctaacaatacatgcgtctgaatacatgaagcactttaatttgggtcgtcaagcggcctatgaggctcttcagggagcgtgtgataacttatttgaacgtagactcacctataaggccatagatcctgttacaggtaagccagcggtctacaaaagccgttgggtatcaaaagttggctatgttaaagaagctgcatgtgctcaactaatttttgctcctgatattttacagctttttgtaaaacttgaagaaaagtttactcgttatgaattaaagcaaatttctcaattatctagtgtatacgctatacggctgtatgaacttttgattagatggcgtagcaaaggcaagctatatattagtatggttgaattgcgtgataagttaggtctacttgaaaatgaatataaaaccatgggagatttcaaaaagcgtgtattgacggttgccatagatcaaattaataaacttactgatatcgacgtaagttatgagcagaaaaaagaagggagaacaattacacatatcgaattttcttttaatcaaaaagcttccttaattgttagtgataaggtactggaacctgcatatcagctgacaccaaaacaatctatatttttcgctcaaaaattgtgtgaccttaacaaatatcccgaattcggggggaaatatgccaatgtaggcgaagagatcgaagcgtttaaagaaaggatttcacttgaactcctcgaccctgaaaaggtaaaaaagtattattctgatttgttaaaagtgggctataaagaaaaatataaatcagaaaagttatcataa

SEQ ID NO: 70030 - DNA, 897 bp, Acinetobacter baumannii
atgaaaaatggtgaactggaaaagttattgacactacctgaaatgattagtgatcaacataaagataatattataaagttaaatgaatataacaataagttaaaaatttatctagttgaaaactattttaaaaaacctgatattttattgatttatttaaagaaaatgggtgctgaaaaaataattagtattagtgaaaatattgaactattgcacagaatattcagtaatatagttttttttgattattttaaggagagtgagctttgtgtggctgatctaattaaaatattaactatttgtaataattcatctgaatactttattaatagaattaaaaatgaagaagaaattgttaataaaaaaataaaaaagctagaagtcatttttaaaagttttatagacaatgcagaagaactttacgattttgagttttggtttaatgatagagcaacaaaaaatttaagtgagatattaaatattattgcacctaataattttgataaagaagaggatttactcaacttagaaataggcgataaaataaaatcccttgtagtttttgagaaaatttttgaaaattactatcaagatgtaaaaaatatgtatgaaagtaaaagagaattaaatccaaatgaaaaaaacataaatattaattattttgttagggaactaaggaatatttttgaatctagaaataaaatagaaattcccaatgaaattatttgcgagctggtttctctaatattcgataaacagatggatgatactcaattgaataatatccttaaaaattctaataaaaatatttcaaatactagctatacattacagtttacaacgaaagaaactaatattgtagaaacggaatatataaaaaccaaaaattgcttatag

SEQ ID NO: 70031 - DNA, 873 bp, Acinetobacter baumannii
atgaggtacgcctttattcaggacaatcagcacatatggcctgttcgtcgtttatgttcaactttagatgtgcatcacagtggttattacgcctggttaaagcaacccaccagtaaaactgcgaggaaacggcaacagctttcaggactgattaaacagttctggctggaatctggtggagtctacggctatcgcaagattcactgtgatttgaaagatattggtgaaagttgcgggattaatcgagtacatcggctcatgaaggcgaatggtcttaaatcgcagcgtggttatcgtaaacctagagctcatgctggtgttccggctgtcgttgccgcaaacactttagaccgacaatttaatccaactcagcccaaccagctgtgggtgactgacatcacttatatccgcactcatgaagggtggctatatctcgcagttgtgattgacctgttttcacgtcttgttgttggctggtctatgaaatccagaatcacggcagatctggttttagatgcgttattgatggctttgtggcgaagaaacccaaagaacaaagtcctaatccattctgaccaaggcagccaatacaccagtcatgaatggcagacatttctcaagcatcataatcttgaaagtagtatgagtcgtagaggcaattgccatgacaatgctgttgcagaaagcttcttccagctattaaagcgggaacgaattaaaaagaaaatctatgcgaccaggactgaagcaaggtcggatatctttgaatatattgagatgttctacaattcaaaacgcagacatggttccaatggtcagcgttctccattagattatgaaaaggcccatcaaaagatgattatgtgtgtctag

SEQ ID NO: 70032 - DNA, 252 bp, Acinetobacter baumannii
atggagcaatatggttttcaaggttcaatgagcaagcgcggagactgttacgataatgcaccgattgaaagcttttggggaatactgaaaaatgagttagtgcatcattacaactatcaaaccagagaagaagccaaagcagatattataaaatacattgagttattttataatcatcgaagaattcaaaagggtttgggttttaagacaccaaatcaaatggccgaagacttttataaattggctgcctag

SEQ ID NO: 70033 - DNA, 921 bp, Acinetobacter baumannii
atgggtgctctctcctttgaaccctgtgtcgcagagatgcaaacttcagagaatattcccctgccgcaattggcacaggaagtccaagaagtcctcaaaggagaaggtggcgaatttttacaacatttgctggtcatgggtagctccccccaaggtgccagatccaaagcattggtttaccgagatcctgtcaattttgagttttcgacgcaagcttctgatcaaaatgaagcctggctgattaagtttcctgctcagcaagagtatcctgaagtctgcgccattgaagccgtctatgcagaatgtttgcgactttgtgcaatcgagactccagacacccatttttttaatttgcccaatggtttaatggcttttgcttctaaacgattcgaccgtcaaaatggcatgcggattccaatgcagagtttggctgcatataccggagcagactataaagttccaggtagcctagactatcgcaattttcttcgggcaaccttgatgtgtacgcaagatgtgcgagaaaggctgcatacttttaaacgtgctgtgtttaatgtacttttcaataatcgggatgagcataccaagaatttttcttttctcatggcaaaaaatggtcaatggaaattggctccagcctatgatgtgaccttctgtgaaggtccaggtggttatcatcaaatggacatcatgggagaagcgctcaatatttctcgaaatgacatacataaactcggtacttcagaagcgaatctgactactctagaagtcgatgagatcatcttggccatgcatgaaattgcacttcaatttagtcaaattgcgcaacgcctgtatcctcatcaaattcgagaatctaccctagagatgattcaatcacgaattcaacaaaatattgattttttaactgaaacctaa

SEQ ID NO: 70034 - DNA, 240 bp, Acinetobacter baumannii
atgtcagcaaaactagttgttactttgttagcaaccagtcttttaactgtaggctgtgttgcttatacagatgatccttattatcgcggtggttatggttaccatgatcatgatgacgatcgttatgaccgtaacgatggacgtcgatatagtgagtgggaaaaacgacaccgtgaatgggagaagaaacgcttagaagaccgagatcatgatcatagagattatcgtcatgatgactaa

SEQ ID NO: 70035 - DNA, 1431 bp, Acinetobacter baumannii
gtgatttatccaaaaggtaaaacaccattggcagcacatgaaaaagctgaacgtgactatgtggtgatgttgtcagattttcatgaaaaaaccagtgatcaaattcagaaagatcttaaaatttcagctgaatattatcaagatcagcgtgaaaccttgggtgatgtttggaagcaggttaaatgtgatggcataaaagcgacatggtctgaccgcaaaatgtggaatcagatgcgtatgctaaaaaccgacatgtcagatgttacaggttataccttcctcattaatggcaaaacacctgaacaaaattggacaggaatgtttaaaccgaatgaaaaaattcgcctacgttttgtgaatgcatctgcgatgtctttctacgatgtccgtattcctaacttgaaaatgactgtggtcagtgctgatggtcagcctgtaaaacctgttgctgtggatgagtttcgtattggcacagctgaaacttatgatgtgattgtggagcccaaaggcggacattatcaaattgaagctgagtcaattgaccgtgcaggctatgcgattggtacactgcacaatgaattaaatcctatgacacatggcattcatatgcctgcaccacgtccacgctcacttttgaccatggaagatatgggacatggtggcggtgatcatgcaggaatggatcattcgaaaatgaaccacggcaatatgcaaggcatggatcactcgaaaatggatcattcaaaaatgaaccatggcgatatgcaaggcatggatcactcaaaaatgaaccatggcgatatgcaaggcatggatcactcgaaaatggatcattcacagcatggcacagcaaaaccacaagaaaatgatcaagtggtttatggttgggcaaatgcatctacacctgcgggcaataaagccttgcaatatagtgatttaaaatctttagaaccgcaaaaagatactcgtgaagctagcagtgaattagtagtacgtttgggcggtactatggagcgttatatttggacgattaacggtaaaaaattcagcgatgctgagccattaaaagtgaagtatggcgagcgtatccgtatcaaatttattaatgacagtatgatggcgcaccccatgcatttacatggcatgtttatgcagttggagaatggtcaagagtcggtagatatgccgaataaacacacattgattgtaccaccgggtaaaacagtgactgctttattaactgcggatgagttgggcgaatgggcaatccattgtcatttgttgtatcacatgagtgcaggaatgatgaacaagttgatcgtggcaaatgttagcgatgaacaagtgtctacaacgccaattcaaggtacaaattcgactcaaactcaccaagtaactgagcaaaaaggagctggacatgcacatcactaa

SEQ ID NO: 70036 - DNA, 339 bp, Acinetobacter baumannii
atgcacatcactaattttgtatttaaaacgtttttttctgttgcggtattgagtttaacaagcttaagtttggcgcacgaagggcatcattcaactgctcagactgatggaaaaaatgtaccatcaatgaatcatcaagcgatgtctgagatggatcattcacagcattctccacaagagcatgcacaacacatgcagatgatggggaaaatgaatcatgctgcacattcagcaccgatgaaccatcaacatgcaggtcatcagccaatgcatcacaaatcaacagagaaacagcaagatcaaaaagtacagaaaggagatcaacatgcgcaccattaa

SEQ ID NO: 70037 - DNA, 945 bp, Acinetobacter baumannii
atgcgcaccattaatcttttttctaaaactgttttagcaagctctttgttgatggtcagtgcagtgagtttggcacataatggtgaagatcatagtgcgcctgaaaaaatgacagttgctacatcttctagtcaaaatcagccgatgcaaatggatcgctctcaaatgaaccatagccaaatgaatcaggcacaacatcaggcaacatctacggttaatcatttacatcatgtaccagatgcgaatgctcagcagagttcgcattatgatcatcgctcagaacacggtgcgcaaatttatgcgattacgacagtggacaataagtggcttgtcaatgaagatggcacaggtgatttaaagtcagagtttgaaacccgtattggcacagatgaaaataaggtttttattaaaattcatgccgataaagaagaatcgcatgatgcacattatgatgccaaacttttatatagccgtatgatttcagacttttgggatgcacagattggtgcacgttatcgtagtgaaaaagttgaactcaatgatcatcgcaaagacaccgaagaaaatgttgatgcggtgattggcttacatggtatggcgccatatttctttgaaactgatgcttatctctatgcgggagaagacaattatgcgggctttagcctagaaacggaacgtgattttctgattacgcaaaagttgattattcaaccttatttagagttggatgctatctttagtgatgactctaaatatgcgaaaaaaactggtttaagcagtgcaaccgcagggtttgaaactcgctatgaaatcagtaaaaagatcatgccgtatatcgacattgcctatgagtattcaaaaggtaatgatgaaacgtcgtggcaaatagaatcaaactctgagaaaggttggttatatggagctggtgttagatttagattttaa

SEQ ID NO: 70038 - DNA, 579 bp, Acinetobacter baumannii
atgtcaatttggggtagtaaaaatcaaggtttaaacttatatcgatttagaatacttgatcaagcgctttcagatgaagaaatatatagtcatgttttggcagcaatagtaaatcataatgaagctattatttatgattatattaatattaaaattaattgcgtagaaccatctcaaattgctagaggagttctagttgctggatgtttagatgaaaattctttatctcaagaaatatttgataaatataaggattataaggggctaattggggaggcttacaacgcatctttatatatgtacgaaagaaacatctggtctaaatattggtttaaacaaatggtatctacagaaaataatgaagaattttggaaaaatatgattttatttacaaaaattgtagactctagattttatacatggaatgaatctattttaaataaaaatattcttttcgatagtttttatcaaagttttactaatgacattaaaaaccgttgtaaaaaatggcaaaaagaaagaagcaaaaaactatttggtagtgaacctccaaactctatctacatttattctgaatag

SEQ ID NO: 70039 - DNA, 168 bp, Acinetobacter baumannii
atgttagaaaatgaaaaaagagaagaacttggtaaacaaatggtagaagatcttatagagattgcaagattggagcaaagtccaattaagcactttaaagctgatcaaaatggagttttttgtgtggtaggagtagattctataagtcatgttatttttagaaaataa

SEQ ID NO: 70040 - DNA, 252 bp, Acinetobacter baumannii
atgaaggttgttacctattatgatttacggaagaatctagaacatttactagatagtgttattgatgaccataccccagtacttgtcactagacagaataagcaaacggctgtattgattagcttagatgatttcaatgcctatgaagaaactttacatttacttaaaagtcctaagaatgcaaaaagattgcgtgacccaattgctcacatcgaaacaggtaaaacaattaaaaatgagctgattaaataa

SEQ ID NO: 70041 - DNA, 477 bp, Acinetobacter baumannii
atgctaaattatgctgagactcttgttataaaaaaggatgaaatgcttgcatttgaagatttattaaaagaatttatggttaatgtactacgattagcacctaaatctataagaataagtggcattgcatctgaaagtaaatgcgtaaatattaaagttaccgtacacaaccctaataatgatttttactttaggttaggatacttcgatgaaaatagtcaaaacaaagcaattatagttgcaagattaggatttaaaactcctagaaaaggttttggtacgaaattaatcaaagagttgtgcatctttggcaagaagtttggttattcttttctaagcattgaatgtcctaataaagactgtcaaaaattcatgttgaaattaggttttaaaagtaaccaatacaaaattgaggtgcaagagctattactcttaatagagagtagacataagactcctatacttctcgaacactag

SEQ ID NO: 70042 - DNA, 642 bp, Acinetobacter baumannii
atgaagcctacaaaagcaaattctcagctagccaataaaagaccgttttatacaaaggaggtcatgatccgtccttacccgcctctgttcaaaatttaccaaagctacgctcagattttaaatgcctcgcaactgccaacacactttcaacatgacgtgagcctaatatctgctactgcacctgctccagctgagttattcgcaacagataactttcttcttgtttatatagcacaacaacaaaatattcgaatcaaagctcgaagcattgtagaagctgatgtagacctcattcaggttcaatatcaactcagcaacacactctttaagttgatgactgagctcaagatcaatccacaggctcttaatcccgataagctacttcataacttaaatcagtctctatcgaaacaagcaatttacgatgtgaatcaaaagctttatgacaaacccagatgcagtctttctcgagacctactcgctaagttaatcgattgcagtcgtaatcagctactttatcgccagaagcaaatcaacggctctcacgacctacgaattcaagcactcaaaaataaatgtaaagcactcacgagcgtacaaccatgcgcatcacaattttggagtttagaccatgaaaattga

SEQ ID NO: 70043 - DNA, 267 bp, Acinetobacter baumannii
atgaatcttgaaaaatataaggcttttataaacgaacagaaaaaattttttgatgaaaatattcaaaaaaactttaaatggtcatgggatgaccctgaatggtccggaggagaaattggttctgggtggttgctttcacgaagtggaaaaacaagattttcctttccgacagggaaaagattgaaaggaatagatgacttttcaatagatataaaatatcaagaatttatgaaagcagtgatggttcttagtggctttgttgcataa

SEQ ID NO: 70044 - DNA, 1587 bp, Acinetobacter baumannii
atgattgataaaaatatgcctcaacttagtctagattttgaaaaaaatgataatagtcctaatgaatttaggattttccatgatgctgatcttaggctcatagagtctttgtatacaccagcaatcattaaatttcatagagcagataagtttgatagtaaatttattcaaacatctaataatatttggacttttatctactcaggagaacgagttcagctgaatttttctaacctattgtctttcgaaataaaattagcgaaatattttttggcaagttatattcaaactaatacaccatcttcgcttgatgttatattttacgcttatgtatatgcaatcaaattcttaaaaaaaaatcaattaaaactcagctttcataatttaaaatctataataattaatctagcaaaagttgataatcatacatattactacaatctaaagtttttagctaaattgttatttttagaaggtttttatggttttgaaattgaacaggaatatgaactggagttcctcgaacggccgaaatccttcaattctagattgtattatcaacaatatgaagatcttattgattacccaactattaccatgattcaacaaggttttagccaattgaatcatcaattaaagcaagattctttacaagtcactaatcaaactttaataaactcttcactattaggactcatctatgtatcagggcttagacctgttcaattagctaagttatcggtacaagatataaaagtagacactacacgtacgatagatcaattccatcgctatagcgtactaattccatatgcaaaacaagtaagatatatacatgagaaaatagctgtaaagttaccagaagaagttgctgaaattatcattgcatatatcaaaagatataacttaagttcaaaagataaattatttaatttaggagaaaattctgcacgcttttgctcagaatctattaatacacaattatttaattttgctcctaaagcctatagagaagctgttcatgcaggtgaaatgctaaagcagaagtattctttttcagacttccgacatcatgtgggttatagtctagctatggcaggatcttccgctgaagaaatagcatatatcttaggtcactcatcagtggtgacagcaaggcattatattttctctacaccacaattagcacaaattagggctcaagccttaggtagaaattctttatataaacacatgattgctatgttactcacaggtcgtttggtttataaacaagaatggaaacacaaaaaagtaatgggcaacattggccataaaattcattatgacatcggtggctgttcttacaatgataaatgcctatttcaacctgttcgcaactgctatggatgtatatattttcacccttttattgatgctgatcacaacaatgttttagaaagtattcaatgtgaaattaatgatctgattagattatctgatggtataggcgtttcaagaaatccattaattagagtccatgaatcaacaaaatttgaaattgaatcagtaattgttcgttgtaaaatacagaaggatgacatttga

SEQ ID NO: 70045 - DNA, 885 bp, Acinetobacter baumannii
atgagcgctattttttcaactactcaagaattaatcacagaaatagtacaaatgacaaaagaggttaaaccttggttaattgtagaaggtgattcagatatccgattttttgaacaaagatttaactcccagaatcctattacttatgaggaaagaaacggttggaaaggagttgtagatttattaactgaatggcaccttctttcagatatagaaaaaaagggcaaaactgttattggggtaattgaccgagattatcacgaagctatcaaaactgttcttcctaaagatattgtaactgtagatcatagagatcttgaaattgtaatgttcgaaagtgatgaagctttaaataaagttcttttggaactaggctccaaagaaaaaataccaagaattaatggtcaatttgatctacaacaagttagacaagtgatttatgatttagcatatccactttctaagcttagatttcttaatgctttgaccacagatattaatcttaaattttctaaaccttttaactttaagaaagttattgaattaaatccgctatgtttaaagcatgacaaattaatagaaagaatttctatagatagctgttgtcacgtagatcaagtattacaacttatggctgatgatattggagaggaatgggacgttcatacaaaaattgctaatggacatgatgttatttcaatattaggaaaaagcctccaaaaacattttggaaatgtaagtgattctaaatttgttgaaggagagcgattagaaagtatttttagaatggcttatcctaatcaagaatttgaaaactctaattttggaaaaaagcttatgatgctattaggttttatcaaacaatctgatcaaaaggcagcataa

SEQ ID NO: 70046 - DNA, 981 bp, Acinetobacter baumannii
atggtaggttatgatgatataaggagaagacattatattcaggaaagaaatctccatagagcaagatttatagatgaccgtgaatattatttagatattgatcgatttggttctcatagcatgcttgttcatacataccttaagaattctaagagtttagatgaatatgcagatttatttaatttttttatggtaaaaacgcagaggttaatctatctgccttctgaagatgaatcaaaaaataaaaattttagtagatatatgattgaaagatatgctaaggatttatctcaaaaaattgccacatctttagctgaatctaatgagaagacagcttctcatgataaatcatttcctgagcgacttatacaaaatattaatacgttaccattaccttcatatgtagagtctgaaactaatattcgtgaaaaatataaagaaactcaagataaaataacaaaaattttgaatgcgggcttgttatttagggaaaaaaacatttcgctacctgatgatggtttaaataatgaaaacgtaaaaacagttctatcattatatttgcaagatttaaatgaaaaattggcagtatatgatgatttattaaataaaattgagacatttcaagatattgttggaaataaattaaataataaagacttccatgttcaatatgaaaaaggtttttattttacgtctaaatatggtgaaaaaaaagaattaaaactttctgaactttcatcgggtgaacagcatcaaattgtcttattttatgaacttatatttttagctgaatctggtacatactacttaattgatgaacctgaaatatcacttcatgttgattggcaacgtagctttttagatgatatcgctcgagttgagaaattaagaggccataaatttttaatagctactcattcaccacaaattattggttcaaaacggaatctttgtattgctttagatggtgggattttgtaa

SEQ ID NO: 70047 - DNA, 348 bp, Acinetobacter baumannii
gtgtctgttgcatcagtaaagataatgcatatcaatatgcaaactgaaatgagccaagatcattgtttagatcaagcacagcaagtcactcaacatggtattaatcacgaagtacagacgaataccgattgccataatcatttagctcttaatcagaatatagatcacaaaaagtgtcaggaatgttctagcttatcctgccagacacagatctcatgtcttcattctttgcaaagctcgctagatcccctagataccttctattctatagatcagcctaatttttattaccccaaccaatatctaaatgggtattggcaagaaattttacgtccccctaaagcttaa

SEQ ID NO: 70048 - DNA, 198 bp, Acinetobacter baumannii
atgctgattcaggacggtatcctcaatagtaatcaggttttaagtggtttaccccatccttcgggagccaatgcggagcgaatagcgtattttctcgggaataagcctaaagaattactatcatctaaaacgaatccagagttattggataaagcgaaagctgaaatcattaagaaacttgaacgcctggaaatgtag

SEQ ID NO: 70049 - DNA, 318 bp, Acinetobacter baumannii; identical to SEQ ID NO: 54614

SEQ ID NO: 70050 - DNA, 933 bp, Acinetobacter baumannii
atgaataagcctacacctaaaatttatcgtacaagcaattggtcattctacaatcgtgctctgataaatcgaggaaatctctcaatttggtttgatccaaaaactcaatggtatgctcaacccaaaggcaaacatggacgaaatcaaacttattctgacacagcgattcaatgctgtctgatgatcaaatccctatttcgattgtctttacgtatggtcactggctttgttcaaagtctcattcatctctgcagattagattggacagccccagattattccactctctgtagaagacaaaagtatcttgatattgcaattaactatcaaaaaaacagtaatggtctccacctactcgtcgattctactggtttaaagtttctgggtgaaggtgaatggaaacgaaagaaacatcagcctgaatatcgccgccaatggcgtaaattacatattggtatagatgctgaaacccttcaaatacgggcagttcagctcagcactaacaatgtgagtgattcgcaggtacttggtgatttacttgatcagattccacaagatgagcagattgactccgtatatactgatggggcttatgacacaaaacaatgccgtcaagtaatttcggatcggcaagcacatgcagtgattccacctaggaaaaatgcaaagccttggaaagatacaaagatttgctcgttagagcgaaatgagctgcttcgaacagttaagcatttaggaagaaccatttggaaaaaatggtcaggttatcaccggcgaagtttggttgaaactaagatgcattgcatcaaattattaggggataaactcagtgcgagaaactttcaaagccaagtcaatgaaatacatacacgtgtggcaatcttaaataagtttacggaattaggccgacctcaaacccgagttgtaacttaa

SEQ ID NO: 70051 - DNA, 870 bp, Acinetobacter baumannii
atgagtcgcggaaatattgccatttggtttgatcctgctacgcaatggtatgcgccatcaaaaggcaaacaagggcgaaatcaaacctactccgacgcagccatccaatgctgcttaatgattaaatccttattccgtctgtctttacgtatggtcactggctttgtgcaaagtctgattaaactttgcggattaaattggatagctccagattacaccacgctttgtagaagacaaaagcatattgatattgtaatcagctaccaaaaaagtagcgatgggctgcatctactcatggactctacaggcatgaagtttctaggtgagggcgaatggaaacgcaagaaacatggacctgaatatcgtcgccaatggcgtaaacttcatattggtatagatgctaaaaccctacaaatacgagcagttcagcttacaaccaataatgtcagtgattcacaggtgcttggtgatttacttaatcagattccacaagatgagcggattgactctgtttataccgatggagcttatgacaccaagcaatgccgtcaggtcattgcagatcggcaagcgcatgcggtgattccacctagaaaaaatgcgaaaccatggaaagatacaaagagtagctcgctagagcgaaatgaattacttcgagcaattaaacgtttaggcaggacactatggaaaaaatggtcaggctatcatcggcgaagtttggttgaaactaagatgcattgcatcaaattattaggagataaactcagtgcaaggagttttgatagccaagtcaatgagatccatgcacgtgtggcagtccttaacagatttacggaattaggtcgaccacttacccaagttacgccttaa

SEQ ID NO: 70052 - DNA, 336 bp, Acinetobacter baumannii
gtgtcaacacaccctagatttgatgagaattattggaaaggcgaagtaaactttgtcaaatcaggtgtgccatcacaagacagacgacctgaaaatctcttggatcattcaattctagaatttgccaaggcgtatgttaagtatcaaagaattaatagtaagttaaaaacccaagatacgattttgggaattcgggtattagaaaaaatatgcttagatcgatatggtgaagtggatttatctaaattagttattgctgattttgatttagcggctgagaatgcaaagaaaagtgaaccgtaccgggtttgtcggagacttttttatttaagttaa

SEQ ID NO: 70053 - DNA, 2289 bp, Acinetobacter baumannii
atgtctttcatcaaaacccgcaagaaaattgtatcgtctgcaattgcttcttctctctctgtgatagcaaccgctgctatcgcacaagaacaagttgaagtattaaaaactattaatgtgcatgctgaagcaaatcaagcagaatcattgaaaatagatcagtctgcgaacgcgaaatttgtagctccgctaaaagatacgccaaaatcggtgtcaattctttcccaaaagctacttcaagaaacgaattcaaataccctactcgaagctctacgcaatgaaccaggtattacacttggtgctggtgaaggcggcgttccatatacagatattccttatattcgtggttataacggccaatcttctatttatgttgatggtgttcgtaatgcaacagctcaaactcgtgacatgtttgcgattgaacaagttgaagtcatcaagggctcaagctctgctttaactgggggaagcgggattggtggcagcattaaccttattccaaaaattgcccatgaaggtaatgtttatcaaggatctgttgcgggtggtacagacaactaccgtcatattcagcttgatgccaacaaagactttggcaatggtgttgctggccgtgttgttgttatgggccatgaaaatgacaaacctggtcaaagtaatggagccgaatacgctcgtgttggtattgcaccgagcctagcgctcggcttaggttctgcaaaccgagctacattaagctattacttcttaaaaagtaatgatgaacctgattcaggtattccattcaataacccaaaccttgttaataatgatggtacaccgaaatcaaatgttcctgctggtgcagaaaaaggagatggtaagcctgtcgctgttaagcaaggagcatattatggttggaaagcgcgtgatttcgacaaacgcgaaaaccatattggctcattgaagttagaacatgactttaatgatgatctaacacttagtaacacagcaagctatagccgctctaaagcagactatatctacactaacccagatgactctaagagcaacatttataaaaatcaagtttggcgccgtgttacacaatctattcgtgaaacagaagcgttcacagatcaactatctttagccgggaaacttcaaactggtcagcttacacatagttttaatgtaggtgctgaatatagtcgtgaagagactgaacgtggctcatataacatcatctaccctggttataagggaacaacgacaactggctttgataatacgtgtaaaaataatgatgggtggtgtaccagtttaacaaatccatctgggaatgccccatggttaggttcattaacaacgaatccaaaacaaagaacatcaaccaatgaaacagtatcaatttatgctttagatagcattgaattcaataaatactggttgctcaatttaggtgcgcgttgggataaattcgattcagagttaaagttcaataaggactacataagtggtaacactactacgcctgctggaactgtgtataccaatgactctgatttcttctcgtatcaagctggcgtagtattccgtccaactgaacatggcagtatttatgcaagctatgctaccgctgctaacccagtaggtatggatgctgatattgatggcctgtctgcatcgaatcaggctttagatccagaaaaagctcgtacttacgaagtgggaacaaaatggagcctttgggaaaatcgcgcgaatgttacagccgcaattttccgtaccgaaaagcaaaatacgcgtattgcagttgatgcaaacaccacaactaatgctggtgaaagtaaagttgatggttttgagcttggtttaactggtcatattaccgataaatgggaaatggctgtaggttatagctatcttgatagtgaagttgaaaaagctgcctacaatgctgttgctcaagaaggcaaacctctaccattcgttgcaaaaaatagtgcaagcttatggaccacttataaagttctaccaaaactaaccgtaggtgcaggtgcacaataccgtgaccaagtgtatgcaaacacaaatccaaataccgcattgacttcaaccaaaatcttacctgcattcactatttacaatgcaatggttcagtacaaagttgatgaaaatgtagatctacaattaaatgttaataatatttctgacaaacgttactttactagtgcccatgcagctcattatgcaaatgagggtgaaggtcgtaacgcagtgttagcaattaactttaaatattaa

SEQ ID NO: 70054 - DNA, 294 bp, Acinetobacter baumannii
atggcaatactcaaagagtttactaatgtttataagactgatctggaggggttagggaaaatattatatggcgagaatgcttcttttagtaaagctattgagcaggtcagtcagatagaaaaaactcattctcaagttattagtattcaaagtggtcaaccatgtactaagtctggctattggtttactccagccaaagagaattcacgtcagtattttaaagaaggtgaaatatttcctaattttgttacagattggggagaggtttactggcagttcgatggtgatgaataa

SEQ ID NO: 70055 - DNA, 1590 bp, Acinetobacter baumannii; identical to SEQ ID NO: 55400

SEQ ID NO: 70056 - DNA, 1014 bp, Acinetobacter baumannii
atgggcttaacttcggtaaatcctgatatcatgaaagagcttttgattgacagacttttaagaagttttaaagagcatgagtatgtatggatagcttggaaagcagctagcactaataattacacccctcgtgattttttcaatttttataatgaaaaatattcttatgaatatttatttgattatataaaaacaactttatctaaacttgaagaagaagaaataaatatctttattaagaattgtcataaagaacagaaagaatatattttaaatatagatattaatctacacctaaaggatgacagattatgctggtttttaattaatagattcaccaaagactaccatatacctatttttattagagaaagtacatttaagaaattaaaaaactcagaaacatcaagtcaaattaataataatataatacacaaatccgcccacaaccctaaaatatatagacaaaacaataatcataaagttcacaaaaatattaaaaatcctagaatttttattatagctttgatttatttaaaccctaaaataacgagaaatatagatcaaagaaatatagacttagaaaactacattattgagttttatgaaataaaaaaagaaaaaataaatctaaataaatacattaaggataaagattttatagagtggagcaaaaactatattgataaaaattttgaatacaatgttttccctcaatttctttttgaaaaagaaaagttacatgaaaattatatctatgcctattttgacgatctttacattcataatagagaaaaatatattaatgatttaaataaacttaaaaaagcatggcagcaaaatgttttcagattaaaaaataaggataatcttaaaaagaaatttcacttacccttaagaaaaaatacaaaggttcgattgaaagaattagcagagctttacaatatttctgaatcagaacttctagaaaaattgattaataaggaatatgaagaatataaagactataagtaa

SEQ ID NO: 70057 - DNA, 909 bp, Acinetobacter baumannii
atgagagcttcaattaatcaggcacaacttacacttgagattgagaaatttttaaaacgtttaaaaagagaacgtaaaaaatgggatggattctattcacagcttactaatctgttattagactttaatgatatttatgatcctgatgatgaatacacaggttatcttaaattctttgtaattctgagatatgacttacagagaatagattccgattattttgattttatggatgagctaaagataattgggtatagagagatgagggcgtggtttttagatttatctgaggattttaaaaaagattataagatgatcgaaaaacagaaagatgaaaataaaattgaagtgcaggaatattgtgagtcaataattggtaaatatagccgaatattagttgctcgggtggacttgggttatttacaagaaaattctagtcgcatcagagttgaagatatttataatgatttggatatactccttaatcgtattcaaaataaagatggcatatttaaacatgtggtcgggtatatatggggagtggaacaaggcggtaaaagtaaaggttttcactgtcacttagcaatcatttatgataatgcctatcgtgatggaagcgcagcatattggggaaatgaaattattgagctatggaaggatattactagaggttatggtcaaggctataattgttggaaccgtaaacgtgtagcgaaacttcgaagagagaataagctggggatcggtgtgatttatcgtcgtgattcaacccaagtgacaaatttcattgaggcaatggaatacattgctgatcatcacaaacgtactcttcaatacttacgtgtaaagcccaaaggacgaagagtatttggtaagggtcagttaagagcgcagtatgatagacgctaa

SEQ ID NO: 70058 - DNA, 279 bp, Acinetobacter baumannii
atgagtttaaattgtccttattgtttatcggatcaggttattcaagtggttaatcagcaggtgagtggatctgattctacaggtctagcagcatcagcttcattcgcaaccatcggtgcatccatttcaaagagtttgccattgcctgtatccccattcattggtggtatcgctggtgcaatcattggcggcttatttagcaacgtgttcgatgagccgaaaaagcctgtcacaatgacttattaccactgcaaccaatgtcagcagaactttcgttga

SEQ ID NO: 70059 - DNA, 267 bp, Acinetobacter baumannii
atgttgacgtgccgagaagcgactcaattgctttcagaaaaacaagatcgaatactgaattttaaagagatgagtgctttacagtttcatgtgctgatgtgtagttcgtgccgacgttttggtaaacagatgaagagcttaagtttattatcgaaacaatataaaaagtttgatgaagaacagaaagatgaaaataagaaagcctcatatttcatgaggctttcttggcttaatttgagtcaactaaaagaattattaaaaagctaa

SEQ ID NO: 70060 - DNA, 618 bp, Acinetobacter baumannii
atgtatctagactcagttgataatgatgatttaaatcagcaattgcacaataccgaatatttgaatgatcttcgacagcaaatgatcaaatttgcattgctacaactttcatcctttcaacaagctgaagatgttgtacaagaagcattaacgagtgcttttgaacatctgaaatcattttcaggacgtgctgcttttaaaacgtgggtctttgctattttaaaaaataagatggtggatttaattcggcaaaaaaaccgcttaatcacaatgagtgagttatttgatgatcaagaaaatgatttgagtatagatgaattgtttgataaggctggacattggcataaatatgaagcaccccacgcatggcaaagtcctgaagaaatgatggaacaacaagatttttggatcgtatttgatgcatgtttaaatcatttaccagccaagtatgcacaagtctttatgttgcgggaaatgattgaactgagtccagatgaaatctgtgagaaattacaactcacgatttctcatttaaatgtgttgatgtacagaagtcgagcacgtttacgtgagtgtttagaaaataaatggttgcttcaggaggattgttcatgttga

SEQ ID NO: 70061 - DNA, 744 bp, Acinetobacter baumannii
atgaataataaattccactcttttcaagatacccaaaacgcattttgtaattggatacgtgatcctaaacaacccatcccttcatcctttgaaactgaacgtatgcgtgtttatcgagagttattatttaataacgtaagttcttttgtcgatttagtttatcccgttgcacgatcgattttgccgaaaccaacatggcaacaactattagaagaattttttcaaaaatctacgaatcaatcgccattttataatgatatttcactgcaatttagagaatacttaagcgatcaacagcatccagttttacaaagctatccgtggttggctgagctacttcaatatgaatggctagaattgtatttagatactgtagacattccaaagaggcaatttactaaggcacctctatggcaatttaaaacccaagtgtgggttttggtctatcaatatccagtttatcggtggacactcaatcaaactgattttgaacaagatcctagtgcaattatggtatggcgaaatcaagatgatcaggtctgtgtggagccactctcgcccttatttgcatatctgatcgaaaaacttaatcaagcaccactcgctgagggtgaactgcgtaaactgatgagctcgactttagttgatctgactgcgcaagagattgatttacagatcaatgcactatctaatttattgagtcgcttagaactgatatatattcctcaagattgtgttaaataa

SEQ ID NO: 70062 - DNA, 828 bp, Acinetobacter baumannii
atgactgttttaacaggtgttggcttaggtttaaggcgcgactttatcgacagctttttaaacttggacacttatccagacttcattgaagttgcacctgaaaactggatggattttggtggtcgacatgccaaactacttgaacaatgtgctgaaaaagcacctctcatttgtcatggactttctttatcgattggtggtccgcatccactgaatattgaatttattcaacagataaaaacatttttaaaacgctatcaggtcacaacttattcagagcatttaagctataccaatgacggtggctatttatatgacttattaccgattccgatgactgaagacgcggtgcattatgtgtcggagcgtattcttcgtgttcaagatattcttgggcaaaagttggtgcttgaaaatgtttccacttatttgatgccacatgctgaaatgagtgaagccgagtttgttgccgaagtcattcaaaggtcagattgtgaattgcttttagatgtaaacaatgtctatgtgaatagcattaatcatcagagcaatgcttatgaatttatcaaaaaaatgccgcgagatcgtatccgctatttgcatattgcgggacatgagcaagtgagtgatgatttattaattgatactcatggcgcagcgattcgtgatccagtttgggagctattacaatttacttatcaacaacatggtgtaaaaccaacattattagaacgtgattttaatattccgacatggcaagaattacgagctgaacttgcgaaaattgaacgtatacaaaaaatatttaattcagccagcaatgtctag

SEQ ID NO: 70063 - DNA, 372 bp, Acinetobacter baumannii
atgaataaattaaactcaatgacatcagttgctgcattagttgcactttcaatggttggtgcagcaactcaagtctctgctgcttcaactacaactgaaacacatgtaaccaaaacagcagatgcaaagtgtggtgaagcgaaatgtggtgctgacaaagcgaaaaaacaacataaaacagcagatgcaaagtgtggtgaagcaaaatgtggtgctgacaaagcgaaaaaacaacataaaacaaacgaagcgaagtgtggagctgataaaaaagctgccgatgccaaatgtggtgcagataaaaaagctgccgatgctaaatgtggagcagataaaaaagctgctgatgcaaaatgtggtgctgctaaataa

SEQ ID NO: 70064 - DNA, 615 bp, Acinetobacter baumannii
atgaagtacttaatcaactcagtattacaacgctatcaaaattttctacaacactttaaacatttagatggcatggctgcactggcactaagaatctaccttgttcctattttctggatggcggggcaaaataaactgatgcattttagtgatactgtcgaatggtttgccaatcctgattggggcttaggcttgcccttccctaccctcatggctgttcttgcaacttcagcagaacttggtggcgcaatattattagcgcttggactatttacccgtttaatcagtattccactgatcattacgatgctcgttgcgattttgacggtacatctcccaaatggttggcaagcaatcgcagatccacatgctccttttgcaaatgcacaagtcttggcatctacagaaaaattagaaaaagcacgcgaaattttacaaaactatggaaattatgattggcttacatcgagcggttcattcgtcatcttgaataatggaatcgaatttgctgcaacttatttgattatgctgctcgcgttggttgtgctgggtggagggcgatatttcagtgcagattattggctgaatcagtggataaaaacgcttcatcgataa

SEQ ID NO: 70065 - DNA, 162 bp, Acinetobacter baumannii
atgtttaataaaaaaattattaatgaatataaaaaaaatttagatttttgtactaatttctggttaaacgacaaccatggacatagtggctctcttctaaatctagatgatgtatctaaaattgaaaaagatgatgtttggaataatattgatgtgtgctga

SEQ ID NO: 70066 - DNA, 348 bp, Acinetobacter baumannii
atgaacgctaaaattaagaaatttggttttcctttaccaattgcaggggcttttggaggcagcaaaagcccttccgtgccgagagaagatccagataaccttcaatctagcgcgtatgtaaatatcattgatctaattggcgaaggtcaaatcggtggtctggtcgataacgttgacggcgacagtcttaccgaaaaagaaaaatcaatcttttttgatggaacccgcttacgtcatacaaacggtgaactgaacttcgcgaatgtgtcttgggcggaacgggtcggtttacagcgacaagactacatcgaaggatttggcgaaggggtagagacgggactgttctaa

SEQ ID NO: 70067 - DNA, 384 bp, Acinetobacter baumannii
atgcaatttgctgtcatgatagctagtcacaacgaacacaatatatcagaaaatcaagattatgccagtttatcgaagtgtctagactacgccttgagacactccaaattcatgaaaaaacctatgtttacgcgatgtgtctcaattcccctgaagacacttctttatggatgcaacgtcacatcaaagagacggatttttgtaatcaaagaggaagattttcaagtctttacaaatcccaatttgggtcacgttcaaggcctctttgtatgtagttttcagcgtattgaattggttgctgacgtggctgtgtctgctcaacagaatcttttttcaatgtttctgtattcaaaggttcattacgaggctgagcaaaataattga

SEQ ID NO: 70068 - DNA, 1302 bp, Acinetobacter baumannii
atgggtagcattacatcttattgcgtcaaagttataaaagataactttaaattattaacatggcttcaaatcttcattatagccattgcacctaactttattttctatcaggcagctaatgctacgaccgtatctgctgaaggttggtctgtaactaaacgacttgtacaaggtgcaaccacattctatgacggggctaaaaacgtagttttaaatggtaaaaactatgcagccacgggaactgctgcaattactccgactgcttcacaagtttcaaagatgatcgtaagaaccggtgctgttttggcagttgatttagctattaaagctttgattggttctgttgattacgtaatggaccctgcgaacaatcgtgttatttatcatgagcaatctactgattatatcggtacgaaagctagtactcagggtgtttatggtacttcggctatgaattcctgtgtgaattggaattctaatcaacagacgagaaatggcggaaattataggtttcaagctaagtctgtttcactgcattctgttgttaatccatcgtatcaatattttttgtgtaattaccagttttcttgggatgctggttctacttgggtttctgataaagtttctggtgttattgagaatttacagcagcaaactactgaagaaaaatatttaccctatgacgctgttgcagctaaagtcatttccaatgctgaagctgaaaatactgatgctaaagcatacgtttcatctgttgctgatactgcacttgaagatgaacaaagacagattgttcctgcaactgacataactcaacaacttaacaattctcaagctattccgacttcaaatactgcacaaggtcaagccgtacctcaaacaaaacttaatgaccctacagcacctaaagcaccaccgactgacataacaattaattttccagtgttctgtgagtgggcaccaactgtctgtcaggctgctcaagcaggcattaattatgtagcttcatatactcaagatgttgatgcattaaaaaaagaatatggagataatccaaagtttgatgataaaccgcttgaatttgataaagaccctgcagctccagatactacaatatcatttggtggtggttgtccggcacctttaaatgctccttattcttttatggggatttctggttctattgagattccatttactccattttgtaaaattgcagaagtttctaaacctgtaattattgcagtttcggcctattttgctgctcttattattggcggcattagaagtggggatgcttga

SEQ ID NO: 70069 - DNA, 516 bp, Acinetobacter baumannii
atgtcctttaaatctatccaaatgtcttttgatgagtatgtattgaaatatgattcattccctgatcttatttttatggggagtagattttttaataatttctttactgaagatagtaatttaagaaaacttcatgacgtccgtaattggaaagtcttaaatgatcctattaagaaaaattatgaagttcttggatgcaaagtaattctcgtcaatgatgaattttataactgtggcttttttgaatttgatgatttagaaagagctaaagattatatttttgatagtgattttcgtaaaagtgaagatcgtttcgctattccgaagaacatagaaaattcgtgttatagctcatgtgaacctactcaattacgttctatcaataatattttaaatattcctttttctgtcattgatgccttcaaactggaaaatataactaagaaagaaattgaagaacgaaaacgtaatttccaaataataaaaggcatctatgaacctgaacagagattttag

SEQ ID NO: 70070 - DNA, 387 bp, Acinetobacter baumannii
atgaaatattttagaaatcaaaaaactggtgaagtcttttcatttgatgacgatttgattgaaatgaatgctgaagaagtagatcgtcacattaatccgcaaaaatatctttcagataaagaaaaagagcagctgcgtcttgcagagtttaaaccccttacaagacgtcaatttaagcttgcgttacttcagtaccagttgttagaaaaggttgagcaagcaattgcagatattgaagatccagcgctaaaaacacgagttcaaattgaatataacgaatctgaaaagtttgaacgtgcaaatgattcagtcaaatatatgcttactcttttagatatttctaatgatgaaatcgatgaaatgtggcgctatgcaatgtcactttaa

SEQ ID NO: 70071 - DNA, 237 bp, Acinetobacter baumannii
atgaataaggttaaaagctatttagaagatcaattgtctatattgaagtttgatcttgattttacaatgcaagaattttatgagtcaaaagaaatcgtagcttttcacttgccgtcaaaaataatagaagcagtcaaggaaaatattattgaagatggcataaaagatgaagttgaaatggctttgttgcacaaacctatctgtaaaggctttttcagcgatataattttcaaatga

SEQ ID NO: 70072 - DNA, 2088 bp, Acinetobacter baumannii
atggctgtagtaatacggcctttaatttttggtgttcttatgacagtttctatttccgagcggcttagtcctttgtatgaaggaaatggcactaatacgcgttttgattttactttccgtgtatttgaccaagaagatgctagcggtgtttctgtaaagcaccaagttgatgctgattttgaaaatatagatgaatctctttatacagttgtaattaatgaagacaatttgggtggatacattacattttactcaccgcctaataatggatttgagttctacatagcaggtgaaacacctgtagatcaacaattagatatcacgaattatgataatttttatcctgatgctattgagcgttctttagataaactcactgcaattcttcaggagtgggcgcactcattagctttggaaaaaatctctagagaaaaggcactagagttacttaatattgctattcaagagcaaattagagagcaaggtgtagcacttgatcagcttgaggattattacaactacttgatgcagcggttagctcagatcgctgcagataaagggtgggatgcttcattcgttgttgatggtgataagaatcaaaaacaaattaatgcagagcaacaggtagttaatgacggcattaaatcgcgtgatgaacttcgattactcaacccgccgagaaaagggcttcgagtttacttggtgtctattcatgagggtttggggcttggcggtgggtggttcatttcaacgcaaaaaaacggacttgtggataacggtggcacaattattgcaagctcaaatccattgtttttttgggtacgtgtcgattgcagctacttaacccctgagatgttcggtgccgatggttttagtgatgattatccgtctattaaaactatgtacgcaaccttaccgcgcataggtggggaagtaagactaagtagattttataaagtatcaaaaggagtgttgatacccccgagatcaaaaacagtcggtgtgggtcgagatgcttgtggattcttaaaaacaacccatgattttgaaagtgtgccggacagagtttggcagggtatgactcgctcttacaatatcgactatctagttgctattgatattgatagtgacccccatggcaatattgatggagatcaaatccgcagcacaacattaagagacttttcagcgaagtgcattgcgccagtcggtgtcgccagttacggtttgtacacatttgaagtttatcatttcaatatggaatcgctgactttcgagaacgtggatgtgggtgttgagtacgaaggttggttagcgagaatgctatctgtttctgttagaaattgtcgaatcggtttgcgtgtgccaaacggggggacaagcttacattgtgataatttttatgtaaagcacgccagtgaacgtgcttatgacttgaacaatctaacatacagcacatttacaacatgctgcgcagacttctgcgaagatatagcatatagagttcacgggtgttttgggattgtcttcaatggctgtgggtttgaagaagttaaaaaccatgacttatacatcacggattcaaatattgtgattaacagtatgcgtggtatgaacaacccctggggtgcaaataccgtatctactaagtacatcaacaactcaaaagtaatattcaacggatgtcattacaactattatggtgtgacaggaaataatgggcgtaagccatgggagattacaaacaatagtattatcagtcttgtgaacacaacacatcctgctaaagaaaatatgccaaccgacccagataagtatgattttggatcgggtcgaaatattgtaaatattacgaatgaagacggtgtatcaacaattgtcggtggttctggatcacaatataaaggtgtgatgaataatggtattttcacagttatttctgattatgatgctccgacatttgcagtcccgttgttgttagatggtactcgttggaatcggaaagtccccaacagtggcggttactacggttgggttttcaatgctgcaactggacaatggctttctatctcaaaagtagttgtctga

SEQ ID NO: 70073 - DNA, 1032 bp, Acinetobacter baumannii
atgaaaaatcatttccttgtaaaaagagattcgttgttcttttggctcttcgcattgatatttattcttgtagctggatttaggggagggactagagatacagacgtttataagtatgtatatgatcatatctataactttcctttaagtagtattggtagtttttatgatgcaactggtatggaaataggatatggaataatatcttatatttttcaaagctttgacttttctttttctactctattattactcttttcctttttaacatttctatttttaaagaagacatcagataatttagagattaacgctttttttgtcatactatgctatttgcctgttttttatgcaaatcatcaattaatgcagatgcgacagggttttgctgttgcagcagtttattgtggtatttcttatattatattgaataaaaataagttattggcttggtttctttttttaataggcttttttattcacaatgttgtttttgctcttatcattactttttttaaatacattaataacctgattaatactgaaaaaattaatttttatataaaatctattctatttgtgataatagtttttctgttttgtagattaattaccgattttgggttgtctgcactgacggatcggattggtaactattcagatacggactattctgagcaaagatccttttttcatcctgctaatattaggtcggttttattgctttttatttttcttatttttcgttctaaagtaaaaataaataaaatttatgattatttggttttactttattctatagggttaggttttcgcttaggtttctatgattttctaattcttagtgggcgtatttcaacattgttcacgttttctgaaatttttatcgttccttttttattcaaattaagattgaaaacattatatagctatatagttatattgctatattttcttatcaatttatatattaatctttattatcaagttccttttgtagtgcacgattattttaagcagattgggtcttaa

SEQ ID NO: 70074 - DNA, 1002 bp, Acinetobacter baumannii
gtgaaacaaaaaattttattttatttaccagaaggatctatcaatgatgctacaaaatattatatagagattttggagtcatctttttcagatttttttgaagtcgtaatagtaaaaagtttaaaagaacagtcaaatgtaaagtatattcttactatcgaggctaaacatttttttttggcaaagcttaaatttcctaaagctaaaataatcaattggtttcagggagtagttgctgaagaagctttgatgacgaaaggctccttatggcgtaagtacttgtgggctttttttgaatcttttactttaaaatattcatttttcaatatttatgtctcaagacgcatgaaaaaatattttgaagatacttatcatataagtagttcttttttttatattatgccttgttttaataaagatttaaacttagaattaataaataaagaaaagtatcaatatcccacatttgtttatgcagggagtttggctacttggcagtgtgtagataagacattagagttatactctttgattgaacgagtccttccgaatgcaagtttgacattattaactaaagaaaaagaacttgcagaaacaatgattaacaactataaaattaaaaattactctattaaatatgtaagtttagaaaatctagatactgagttactaaaatataaatatggttttttaattagggaaaatcatatagttaataatgtcgcaacacccacaaaaatgaattcttatttagctaatggtattatccctatatattcatcatttattgatgattttaaagttaattttaatgaatatgattttattgttgctaaagaaaaaactcaagatgtactaaatgatattgtaaattttgagaaatatggtttcaatcgtgaagttttcttcattaatttgagcaaaatatttgatacatattataatcgggaaaaatatgccgaagaattatctaaatatattggagataatttgattgtatga

SEQ ID NO: 70075 - DNA, 435 bp, Acinetobacter baumannii
atgagtggatataatcttgaacaaaaattggttataggtctagcttcaagtgctctttttaatttagaagaatcagatgctgtcttcagagaaaatggagaattagcttaccgagagtatcaaagaagccatgaaaatcaaccattagaatcaggtgtcgcctttccatttattcaacgccttctaagtttgaatgacatttttccaccagaaaaaccatttgttgaagtaattctactttctagaaatgaccctgatacagggttaagagtcatgaattctattgaacatcataaattaaatattaaacgtgccatttttttacaagggcgtacgccacataaatatattaatgctcttaatattagtttatttctatcagctaacgaaacagatgtgaaccaagccattaatgctgggcagagtaaaacttga

SEQ ID NO: 70076 - DNA, 345 bp, Acinetobacter baumannii
atgataatttccaatcataatgatcatattgctggtaagtatttcaattatttaaataaattagcattcttcactattattcctgtaaccataggtttattcttagcaaaaaatactggtaccgattccttttttattcaaaaaatggctttttctttcttaattttaagtttattttatttagtaacagattcagatagaactattatagcctataacagaatagcaaaagaatatgtgaaagcataccgaggatttttaggtcattgtactcttatatataaaacatttatttttttattgagctttgcttttttaggtggaatagcgataggttttttctaa

SEQ ID NO: 70077 - DNA, 1986 bp, Acinetobacter baumannii
gtgaataaaagatattcatttttgttcagtagtttattagcagtcggtttattacaaggatgtggagatgactcctcgtcagatcagcccaaggatgattcaaatacaaccccacccaatttaattgtagataatgacccgaccagttgtagtaaattggcacaagacggttcaagcgtggtggtcggttcaaaccaaaatggtgaccccgccgcgccagagggtgcatcgggttataggctcggtaacacggttaaatacgcagataaatatatggtggtggcaaacacgccacttgcggtaaaagcaggttgcgatgtgttaaaagcaggcggtagtgcagtcgatgcagccgtagcagtacaagccgtgcttggcttagtggagccacagtcgagtaccattgccggtagtggttttatgatgtattacgatgccaaaaccaagcaagtcactgcctatgatggccgtgaaaccgctccagcggcagccaacgaatattatttaattcgccaagatatatatgacccaaattcacctgcacctgtaccaagtgcccgccgtagcggtcgctcgattggtgtgccgggtgtgatgcgtttattggaacaagcacaaaaagagcatggcaaacttaagtggaaccaactttttggtgaagcgattggtttggctgataacggtttccgcataccggggcgtttggcagatgccattgcaagtaatgcaagcaatttagcactcgatgcaaatgcaatggcgacttatttctacccagatggatcaccacgtaaagtcggcgagaccatgaccaataaagcctatgccagaacactcgaagcactcgcttcacaaggggcaaacgcactacacactggtccaattgcgcaagccattgtggcaaaagcagggcaaaccgtgggtgatgacccagcacggactccaattatcccaagcttgatgaccttgcaggatttatcgaactatcaggtgaaaaaacgcgacccgatttgtacgacgtaccgtgaccgttactatgtatgtaccatgccacctccatcttcaggagggattgcggttgcacagacgttgggtattttagaaaactttgatatgtcgctttacccacctaaaaaccctgaaaatgaaggcggtgtgccagatgtcatgggcgtgcatttagtgtctgaagcagagcgtttggcctacgccgaccgtgataaatatgtggcagataccgactttgttcatttgccggcacagggtattccaagttttattgataaaaattacttgaagcaacgagcagcactgattaacccgaaccagagtatgggcgttgcaccagcaggtaatttcaatacagcggcaggtgtggacaccactgttgaacatggcacaactcagttcacgatagtagatgcctatggcaatgtggtttcaatgacatcgacagttgaatcgagcatgggttcatttcacatggtggatggtttcttgctgtcaaaccagttaactgactttagcgcgaacccttttgacagcactggggcaccagttgccaaccgtgtagaaggcggcaaacgcccacgtagtactatggcgccaaccttagtatttaaaggcaccacgccagatgaattttatatggcaacaggttcaccaggtggcggtaccatcattcaatatgtggttaaaaccttggtgggtgcattagactggaacttaaatgcacagcaggccacttcgcttgtaaattttggcgcaaccaatagcaaaaacaccaatattgatagctcgaatgtacagctttccttagttgacctgattgaaggcttaaaagcaaaagggcatggcatatcgaacactgcgcaaaccagtggtatttcaacgattatgaaagtaaatataaataatcaaagtaaatacgcaggtggggtagacccacgccgtgaagggatcgtgttaggcaatggtgctttatag

SEQ ID NO: 70078 - DNA, 720 bp, Acinetobacter baumannii
atgaaaaatgaaatttgtaaatttattattgatgtttgtgggtatatagcatcaatcattgtcatctttttctttttcactctttggctattttcttataatcaaattaatgatgcattgaaagaagcttggaattcaagcatatcattatcttctgcattagctactattggtgcagcaattattgcatcaaaattgtataacgactggcgaactcaacacaatgcaaatttagaactcacttatataagtgagatattatcttctttaagaaataatattattcttatggcacctattctaaataaattaattgtatctggtgagaaatatcgacataaagatttagtcacaaagatagaaattgatgatgaacttttagatgaaatttattctaatcacaaaaaaacatttcttttatttaaagaatataattatatcttcttggatgacagcaactacttattgtttttgcgtctgcttaatatcactgaagaaggattaaaaacaatattcaatattaaaaactcagaaaatgatatagataaattaaattatattactcaacaattaattcgggttcctttaccctccaaagtgaaaaaaggtgttgttactatctacactcctgaagatttattacctattgatatatatggtcaaatagaagttttttacatagacttggtcaagaagctagcaaaaaacacttttaaataa

SEQ ID NO: 70079 - DNA, 351 bp, Acinetobacter baumannii
atgaatttgcgcgccgcttgtactttacgaccagatgacccaagactagcgattgctcttaatttgcgttctttaactttgcaaactgggcatgcacttaaaacgtcgatgaatctatcggaagatgaaatcgccgtgattattggagataccgttactcagactttattcgatcaaagtaaagagaaaattgagtttgttgatgaagatgaaaatcatccagaacctatttttgatgcttggggtgaggactgcgatttacctgaatggttacatccattatttacggttgaaaaaaatggacgtaaagttttagatcaaaaagaaacgaccatccttgcttcaccatga

SEQ ID NO: 70080 - DNA, 1575 bp, Acinetobacter baumannii
atgatgagtagtgatttgattttagatgaagttgatggctatgaacctaaagcattgatcgctgttttgcgcttagtccagttagctgcaatgtatggtcgaaatgttatttgttcgtctgcaaccttatcacttacagttgccaaaacaatacatcgggcttttgagtcgggtatacagatgcgggcagccctttatggtaccgagaaaaaatcaatcattgcgattattgataatgagcttaaaccgcaggtctggttagaacgatcaaatcaaaaatcagaatttaatacaaactaccaaaagcatttagataatttacaagttcacttgctctctaagcctacctatcgactggctcagttgctttcgttacctgaaactacagttttatcgtggaaacagtcagtattggaaggagtaaagcaacttcatcaagagcatgcatggaattttaaaaagaccgaaaagaaaatttctttggggcttatacgggttgccaatattaaacatgcaattcgacttgcccaatttttatcagatcatttacctgaggcaaaaatagcttgttatcatgcgaatgactggcttatttcaagattttataaagagcaacgtttagatcagcttttaacacgtcataaagacggtaagaaaagaaaaactggtaatgagcagatcgaacaagataatgaaattattaacctcattcaaaaatctaattctctaaatattccatttattgtaattgcaacaccagtggaagaagtcgggcgagatcatgatttcgattgggcgattattgatgcatcaagtgtgcagtcaattgtacaaacagcgggtcgtgttaatcgtcatcggttagaaaaagtacagcaacccaatattatgattccacaatggaattatcgttattgtgaacaacgtgatattgaaaaacttaaacagcaaagtaagcagcgtcgccctgtatttatataccctggctatgaaggatatggtttatcggtaacatcaacttattcatctcaagatttaaaagagcttttgccgtgggatcatcaatctcaattaatcgttaatgctcgattgcgttttgaccaagtgggttgtctatttgctaagttagatgatgagcaaatcaagaatttttgtaaaagctattttaacgatcaaggggagcagttattttctcggtcggatgtagatgcaagtatcatgacagagaatatttataatttaacgcctttacgagaacgtaactatcaagaaacctatatgtttgagtggactaatagcttgattgttaaaaaacaagtttatggttttgatgaaaaagcgactaaagctttaaaatatccaaaatatggtttggtatgggaccaagtgaagttcgaagaaattcctgctaagccacaagcatggttagctctcgatccacaacaaatgaaagattactgttatgagtaccaaattgccaatgagcaaggctgccgtatatctttaacaccttacaatagagatgaagtgcctacttggtcttatgattatggctttggcgtgatgcaaaaatag

SEQ ID NO: 70081 - DNA, 387 bp, Acinetobacter baumannii
atgaataaaaaatatagtgtttctgctcaggaactttcacgtcgtttacgacaacaaaaaaaagaccttctaaacaacaaaccaacgaaaattattgaacctcaatatgtacagggtgttcatggttctactatgcaattcggagtcttagtccataattggcgtacaggttggaaatggtttagtaacgttgcctttgctggcattgtggcagttcaaactttttatgacacattgccacctgaattaattgcgacattaccagcagacgcacaatccaaaataactttaggtttggctgttttggggcttattggtcgttttattaatcaaactaaaccaactcctttgccacctgcatccgaaacgattaaggaggatgcatga

SEQ ID NO: 70082 - DNA, 519 bp, Acinetobacter baumannii
atgtcaaatactcaacaaccgatattaattgctggtggtggcattggcgggtttgcagctgcacttgctttggcaaaacagggttttaaggtgcaggtttttgaacaagcacctgaaattggtgagatcggcgcaggaattcaactagggccaaacgcatttcatgcctttgatgcgctaggaattggtgaaattgctcgcagtaaagcggtctataccgattatatggtcatgcatgatgcgattgatgaatatcaggtcggcaaaattccaaccgatgaaaaattccgtgaacgtttcggtaacccatatgcggtgattcaccgtgccgatattcatggttcattggtcgaaggtgcaaaacaatacggcaacttggaaattatcactaattgtcatattcaaaaagttgaccaagatgatgctggcgtaacaattaccgatcaaaacgggaaacaatatcatggtcaggcacttatcggtgctgacggtgttaaatccgttgtgcgtgatacctag

SEQ ID NO: 70083 - DNA, 270 bp, Acinetobacter baumannii
atgtcagcatttcaaactcttacccgccttgtattaatgcaaaaagatgatggaaagggcgcttatatcatgttttttggaaacaataaaactgaagaaaaggccaacgaattaattgatagctggattgcttcaggagtaaatgaattacgtgtagttaatgcaacagacgaaattaaggtacttattaagccttttgaaaatggttcattggtaacgtatcaccagaattacgatgaggcttataacgctatttttccaaatggataa

SEQ ID NO: 70084 - DNA, 612 bp, Acinetobacter baumannii
atggttaatccaacacaagaccctaaatacagttgggtatatcaagaacttacgaaaaatgataacggtggctacaatttagttaatagcgttgcttatataatttataagcaacgtaaaattgatttttacaaaagtcataatggaaatccgactgaagaacaagttaaaaactttcatgaaatttttttgatggaagcctctatagagggccttcggacagaggcaagtattattgttactcaaatccttcaaaacactcttgctaataaaattattgagattgaaacgagacttgaacaagaagactcggcagccatgaaaagagagcttgaagcactcaaaaatacagtttcacaaagccaaaataatttaaatagtgatttaaacactaaacatatagccgtaatgtctgagcttggaaaaattaatgaagaaggctggaaagcatggcttaaagaaaccggcaaaggtgtaattactacagtattggctactattgcgctttggttacttcttatcgccttaaataaagggcaatcgactcaagacgaatatacgaaaaaatatttaccaactggtgacgtgccagctgcttcaacccctaaataa

SEQ ID NO: 70085 - DNA, 282 bp, Acinetobacter baumannii
atgactgttaaagtgacaggcttcaccattgaagatgcgttagaagccaaaacgaaagattatcgttttagatattctgaatctggagttgtgcgtggcgatgtgcatgacgcggcagctggctcagttttaactcaaaaaaataaaggcaaagtttttagtattaaggttggaacctttccacgtacaaaaataggttctgaagcagtacgtgattttaatattgatttagacaccgtaaactttgaatttgatagagcaatgaaacatagtcatggttaa

SEQ ID NO: 70086 - DNA, 1104 bp, Acinetobacter baumannii
atgattgctctaaataatgcatgtcgccgctttatctttgactttaaattcggacaatctgccgttttgaattataaagatgctgagaaaatactcaatgagcgacctgacggcgctgaattttgggattgttctaattatggtaaaaactttagaaaacttactgaagaagagttaaagcagggtaatgagttatacccatatacctatgacttctggtgtccacactctaaagcttggatatctaaaggggtagcaacatgtaagccatatgaagagcaaacctttgtagtttttaagaaactagaaaactacatggcaatatataaaaattatttagccgaagttgatcaacatttaattaacagctgtttatttgacactattagtaaaatgggggcgatgattgagacaggtactcagatcattcaaaacggtttaatggggcgagagggttatttattagctgatctggaacgccgttttacagaattgaaagtctctttagaaaatctacaggccgctgaaccgggtgtattatgtgaaaagcgatatacattactaaaattcacagaccctagcgctattaaacgtcttcaacaacgtttagaacagcttcagcaagaagatagtcttatacgagatcaaattaagtatttacgtggcctgcaaagtgtaaatgctgccaagaaccttcaaactgttacaggaattgatattactgatatagatttgacagcctttgtaaaaagaattgaagaaggtagtgaccacatcaatgctggtattgtttatgactgcctaggggttcaaacaagtgaagatttttataaagcagtagataagttgattgaagcgggtattttagcgcggagtattttttaccaggcatttgatgatgaaccatatgacggatatcgagaagatatggctttatcggaagaaacctatgcaaattactgcaagcctgaccctgaaactggtgagttcggctgtccaatgacaggcgaggtcattactgaacaagagtttcatgaaaatatctatttcacttatagcaccacggcgaaatatgccgaagctgtgacgccgtactttagttaa

SEQ ID NO: 70087 - DNA, 483 bp, Acinetobacter baumannii
atgcattcgcatcttgatactgctttgaagcaacaaagtttttcccgtcatcttatccgtggtgattatggttcagcttttttaattacaggtttagagtggctgcctgatactttaaatctgcccgaagacgaaataattaaacaaacagatgaaaagtttatggcttcactcaatcatttttgtgaagagaataaaacagtatttgagtctgttagtgatgatgcaaagactaactttctagcgtttgtacatcgttatttatattcgaatccactacgtgaggggatttgtaagatactcgcaaaaagggcagcgttggcaattcagttgccttacgtagttattgataccaaagatatgaagccttcagataaacaagccctccttgattcaatgaaaaaggataaaacggcgattttgccaaatgatttgaaagtagaatttaagaaccttggggaattacatgattgctctaaataa

SEQ ID NO: 70088 - DNA, 1260 bp, Acinetobacter baumannii
atgaaatatctaactatgcctttagcgtgtcagctgctcaatgaaatgcctgaagatgctgaaatctatgattcagcatacgagaagttttttaaaactaatgacttcagccagctggttgcttggtcaccttatttaaataagtggtttatgtggttgcatccagaaggggagcacggcgccgattattggtcatgtacacaaatcatgaatacagctgcactagcggaaaaatatatgaataaatacagctctgattttcttaactggcattatcagcaatcattaaagctacataatctttctgattctgaagagagccgttctctctatgaaaatatatattttgatgaaacaaatgagggtgaacgcgaagcagagtatcgagtatggcaatacttaacagagaaattggatacatcacataagcgtgaagcagctaaaactgaacaaaatatttttctaaaacgtgaagtagaagagctaagaggtgaatgtaataagctgagggaccaacttcacagaattaagcgcaccgacaccattgatgcctacaactttgcacaggcattttaccgccgtttagctaaaacaaccgatcagcaattacctaaagaactccatgagttaggaattgatgctgtttacattcaagcaatggtcaacacggccatgggtgtatttgatttagttcgttgcgacgatttgtatgacaaagataagcgtcttgaatttcataccttgataaaaacccccacggagcttcttgatagtctagaaaatcagattaaacattttgggattgatttaggcaaagatgaagagcctaaaacattatatgactggtcaaaaatccctgaacatgtgaaagctatggcaaccgatgaggatggtatggcatgcgggtggctggtaccgccgcatattgttggcaatgcatggcgtaatcaatcccacttatctgcacatttctatttaacaaactgccagaatccctttagaggtgattggaaacagtctttagaattgcgacctcaggaagtacatacatttaaagccggtgataaggtttatgtagattttgagtctctaaaccgagtagagacagacggtaagcgtattcatggagtaggaacacttgaccgtgtagaagatggctatgcatttggtcgtttagaaagcggtaatccttttggttgtcctcttgcttatgttcatccatataacacgtggaataacacgcctcatgaacatgtatag

SEQ ID NO: 70089 - DNA, 243 bp, Acinetobacter baumannii
atgaaaaaacaggattttcaaattggtgacattgtggtgagaaccaatccagctgatctagccttgtataaagttgtagcaatcaatgaggataagactaaacgttatgaacttcgctctgcagctagaaaaatttcggtaccaaaaacagggttacgtattgctgcaacacctgagcttaaattaggtaaaaaaatggacttgcgtttgatcggcagccgtacaccacggggaaagctgtaa

SEQ ID NO: 70090 - DNA, 510 bp, Acinetobacter baumannii
atgagccagcaaacaaaatttaatcttggcggctggattcgcgccgtagatcagctgccaacattagccgatgcagatgatgcaggccatatatatcaaagtattaaaactaatgaagggtttaaattcttaaatgactgtcatttttcattgcttagatttgataaagatagaaatgctttaaatggtgatgaattttggcatccaaaaccaagagcaccaaagctaccaaatcaagcacctcttaccgatagtgatattaagggtagtgatgaagaaaatgagggcggtctttggtcatggcaacatcatgaagctgacagaaaacgcctagcagagctagaaaaacggttagagatagctacaagtaaatggaccgcattaacttctatagcgacgacttgcccaaatcaattacctgatgagttttttaaaaagttagatgaacttcatgatgctttatgtgggcataaagtagagcatgaaagcaaggggacggcggaagcatga

SEQ ID NO: 70091 - DNA, 888 bp, Acinetobacter baumannii
atgaaagcgacagattttataaaaactgaaggggttgaaacggcgagtacagtagttaaagaggcgctaaagggcgccacttactacggcgacaacaatggcaacccactttattacaagtttgaagatgatcattggtggtttttttcagaatctttaaacgattgggccacaagttcaattaattatggtgataaaaacatcttagaaactttggtggaaatcctagaccttaaaaaagctctctatgcgattgagaaaatcgaatcatattcaactacgaaaggaaatggtttggctcaagctaaagcacatcgtgaatatttgatttcatatggttctgaatttgcaggggttagcacgggcgaaatagaaagccttacagagtggattgatatatatacggccatctttatacctgagcaaatacctgcggcccaattcattaaagagaactcaatggagcacgttaaaagtgtaattgagtggtatgaggctatatcgccccaatatggtttaggtcctgttgtgaatgttgcgggtgtattcgtaaacgttgaagaaattgggaaaatcgtatattcgattcaacaagttgaatcgctggctaattttaagttcaagggtgtaggcaatggttttgcaagagctaagcacatattagaacaagcacccaatgacgcagatgtttatgaccgtttcagtagcaaatatttttataacactagtagctgttatgactttgctagatgtgaatgggttgctttggataaagaaatagaccgccaactttacagaggttttatttctatagcgcaattaaaacaatgggttaatgactatatttcagtgtttggggaaagcaatgagccagcaaacaaaatttaa

SEQ ID NO: 70092 - DNA, 741 bp, Acinetobacter baumannii
atgactgtagctattcaacaagctgaagtacgtaaaacccttgcgatgatggtacgaggcgagacagtaacgatagaaggaattattgattacacgattcactttgatacagctggttatttcaacgtgaacggcatacgagtaagtaaatctctaaaagaaactgtttggttcttttggcatttcaattggaagtatatgcgccgtaaagattcagtgatgcgtagatattggaatggtcgcccattagatatcacaaaatactttcctcaagcggtacaccctgatgtgtttgaaaagttttctgaaaaaaataaagcgcttgtatatggaaacgctgagccaattcaaaactattgccgtatttgtgccgccgtgcgtactgatagtccgagaacgcatcacaaagcttgtcctgagtatttagaccaagacacatacccatttaagcaagagtataaaaatcctcttgggaagtgccctaattgcgcttctgacgatggtttatcaattgatagtagtcgtgaaatggcgctctcatttattgattgtggcgactgtggttttcgctatgaagcaaattgccctgaggatgtcttagaaaaacgctttaaaaagctctatcaaaagcaaaactgcgcgactgatgaaaatactgcagctggttacacatgtgtttttgatttaagtgaatcgcaatgtgaatcggtcaatacatttgtaaaggcgccaaataaatga

SEQ ID NO: 70093 - DNA, 702 bp, Acinetobacter baumannii
atgaaaaatataattgaaaaattggggttagatgcttctgtatttgaatctgagcaagagctaaaagactatttgtttgaagtggtcgagtctgcgccgtgttgtgatattaatgatttgtttgtcgaactattccctgaacacaatcattatcaatattttgccgagacagagcaaaaagacgggcctgcaatgacttgggaaagtgccggtttatacggcagcggccattggataggcgtagatgacggttacccacacaataaacgtttacacagcaagccatatattaagctgaatgttattagcattatggtccgtggcatcatcggccataacctgtatgaattgcgccgtagatcagctgaaaccattgatgaagtagcggcaaaaactgatttaaacgcggagttcattactaatttagagaatggtagcgaaatcaacccgactctaaataaccttaaaacactcgctaaacactttaatacaagtgtttctttcttagttgatgagtctgaaacacataagaatagcgaacgttacctatggcttaagcatcatgctcgaaatgtaaactggctagaggaagatggcacttatcgatgtgaaagaccggcactcgacttaaatgtcgatcgggccattaaaaacacagctgaagctctcgcaaaacgtttatatgacgcgggggcatactaa

SEQ ID NO: 70094 - DNA, 594 bp, Acinetobacter baumannii
atgaacgtatttgatttagtccgtacctacggcgtttatgaagctgacaagctttatcacgatctaatgaaatatcaaattcctgatgatatgaccttatcggttattaataatgtatgggtgcggtcgcctgaaggttttactgttggggaattaagacgggttcttaagtctatttctattgttaatgagcttggtgggcaaactgaagcacatagagctttatataacatgcaaaatagaaacactttttatataaatctacctggtaatacatttattcaaaaagcgatgttaagccaagcgttacgtgacgttaatcgttgctatccggttatcaaaattgcagtaacaaaacgccctgtttctgaatgggtattaaaacaagcaagtaacgctcaaaagatgattacagctacgccgttaatactaaaacctgtaatgatttttgctctttcttgggttgctatttatctaataatttttgaattgccttttatttggcggcgagcaagaaagcaacctaaggtttccattgaagaagaccaagagataccactcagctttaaagaatttaaacaggatatgaaatga

SEQ ID NO: 70095 - DNA, 405 bp, Acinetobacter baumannii
atgatctataagtgtcaagaatgtgggaaacgctttttctttttaagcagctatgcagcacataccgatgggcatgcacaagctaagcgtgaagcaagatttgagcgtgctaaacaagaacgtttccaagtaaatagagagcgttattcaggtagtaaaaccagccttaataatagtgatgaccagaatcaaactactctcaaccaaatgactttagcccctttgtatcaagctgaaatcaatggccctacagaggttcatggcactgcagtcattcaaagtgattattgcaatacccatacaagcgtagagagcccttcatactcgagtcagactgaaagctatacaagcgatagcagttattcaagcgatagcagctgctcaagtgattcgtcgtactactaa

SEQ ID NO: 70096 - DNA, 738 bp, Acinetobacter baumannii
atgaatcaggtttgtaaaaatacgggcaactggctggaaatgtgtgaatccctttcacatgccgccgtacaacaaaaatttggctttcatgagcaagtctttagtcatcaaattcttggtttaaaacgcttatcgattgcagtcggtaccagcgggagcgataaagcaattatttctcattgtcctttctgtggtaccaacatcgctacagatttcgactatgcagcttttatacgtcaatttggtgtcgatcgtgcgcgagcaattttatatagcagccagaatcgtgatattgacaactggtatgacgaagaaactaaaactttcactcagcacaaaaatggttctgaccagcctttaattaatgttccctctatctcatatgcttttgctgcaaccattatttctcaagcaggcggcgtagaaagcgctagaaaaatccttgaggcggcgcctgagtttgctgctgttgtggttagagcgtattggaatgatgccactgacgaatatcacaatacttattacacaatgcgcgacggcgttgtagtgagtgtacgtaacggtattgaacctattggcatgaagtttcactcatatgaagccatgttagacaactggcgggaaacatataccgacctaaatgaaaacacccttctaactattaataaagtctttcacattgagctgtctgacatttattacgcattaagaatatgggatgaagaaaatgatctataa

SEQ ID NO: 70097 - DNA, 597 bp, Acinetobacter baumannii
atggaaagaaattttaagacaggtttagctctcatagctgccttaggtgatttggtcaatgcaactacatgcttaaagtgtattgaaaagcttgataccgccacttacttcactttttatgggtttgaagttcaagtttttaatgaaatcacaaaagaacatggtcgcaatgtttatcgtgtagaagacttacgttacgcactaaacaattacgaaaagttaaaacatgaagagcatatacgctttttacgttatcgctttggtattgaaaaactacgagattgtttaacgaaaggggcatcatcatttagttattttggcatcgagttcaccattgatgacgttaaagaggctattaagttagtagagacggaactattagagtttgtgggtgaccttaatgaaggccatcgcatattagataacaagcctgctacttctacgcattacgatttaaatagtaaaaattacgtccgatatgattgcggatggcgccactatgtaaattaccgttggctcaaaataccgcgtggtagtaacccgaacctaattgatttggctgaattaaatcatgcgttgcagggagctgtagcatga

SEQ ID NO: 70098 - DNA, 369 bp, Acinetobacter baumannii
atggctgtaaaggtaaaggtttcacgtaaaccaagaatcacgaaaaaaattaattctcgggctgcacaagtccttatcaaattgggggcggctaaacagtcaaactttggttatgacgaatgccccgacaaacttatgttttggtttcgtacaggtgaatgggattctgaatgggactgtaagcctgcatacaactttttggtagatgtcatttttgatgagatacacggcgttttcgatggatatgtgccgccgtttacggacctagcatatatcaacacaccacaacgcatattcaagttagcaaaacatttgtatttagcgaagcgcttgcgtggcgaattgcaattagaaagatttagcttttaa

SEQ ID NO: 70099 - DNA, 477 bp, Acinetobacter baumannii
atgtcacttgagaaaaatttaattgaattacttggggtatccgcaattaattctgttttgaataaattgcaagaaaaaacagatagcacttacattgcttttcataaacatcaagctactgcaattatctatgacactagcgaacgaatcattaaagctgattttcaagatggccgagggttcatccatacgcgttataaatccattaacacgcttattagtgacctagctatatcaaattacacattggtcaatgcaaaagttctttcattagaactgaagctatgtgaagccatggaaaacaaccctcaagctagtcaaattcaagaaattgcaaagcaaattaaaggccagcgtgaagcggtcgccgtacgttctcaaaacgttgaagaacgcagtgctgaatattggaagggtcaagctgaagcgtatgaaacagctctacacatcattcgaggcgtaacaaccgttgcttaa

SEQ ID NO: 70100 - DNA, 2031 bp, Acinetobacter baumannii
atggcaataagagcggatgaaacgggctttttaatcggtgaaaagcggcttaaacaaatggccgacagtattgatcaaaccaaagacaatacttatgaaattctacaagctatggtaggcactgttaaggaagccattgatagcgaacgtaaagatattaccgatgctattaaagaggtaaaagaggcttatcaagaaggtaataaaacggcgcaaaaacaggccaatagaatattaccgaatagtacggcgccagtacgtatcatcgatactgatctaccaaagagtgactataaaaaggctcgtgacgcctcagaagcagtaaatccaagtagtgccgagtatagagcccaaaaacagcgggaacgagataaaaacgggcgttttgtatctgctgcagctggtgggaaagataagagtttaatgcttcagtttaaagaagtgttaaacgtacgtcctgaaggagacgtaagaggctatgacccgactatagacgcattaactgagctaaaagatatcgttagcccggttggtaccgttttttctcatatgacggccaaagctgcaaatctatttaatggccgtgctcgtaaaaaacgtaatgatgaggttttgcctgaagaacaagtaaaagcaaatcgccgtgaagagaaaagtgataaggaacgaaataacttattgcggcggttaattgatgctgtacgtggcaataataaaggagcagctgcaggcgggttaggtgttactgatctaattgggttggggaaaggcaaaaatattgcaaaattaggcaaagggattttaaagagattcccattaattgcagctttagtaggtgggggaatgcttgctaaagattggaatggcctagattctggtggtaaaggtaagggcattggtgaaattgcagggggcatagcgggagcagctgcaggctcactctttggccccgcaggaacccttttaggtgggggatttggtgcatatcttggtggtatttttggtaagaaagttggtgaatggaccgatgagttaaaggatattgatttttctaaactgtttactgattttctaaaatccgttgcaggaggtacagccagccttgtaacacatccggtacagactgtcgggggctggggtagatcgttatacgataagggtatgcagggcctttatgatatgagtgggggagctgtaggcagtgatgtcaattcaccaataggaaagaataagactgaaaaacaactagctgtttataacgctatgaaaaaagctggttttaattccaattgggcggcagcaatgactgcttcgataggccgtgaaaatgactatcgtgatgaatatctattcggaaaacaccaggataaagcaggcggtattaatcaggggctcatatcatggcaaggtgcccgccgtgaccgtttaaatgcctttatgaaacaacgtggattggtcgataacaatggaaactttaaaaagggccaagcttcgttagatgctcaggcacagttcactaagtgggaacttgaaaatgaccctgcatttgcgcctgtacgggaatatatgaagaataaccccaatgcatcaaaagaggatgcagcacgcgtattaggtaaaaaatatgttaaatgggcatacggccaaagcaggttaagaaatgggaagtcttttgattggaagccccatttagctaaagaatacaattatcgtaataaccttgataaagcaattcaggaaaatggtgatgatgtagctggttcagtcaaaccgggtgtaagaacagacgtacaagtaccctatgcaataaagccaaagactgttagcgccgttaatacaaaaactacttcagatcgcccaaaaccaataaaagtaccaactattaaagacctgaagaatgagagttccaaggctggtatgaagtcgccaatagtaattaataaacaagatgcatcaattacacaaaacgtatctgatcgtgggttagcgcatgttttagggggtggtattggctataagagccaaaattaa

SEQ ID NO: 70101 - DNA, 942 bp, Acinetobacter baumannii
atgtcgaaaactgaaacgaagaaaagcaatacagcccgatattctgaggaagtttgggcatgtattaaagcagtatatgaagctgacggcagctcaagcatagatcgtctacttgagattgtacggaacgaaacacagatttttgatctaccgtcccgaccaactgtactcgccagagccaagcgtgaggattgggtgagagcggatggactagctaaactatcaacggcgaagctaaccaagatcgttcagcgaacgaaagggcatttactactaattggaggggattcagataattctgaagaagatgacagtgactttcaacagggttcagagcttgatgaatacaatgctgatcaagaatatttacgtcaaagagagtcaatcgtaaatacttcagtaagtggagtcaaaaagttactgtctagtagtattcataagaagaaaactacagctgaagtcattaagcgcgggcgtgctgcaacagatcgcatacacctactttacgcccatacacttgaccaaattgtcatagcaaaggagttaatgacaaacattcaattcaagctaatggctaaagaggttgaccgtaataatgttgaagctgcatataactttaatatgagctttatggaaacccttgttaattctgttgccggttacgacaaacttttaaaggctgatttcgccttatatggtattacacccaatgatacgaaagagcctgaaactggtacccgtatgcaagaccttaacgatgatgctgaatacgaagaacaagttaagcgattgcaagaacaaacagagatggtcaaatcacggcgtatgtatattgagtcaggacaattgcagaaagaagttactgatgaggtacataggcaaatggaagccatggggctaaataacgatgtcagtgatatggatgatgatgaggaagagtaa

SEQ ID NO: 70102 - DNA, 672 bp, Acinetobacter baumannii
atgtcagaaatcacaacttttagagattcagtagataaagaaaaacttaataaaatgattggggagaattgccgccgagctcgcgaatggactggctattcaagggctgttgccatgcgattaatttttggttacacggatgaaaaacaactcaatcgtattgttgagttagaaaaaggcactaaaccaatatcggcacaaacactttataaagttagccttgcatataagtgcagtattgatttcctgtttggtattagcaatgaaatcgaacccgatctagcagcatcgcataatggcctcatcctcgacacaatgcgctgtactgcgttagaagcggctgatcaaataagtttagctattactcagacaatgaaacgtctgcctaaatttcaaggggcaatgctgcatgtggcagcgaaaaatcttgtgaaagagattaataatcacaagcatgatatggcgtttgttggtctataccctgatctaatccaatccgctgccgatcttgaaaaccatgtaagagcctttgaggtgatgatagccaagtatcatagagctcttgaacttaacatgattgagcagatggaaggatttgaaaaaatgaacttaaatctgcataaggacagggtgccaaagcctctaccagctcacttatcagatgaaatttaa

SEQ ID NO: 70103 - DNA, 471 bp, Acinetobacter baumannii
atgacttttcgcataaaagcctctgcaaaatttaaaaccaatattcccgctgtaaaaacgcccaaagcgaagaagacgcgccgttcggcgttagaacgcagaattatgggtttatcgcctttagaagatgaaatacaaatccaaattattaaagaatgtgcctttttaaaatatcaaggcttcaaagtatctgaattgatacgtcatattccaaacggcgggcttcgttcaaagacagaagcagcgcgttttaaagaaatgggcgttattgctggtacgcctgatcttttgttacctgtagcacgtgggggatttagcgcattatggattgaattgaaaagtgaaaagggacgcttacggccagaacaagaagttcaaataaaattacttcaatcactgggtaataaagtcgtttttgtcagaaacgtagctgacgcaatggctcaaatcaaatcttatctaggtatctaa

SEQ ID NO: 70104 - DNA, 177 bp, Acinetobacter baumannii
atgcataaaaccgcactatttcttactcttttggtattggggcttttaattacggttggtctttattacgtagtaggccgtattcgccatggaattaaacgaaaacaagtaaatgcaattgcggagttaaataaacaagcatttcttcgttgcgaagatcaattaaaggctaagtga

SEQ ID NO: 70105 - DNA, 450 bp, Acinetobacter baumannii
atgtttttaattatttttggtctaaaaggtatacatttgcggaaaaagcatgaatttaaccttttaaataaaccaaccttttggagttttagtttcctcttttttgaggtgctttattttagtaagcatcatgaagatggactttctaagttattttcgaaatatgcttggtccacaaatgatttagattggcacccccaagtacgaattgcttcagcaaaaggctataaaagagcagttgccgaatatcgtactgaaaaagatcaagagattaaaaggttacgcaaacagctggacaagatgacagaggaaaggaatacactgcaggttgaaaacattacactcagatcgacagttaagggtttacacctggtattaactgaacctgatacaagtgacatggataaatctatacctgcagcaattttagaagctatgcactataagtaa

SEQ ID NO: 70106 - DNA, 381 bp, Acinetobacter baumannii
atgttaagagtttcgcgcctttgtctacttgttgcctttgctatgcctatggctgtttgctcaacagccacgaatagcgccgtaagtgcttctcgatcgtctttcagtgcaagtcggtcatcacctgtaagccgaccaagtgcaattaatagcctaagtaatactaaaactacctcaaattttaaaagctcgtcagtcagatcgatagggaaagtaccgccaaagcctgtaaccaacaatgttccagttaagaagccattgtatagttcacgaaaaaagagtttttcaagtaaaaccgaatatgaatattacgcatttaatgattgcgtaccgtattcatccgcacaattaaacggctggcgctgtatagaccgagattaa

SEQ ID NO: 70107 - DNA, 387 bp, Acinetobacter baumannii
atgaataagattgcatgtgaagaggatttagctagtgaggatgagaatatatggggtaacgcactcagtaaatgtcaatcaggtgcgccatgggtctgtaatgaacgtaaagggtgtgtaaatgatggttcttgttttaccagactaaggctcgagcctgaccaagctgcactaagaattattgaacttgaaggggaagtatcaagacttaaatgcaatctaaccttgttatttacaacatttgagggacatttagttcaacttgatatgcagtataaagaggctgtaaaacgtaataatgagccaatggtttgggctattgattttttaaggcgtgaaatgcgaaccctgattaagcaagtaaagcaacaaaagggagtggaataa

SEQ ID NO: 70108 - DNA, 780 bp, Acinetobacter baumannii
atgaatcatagagaactatgtgaaattggggctaagtttttaaaacggccagagtcagcaaacggccatggttgtcacttcacaattattgaagcagcttgttacggcgaaaatcctgatgtgtttggtattcgtcacggcactattgagccatatgagtttgatggaaagatttatgaacgtggtcatgatgttggtaccgttgttttagaggcaaaagtaagccgttctgactttctggccgatcggaaaaagccacatcgagctaaacccgaaacaggtgtaggtaaatggcgttattacatttgcccacaaggtttaattaaggctgatgaactgcctgaaaaatgggggcttatttatgtgtcaccagctgggcggtgtaaggttatagctggggcaatggctgtacctaaaacgccgtgcggtaccacttatgacaacaaaccgcgtatgtggcgcagtcataccgatctagtgaacaacttcaaagcgtatgcattcaatgaacgtaattttcaaaatgagtttaatttaatgtgtatggcgttagcgcgtttacaagaccctgaacaaattctttatatgcagcgagctttccctaagctaacaaaccaaatcacagaacttgaacgacttaataaagagcaagaccgggtaatacgcaggtatgaacgcaaatatcaaatacctgaagccgatcgagcgccgtctttctctgcaggtatcttagaaacacttgaaaccttgaatttaacaggggttggcagcaatgaataa

SEQ ID NO: 70109 - DNA, 225 bp, Acinetobacter baumannii
atggctattcaacttaaagaaagcgcttcttttgggtggtccgttggggatttagtgatgacgactaattctcaatggtcacccaaggggaagctgagaattgctgcagtaaaagttggtcgctttgctacggttataagtgcaaaggatgaagagggcaaaacttttacgggtggtgatggtgttttttggaaagttccacaaggtttttacgatgaatcatag

SEQ ID NO: 70110 - DNA, 540 bp, Acinetobacter baumannii
atggaaaacttttacattatcgaagagccgacattagtggctgaaattaatgaaaaattgggtgagcgtgataatcatttaaataaacttgatgctttggctaaagaacatggtttcttaggtgccaatattcagcgcaaccaaaattttggattaggcgcattccgttgtagtggcttttttatagctaatactgatctgaagagcgttgaccgtaatctttggaaaactgcaggcacaacccgctatgaagcggaaaacggctatatccatgacgctacgatttttttaccccgtaaaacgaataagaagttttattctgagctaacccaaaaattaccactccaatttcttcaagagttcaccttagaagctgtaattgacaagctttgtgaccgaaactggatatttgggggtgttacccgtctttctcttattcctaatgctgttctagttaaagtctcaggtcaaacaaacgttatttcacctcatatgacggaaatcaaagaatctgagtttctacagaagcttggtaaatag

SEQ ID NO: 70111 - DNA, 669 bp, Acinetobacter baumannii
gtgattcaagttctaattaataagcgtagaggtaagttatacgccgtgggtgatttacacggttgttataccttactgatgaaccggctaaaggaaattgggtttgattttgataatgaccttttaatttctgtaggggatttagttgatcgggggccacaaagtaaagaatgtgctgaattacttggtgaggaatggtttaaagcggtattaggaaaccatgaactcatgtgtattgagggcataagtgaacctgttaagaagaaatgccacattttaaatggcggtcagtggttctatgagattgaagaatttgatcgtcatatgcttatagccgcttttcgtaaaatgccgaccgttttagaggttcatcataagggtaaaaaatacggctttgttcacggcaatattaaagaaaatgattgggaccaatttaaggccacctttacccaagaagacaccacggcaatcaaatcagcccaacagcaagcactttggggacgtactagggtaaaccgtcattattctggttatgaagaggtaaaaaacattgattatgtctttcttggtcacacgatggtttttaatgcattccgccgcgataactgcgtgtttatagacactggcgcatatcgcacgggcaaattaacaataattgatttaggttaa

SEQ ID NO: 70112 - DNA, 444 bp, Acinetobacter baumannii
atgggttatgcagtgtatgagcgtaatggtcgttggcaagggcatgggatacccgcattttgtgatcatcctggttgtttaactgaaattaataggggcatggggtacgcatgttgtgaagaccctaatcatacagagcattgcgggggcttcttttgtgctgagcatcgtgaaaactatatctacgaagatgaattagaagatatggatgatgatgagctagaagagctcagacttgatcgtaatgatcaagctcaaggggatgacggcattattcgttgcagacattctaaagttgagaaaaaagagcatccacgttggataaaacacattgaaaccgataacacttggaaagaatggcgaactcaaaataaagagcaatttcagcaaatgaaagccctggtaagagaaccggagggcgcaagtgattcaagttctaattaa

SEQ ID NO: 70113 - DNA, 300 bp, Acinetobacter baumannii
atgtttttagtcacttatcacggcgccctatggactgtaattaacctattttgcgctggtgcctatgttttggcctgtaaatggctgttcgaaagcaaagatttcatttttaacaaaaaagttatgtatctcgacgctgttatgtttttaacagctgtcgatattgctggttactacgatcagctgtggaacatgcacggcgattttaaggacattttttatatagtcatgctgtttgggctgacgtggtttaaacggttccatttatggatgcgtattgaagaaacggggaataaataa

SEQ ID NO: 70114 - DNA, 417 bp, Acinetobacter baumannii
atgaaaaataaaaacaacgagctttttaaagagtgcctttttagagtcttggcccaacagatcattatgtttgttgaactagataagcatgttgaccgtaaacgtcctgatcttagttatatatgggcaagtctgtcttcagtaggttcgtttgactcgagacaaagattaattatggctcgtaagttagaagcagagggtgcaattcagttatgccagccgcagaagggggcaggttggcgggtaaagctggttaatcctcagttgattgatgagctatataaccaagcttctgaagcaatgaaccacattaattttaaagaaattatgaggtttccacactttgtttatcaaaaagaaggttttgagctgtctgaaacaatggggaaagtaattaaggaccgcttatgtttttag

SEQ ID NO: 70115 - DNA, 576 bp, Acinetobacter baumannii
atggctaaaccgcgtaagaaatataacccgatgaaattggtgcctaaaaagattcataaatttcagatgcattgggaagttgaggaagcacgcagaataatcgaaatacatcacttgttaggtggcgtggaccctcaagagagtacacatacccctttagaaatatggatgaatgcccatcacggtgacttagcacttgcattgaagacaagagccattgaatcagagcaaagctttcacatttttagccgagtacacgccgttgaagagacaacaggcgaaacagttgattgtgagattgaattggcaactcccgatcgtatggagttctggcaattcttaggggatgaagaagctgaactttatgttcaggatggaccatttaaaaagaaatggctgggtttcaatggtgagttagagaaatatctaaattcagttggtgaaggtaaaacttttgttgtgaagacaaatcactgtgtattgacgtgcttttcagcctttaaaagctttgctgatgagcaaaaatttaaaagtaaaaaactaagtctaggtattggtgttggggtagacggatga

SEQ ID NO: 70116 - DNA, 207 bp, Acinetobacter baumannii
atgaagattgttcgtttattaccagttttcgggaaaattatttttcaatttcctttttcccccgttcttaacatcgtttctatttcagggggtaaagatagtgctgcaaccctcttactagctttggaacaaaaagtacctaacctcatgggggtatttgcagatacaggtaacgaaaaccaaattacggtttgtgtgagtaattga

SEQ ID NO: 70117 - DNA, 1482 bp, Acinetobacter baumannii
atgagcgcacttggtctttttccccatgaactaattatcgataactttgcgggcggcggtggtacaagtacaggacttgaacaagctttcggtcgtcctgttgatattgcaattaatcatgacccgaaagcgctggcaatgcatcgtataaaccatccacataccaagcattattgtgaaagtgtttgggatgttagacccgatgtaataactaacaatcagccagttggtttagtttggctatcacctgactgcaaacacttctctaaagcgaaaggcggtaagccagttgataaaaaaatacgtgggttggcttggattgctctacgttgggctgatctcacccgtccgcgtgtgatcatattggaaaatgttgaggaatttacaacatgggggagattagggccagacggtaaacctgacccaaaatataaaggggaaacttttcgcagctttataaatgctttgggtcatcaaggttataaagttgaatatcgctttttacgtgccagttattacggcgccccgactttacgaaagcgattattcctcatcgcacgccgtgatggtttaccaattgtgtggcctgattttagtcatgaagaccctgaaattataaaaggtcttaatggtaaatttaagcacgtgcgtgagtgggtaccagtaagtgaatgtatagattggtcacttaattgcccgagtatttttgaacgtaaaaagccgcttcagccagctacattaaaacgtatagcagctggaatcatgcgttacgtcattaatgctgaaaaaccctacattattgaaaataagaaaaagccttatattgcccctgtattaactgaatgcgcgaatgcatcaacaccccgctgtatgcctgctaatgagcctatacgtacaatttgtgcagctacaaaaggcggtcatcatgcacttgtttccgcgtttttagcaaaaaactatacaggcgttgtcggtagcaaagtacaagagccgattcatacgattacaagccaagatcatcacagccttgtgaccagtaatttagtcaaattaagaaataacaatgttggtcagccgttagatacaccaattcacactattactgcttcaggcggccactttgcggaagtaagggctttcctgacggcttattacgggaatgaacgcgacggcaacccggttgatcagccgcttagaacaatacctactaaagaaagatttgggcttgttgttatcaaaggccagacgtatgcaattgctgatatcggttttcgaatgcttcagccacatgagttatttaaagctcaaggttttccagagggctacatctttgaccgtggcatagatgagcaagggaatatcgtgaaattgaataagaaagaacaaacgagaatgtgcggtaattcggtttgtcctcaggttgcgcgagcacttgtagaagcgaactttaaacatgagcaaaaatattcggtggttgcatga

SEQ ID NO: 70118 - DNA, 228 bp, Acinetobacter baumannii
atgcttaacaatcgacgttatatcgaactatcaaaaataagcaatgcagctttatgccgcgatttgccttattcaaatcctacctttttaagaaaaagaggtatgggcaataccgataagtcttttaataaacatgctgaactttggaaagaaagacaacgtgcattattaaatgatttaccaagtaatgctgtcttattccctgaagagaagggtgcaacagaatga

SEQ ID NO: 70119 - DNA, 1254 bp, Acinetobacter baumannii
atggctttaacgtatggctcagtgtgttcaggaatcgaggcgccaacggttgcatggcatgagctgggatggttgccactttggtttgcggaaattgaaagtttccctagtgctgttttagagcactattacccaagggttcctaatctcggcgatatgacaacgattgctgacaagattagaagcagagaaattgaagcgcctgatattttgattggtggtacaccgtgccaagcattcagcgtagcaggtttaagaaattctctgaatgatgatcgtggtcaattgactttagcgttcattgaactcgcaaatgcaattgatgaagtgagaaaagtggatggaaaagagccagttatcattatttgggaaaatgtaccaagggtcctctcaacaaaagacaatgcctttggatgccttctgggagcaattgccggagaaaattgtgagctcgaaccggcaggggctaaatggaagaacgcaggttttttgtttggacccgaaaggtcagccgcttggcggatactcgacgcccaatttttcggagttccacaacgacgccgccgtgtgttcgttatcggaagtgctagagacgggttccgtcccgaaaaaatactatttgagttcggtggcgtgcgtagggattctgcgccgatcagaagcacgaggaaagagattgccagagcccttcgagcaggcactaaaagtgcaaatcgaactaggagctggataagccataaagacccaataggtactttatgtaaatcagatgaaaagggtttaggtaatcaatctgttgaagatggaaaaattctttttgatgcagatttaattttttgtgcaaatgacaatgctgcagatgatgttgctttacagctggcgccgacattgagagcttctacagggtgtaaacctatatctaatgttcatggtgccttaagttttcagcaaaacagtcgtgatgaggttagggctgtaggaggggatggagaaatagctggggctttaacgtctaagcaagggatgcacaaccagaactttatttgtgatggtgttgtacggcgtttaacaccacttgagtgtgagcgccttcagggttttccagacaattacacgcgtatcccatataagggtaaaagtcttgaaaggtgtcctgacacaaagcgatatgccgctttaggtaactcaatggcggtaccggttatgaaatggattggtacacgtattgataaatacttattaggcgagctttaa

SEQ ID NO: 70120 - DNA, 1254 bp, Acinetobacter baumannii
atgaccgaacaaaaagaagagttgatagttgctaaacgggttaaaaaagataacttagtagttacaagaaatacaatggcgtatgcaagttatagtcatgacccaaatcaagaaaagctaatgtttgctgccatgattgttattcgtaaaatggaacttgagaatcaaggcaatattgacccgaataccaaaatacggatatcagcacgtaattacgctgaacttacacataaaaaaatgctgcagggtgaacccgctgaattagatgaaaaagaattacaacaaatagagaagacagcagataaagcacttcaccgtatatatactaaatttcagcctttagttatgaaagtgaaagagcctgattctgcagaaccggctaaagtaccgatgattacttactgcaaatatatagctaaaagtaagtgtattgaaattcgttttgctcctgagttttatgaatacttttatcgagtaattgtagacaaggctgattcgaaattaattggttacttttcgcatgaattaaaacaagtcactcaactagatggcttttattcaatacgactgtaccgaatgttgattgaaaacaaatggaaatcaaatattttagaaatctcattggatgatttaaaattttcgctcgatcttgaagataagccttcttacaatgacattgataatttaaagcgccgtattattagaccttcagttaaagaaattaatgatttgtctaatatctcaatcactaaggttgagaatattaaaagtggtcttagtattgttggcctaagattcatatatgaatataaagcttcagatcggatgaagaagatagaagcaaaactacttgcgtttaaaactaagctgcttaaagcaggtgtaccttatagtgatgacggttcgcacttcaagcaccctgaccgcgtaaaatacattactcgtattgatagcttctcaacaaaacaaattggtttcttggtgtcatgtcctcaattcctaaatgattacagtgagttctattcaggctcagtaacagacgacgaagtaagtaaccgtaaacttgccaaggacattcttgcaacactgttaagaagcaagccaagtctattaaacgatgtgaagttgatcgactttgattattacgtatattgccagctaaaaaatggattgctcaatttacaaaaacaggaagatgaaaaagacggaagtgaagacgatgtagcagaatcagttgattcacttgaactttaa

SEQ ID NO: 70121 - DNA, 180 bp, Acinetobacter baumannii
atgttgtacggttttaaagacatgttgtacggtttcaaagacatcttgtacggattaaaagacatgatgtcgggtttaatagacatgatgtacggtcttaaagacatcttgtacggattaaaagacatgtcgtacggttacaaggacaacttgtacggagcttgtattataagatcatga

SEQ ID NO: 70122 - DNA, 180 bp, Acinetobacter baumannii
atgggggcatttcttaaagcaggtgtgaacaaaacttattgttatcagctgacttatttacatgaaggcagtcatataaaaaagagtggtgaaattaaagcttatgatacttcagatgctattctttcgttacttaaaagtttccctggtgcaaagggttcaatcaaagtaaagaagtaa

SEQ ID NO: 70123 - DNA, 408 bp, Acinetobacter baumannii
atgactactttgagaaaaagacaaagacttaaaaggaatattgcaaagcttcgcgaacactttaaattaacgggggagtttttaactgttcaaactaaacatggtacaagtcacgcatatgcaacttataaatgtcgatgtagtgagtgtattaactactatgtgagtgtaatgcgtccacggattactgaaaacaaccagagatattttcaaaaagcaaaaaagtattttagcgaaaatggtcaattgcccgataacgtagaacatggcagaacagggtacagcgttgggtgtcgttgcaagatatgtaagcgtacaaattcattttatgcggccgatcttcgacaaagaaaaaagttggccgtaaaagaaatttcacaacgacgttcaccaatagaggtaaattaa

SEQ ID NO: 70124 - DNA, 870 bp, Acinetobacter baumannii
atgaatttacttaatgagtataaaaatttagataaatggctttctaggcgccgtggccgtttatcacagctcgctagagtgctggggattaagcgacaaactctgcattcaatgattttcacatataaggtcgatactgcttgtatgctggaaattaaaaaggctatggagttaattgaggttgaggaaaagcaggctttacgtgttcataaacgtttaaaaagctggatgaagcgcggtagtggtagacaaaaggcactagctgaatacttaaaaacctctacggtttccttacgaaaaatggggaaagctaaaggtaattcacgttatgttgttctgaggtacggtgttaaaacacttaaatcgggcatgatttatgtagaacatgaagttaattcaggatttcataaacacataatgattaaagatgaattagagcacctggtgcgtaataaatacttttcattggatgaactgcagttaatgctttcccgtgtaagggctcatgcaaattttggaagtatgggggcatgtctggtctatcaaaaattaggctctaaatatcgagtgatatcgttagggtttgattctaagcatgagggaatgctcaagagccatatttgtgagagagataatcctcatgttcactctgctgcaatggcccgtcttaatctaagtagtggtaatgctgcagcggaaatcggggaggttggcgcgttagttgatgatctaccctgtaagtattgtttaaaaggtttattacgatatggactatctgaagttatatataatcatgaacctgaagatgaatcattgattaacatattgttagataagggtattacccctttaaaagcaaatttactttga

SEQ ID NO: 70125 - DNA, 825 bp, Acinetobacter baumannii
atgcaacatcctttatttcgctatcacggtggcaaatttagacttgccagctggataatttcacattttccgcatcacgatacatatgttgaagcattcgggggtgctgcctcagtattacttgaaaaaaaaccaagtcgaatagaggtttataacgacattgatgatgaaatagttaatttcttcagaattttaagatgcccgattaagtctaagcagcttaaaactttgattgaaaatactccttactcaagaagtgaatttctttctgcaaaaacaccttgtattgatgaaattgaaagagcacgtcgattagttgttaaagctcagatggggttcggtagtacaggttcgactaaaagtagcactggctttagatcggatacggctagggggtgtacagaccttattactatttggaatcgccaaggcagtttaattgaagaagcagctgctcgatttaaaaaagtcatgattgaaaaaagggatgctcttcaagttattcgagatcatgaccgacctgaaaccttattctttttagccccgccgtatttacatgaatgtcgtaagctaggcggcgatgcatatacccatgaaatgacgaatgaacagcatgaagagttaattgacttacttagaaatgtgcaggggaaagtcattttatgtgggtatgacaatgatttatatgatcagttgggatggaaaaaagtaaataaaagtgtgtcggcttcaggtcaaaatggctcagtaggtagacaagagattttatggattaaccctcaagctgaaaagcaacaagatttatttacgggactaactgcatga

SEQ ID NO: 70126 - DNA, 963 bp, Acinetobacter baumannii
atgggtgctatgactgatctatacaacgaatatgaatgctctacgcatggaaaatatcgtaaatttaaacttactggtgactctacgtgtccgttctgtgcaaaagaagttaaagagagcgaaaaccgtttagagcgtatggaaatacaaaaccatatttccgtacaaagtgtacgggtgggttgtgaaatacatggctacaggcaagttcaggtaccacaattaatctccgcttcagtagacggcacttgttacgaatgtaactcttcaggcaatcaaaaagctttgaatgaggccatttcattaaggattcatgaagaatataagaaagcgaagttacccaaaaacagtattaacctgacttttgaagagcttgatacaagtaaaagcgcaaaacaaaagctgattattcaagccttgattaaagagatacaagcaattattgcaaaaggttcagcaatcgactgcagaaatattcttttatccggttcaatgggtgcaggtaaaactgcaatggctagtatttttctgcagaacataattaagcgttctgtgaaatgtaccactaagcacattaacgatatttattatgaaaataaattacgttgtgcattcataacagaatctcagctgattaatgatattcaagaaacgtggaaaaaagactgtagaacaactacgaaagaaatctataaccatctttcacatgttccaattctctgcatagatgacgtgggaagcttggcatcgagctcttatctatttgaagcatataccacaattcttgatgctcgttataagttgagactaccaactttaatcacttcgaatattgcttatacagagcttgagaaactaatcggtagccgatcagctgaccgcttcttagaaagtggccgtattcttgtagttaattgcgattggcaaagttaccgccaatcaaatgctatcgaagtgatttag

SEQ ID NO: 70127 - DNA, 954 bp, Acinetobacter baumannii
atgaccaatatggctgtattagatgttctgcaaaggactatctatcgtgctgagcacagcaaagaaaacccttataccgttctttcaaataaacttttacgtgacccgaatattaaacgggctgataaaggcttacttgtcgaattattgtcatggggtgataaacatagagtttgtatacaggcccttgtgaaaaagggtaaagagggccgtgacgctatacaaggaatgttaaaccggctagaggaagccgggtatatcaaacgtactcaacttaaaaattcagatggcacctttggtaaggtcgtttatcaaatttttgaatcacctattgaaacaaagatactcgctcaagcagaggataccgcttctttttctgatgctcagttaggtttcaattttgatgaatttgatgaaaacaacgctcaagccgcaaacgggttttccgtttgcggagaatccaccactaataaatacaatgagttaagaagtaataatttaaataatattaataggggaggggacatggaaaaaagaaatgaactacttgaaaaatacagggttctacttaaagaccctatattcttagcaagattgcaaatggctggtttgggttcaatgattcaaactcaagaccaattagatcactaccttgtagacttcaattcaaatcatgatcaatacaaaaacataagcgatcatcaacgcttaaacaatttgattaaatttcttttgaaaatccaccattccccagctggtcaacgagctcactttgcacgtatgcaagcgttgggtagctctgaacattttaataaacctgctcataacaagcctttaaataaaccttctaaagatttcagccggttcattctaaataattctgaacaaaggcccgttcaacatcaatgcgttgaaaaccatgatgatgaaaaattcaattttgaaggattctag

SEQ ID NO: 70128 - DNA, 282 bp, Acinetobacter baumannii
atgcaaaacttgaaagagattaaacgagctgaattagctaagcgccgaaaagacattttcgaatctttgaaacctgaagatcagattaagttacgtaagtttcaagcaactatacgtgttcaattctgtaatcaacaggcggcagctgaagcttttgattgttctcaggggtctattagtcgttatttatcgggggaggttcctgttccgtacaacgtagcgcggagattagaagagctgacgaatggggctataaaagtagatcagattcttcgggactaa

SEQ ID NO: 70129 - DNA, 714 bp, Acinetobacter baumannii
atgtcgcaaagtcttatcgaacttgataataaaaatgagagtattggagaaagaattgaccgactcttaaacgctcagaaacttgatcaatatcaactagctaaaagcgcaggaaccactcaagcaacaattagtagaattatgagcggtaaagttaataatagtaaatttatgccagctattgctcaggcgttaaatgtttctgtcgaatatttaatatttggtatcgaaaccgatgcgcaagtcgacgaatacagcactgagcaattgcgtatacagcaaaatgattttatgcttattcgcaagtatgaaaacgtgtcagagaaaaatgaagatacgcgtactaagaaaaaagcagaggacattttaatgttagaaaagagtttaattccgttggggtcaagttcagaagatttacgttacttaacggtgccagaccattcaatgtctcctaaaattcctactgacgcaagagtttgttttacaacgaaagatactactgttgtagctggtaaagcatatgctattaagtatggttctttgactgaacaaattcgatatttatacccgttaccagacggcggaatgcgtattcgtgttacacctgaacaagctgaagagtttccagaaatgatcgttactgcagaagaaattcaaaagaacgtctttaaagttttaggaaaggtatttagtgttacaagtagttggatttaa

SEQ ID NO: 70130 - DNA, 342 bp, Acinetobacter baumannii
atgcaaaaaactatacaaatcactgaatcaaataccgatcagttacccccttcccctagctctgacacttcatcagtgaacttagctaataagtgtattgctggccttatttttctcatagagatttatttggttatccaagccatgctaaaaaaagttttttctatccggcttatccagattcttacttcattcactattcttacagccctcttctacgcttttttaattttcggtggggatgcacaagaaatagaaaatgagggtcgctatcaagcaaaccagaagtatatacagcttgttgagtctaaaaaccctgaaggtatatatatttctaagtaa

SEQ ID NO: 70131 - DNA, 255 bp, Acinetobacter baumannii
atgtctattaatggcaatttaggcaaagacacaaaaactgaaataaccgcagctgactgcgttgaaaatctgctgtgtggtcctattatttccattcttgttgttagtaaaaagactgtactgaacgtaaatttcctgagttgtttaacaaattcacttcagctgataagcaagattttattcagtccttatataagtaattttattttgtttatttgttcaaatgaacatatgaacaaaagaatatttgtttaa

SEQ ID NO: 70132 - DNA, 720 bp, Acinetobacter baumannii
atgcaagctggttttaatttaaataataatcaggctagtgactttcgcggggtacatgttgtgcaggctattgctgcagttcataaagctcttgcaaaaatgggcattgctaaaggcagacgtacaaatagtacaaactctaaattcacgaactataattttcgtggcattgaagatatgtacaatttcatttcgcctcttatggccgagaatggtctgttatgcatacctactgtaaaagatacaaagctaactgaaattaaaaatcaaaatggcggagttacccgccatgctattgtgactgtttcctataatttcattagtgttgaagatgcatcaattattactgcagaaatggtaggtgaagcaattgatactgcagataaggctttgagcaaagcgctcagtatggctcacaaaggtttatatgagcaggcattttcaataccgactaaacccttcattaatgattaccaaaacgcaacccagcctgatcaagcacaaatacagggcaatcacattcgtaacgtaaatgcacctgactgccaagagttagaggcattcgtaaatttacttcgttcaattaattgtagctttgagcgatttttacaccaacgtggcataaccgagaaacaattaactcgcgatatgcttaaacaagagactataaacattgaaaattacttatcgggtcaaggtgctccaaggtatcaatattaa

SEQ ID NO: 70133 - DNA, 639 bp, Acinetobacter baumannii
atgacgaccaaatatatctcattgcttcagcttaagggcggggctggtaaaactacaatcgcatttaaccttatcggttatttcctatcaaaaaataaaaaagtcttaggcgttgatgccgatatgcaacaaggtactttgtatgcctggtcaaatctttttaaacatcctaaatttgaatgtgtaggggttaatactcttgaagagttaattaacgtacttcgtgaagcacaagaaaaatacgacattgttattactgatctaccaccacgtcttgcagatatagcacgctcaagtctcgtttttagtgatttagttttggttccggtacctatttcatctgctgatgtatgggcagctatggacctaacaaaacttatagaagcggcaaaggctgaaagtaacactgcaaaaattcgcgtagtgtggaatatgtttaagtcaactaagcgaaaaatagaatctaaagaagaaatcaaacaactgttaggtcatgatgaggttaaacaacatttatctgattacgtagcttattccgatgtcttaggtttaggtacatgggtaggcgaacacaatcatgaaaaagctaaagctgaatttttggcattcgccaaagaagtagaaaagttaattaagtga

SEQ ID NO: 70134 - DNA, 267 bp, Acinetobacter baumannii
atgactaaagcaaagatgagttttgcaaaacctactgcagaagaaaaacctcaaactgatcgctttgaggctgcggctgggtttgctaaggcttcaaaagaagtgattgaaggctctaaagatgaatcgcgtgtaaattgggattgtcccaattatttacacaaagagcttaagcagtttgtagcaggttcatcacgttttgcaactaagaaagagtttttaacacaatgtttaattgatggattgaagaactataaaggtcaatga

SEQ ID NO: 70135 - DNA, 684 bp, Acinetobacter baumannii
atgaaaaaggctataggttatgtccgtgtgagtacggaaaaacaagttaatgaaggtgtgtctatagacgctcaggttgagaggattaaagcatggaccctcattaacgattatgagcttgtcgacatctattatgatgaaggtatctcaggtacaacatttgctaaacgtgaaggtattaacaaggctttagcaagagttgaaaagggtatggcttttgtttgttatagcttaagccgggtaagccgtcacctcgaagataccttaatgataggcaaaataattcaaaatgctggagccgatctggtgagccttaccgagcaaattgataccactactgctgcaggaaaaatgattttcaacctctttggggttttaaatcagtttgaacgtgatcaagttgctgaacgaactcgtacggccatgcagtttttaaaagctaataataaagcttatacacatccgccatatggttttgatcggcgtggcgatgactttgtagaaaatgaggcagagaaacgagtaatcgaattgatgcttgaattacgtaataaaaactatgggcatagaaaaattgccactcatttgaataaaaatgcaatctacgcaaaaaatggcggtttgtggtacccaaaaactgttaaaggtgtattagatcgtatcgaatcaaataaatctgaataa

SEQ ID NO: 70136 - DNA, 378 bp, Acinetobacter baumannii
atgacaaatcatcaaagagttctaaatctaattgaattaattggggacaaaagagttttagaagtatgtaaggacatgcagcgcaatggaattactatttgtgaaattactaaatcttgcgtggattatagagttaaagaggattatcacccggaaaaggcttttacgcttcatgaattgcagtgtggattaaaagaatacaataggattgaacacaacgctgatcgtgagtatagagatgtttttgaaccaattgttaaggaaacggaatattttaaaaaacatgggcattggtctgattttgaatataaaaatggcgaatatttaaacgggacaattcaagctatgtttgaaatgtttttaaggctttataaataa

SEQ ID NO: 70137 - DNA, 681 bp, Acinetobacter baumannii
atgccacaaattacgaagattctcggaaatgaaccgggtattcaataccaaggtactcaagacaaaactggcagtacaggtgcagcacctatcaataatatgctggtcggaaaatttaagcgtgggcgcctagatcgaccaatgacaatcacaaaatctaatattcgtgggttacttggatatgaccctaaaaatctggactatgtggccgtacaagatgccctagacactggtgtaccaagtgttcaagtaatgcgagttaatgggtcatctagcgccgtaatacctattgggtgtgcagatgcgactgatagaatgggcgcccaacttcttacagatggcgggacttatcaaatttatgtaaatgatgttctattcgaaagccctaagctatttagaaatgatgtatttaaaaactatttaatgagtaactatggcgttgtacttacaccagttacagaaacgtgggaacctgctttaaatgaaaatgggtattataacaatgctcaaggcgcacgttttgaaaatacctcagctaattatgtccgtattaaaattgaaattattgatgcgagcacacctaatatgtttgaaacgcctatcaatccttcagctatttattcagggccaatcgggccagataatgcttatttagctttctgtttagcacctgcccgctaa

SEQ ID NO: 70138 - DNA, 840 bp, Acinetobacter baumannii
atgaatctttattcaactaatattgaaaatgagccgggcgtacaaaatcggggtgtttcaattgatgaagaaattatagataagacgccgatcaataacgtttacatcggaaaattcaaacgtggccgtcttgataaaccaatgatcatcactcacgccaatgttcgaagcatgttaggtcatgagccatggaatcccgattacaacgccgttttagatgcattggaaacaggaattgagaaactctcggtttttcgtatttacactgaacatgatttttcagaaatacctgaagaacctgcaccagagccagaaccacaaccggaagacccgaacactacacctatccaaccttttgattatgcagttataagttacaagtggtcagaaagtggtggccttgaccttgatacacgtaccttcatatctctaccagctcgtaacatcgtagttggttggaataaagcaaaaattgattcggattatttgaattggggtggtgataatactgcaacaggtggagaagatattttagtaaatcttcaacgccttgctgaagactatgcaaatgtaaacgactttgaaattacacttaaagccttttggtaccgaactttagtggatggtaattttcagattcaattcacaacttataaaggcggcactatgataagtaacggcgtgaacttcacaaatgaaggtggagtagtggttcaacaaattatagtggaccacaacacaacagccacaaaggactctacacaaatggaaggcgtgccggttgcaaagctaacttttaataaattaacccaaacaggaaaaattattaaagtcgtttaa

SEQ ID NO: 70139 - DNA, 615 bp, Acinetobacter baumannii
atgagcgctgatcaaacagcacaaatagcagcaaccttttcttggttaagagccatgtctggcggaaaattaacacaagatcaggtaactgcaggtgatcaaatcattgcagctgtcggcttggacacctttgccaaatcaatcaattacaccttcggaggtgtaactggtttacgcgatatttctagtcgaggctatgccttaatcaagaaattagaaggtttccgcacagatgcctatttagatacaggtggggtctggactattgggtacggtaccattaaatatcctgatggccgtgcagtaaaaaaaggcgacaaatgcactgaagaacaggcttctcaatggttaattaatgattgtagatgggttgatgcatgcttagatcgatatgtaacggttccagttactcaaaaccaattcgatgctttagcaagttttgtctataacgtcggtgaaacacaattcattaaaagtaccatgcttcgtttaataaatgcgaatcaggggcgagctgcagctgaacagtttgatcgctggatttttgacgcaggccataagattgaaggcttagttaatcgacgtaaaacagagaaacaactatttgtttcttaa

SEQ ID NO: 70140 - DNA, 261 bp, Acinetobacter baumannii
atggatatttattttattaaaaatactgtatgcatcatcgttatcataatcgcttttgtatgcacggtattgcctagcagcattatatatacagcaaactgtaaaagaagttggatagtagttttaactattttatcttcatgtttttttattattgataaatatagtcttggaatttccttaatagtgattctgttaattgcgctattaattcactacctagccctttattttaaaaaattggaaggatgtgatttatga

SEQ ID NO: 70141 - DNA, 507 bp, Acinetobacter baumannii
atgagcgatgttcttaaatttttcttagcgctgttgtggcgagttgtatggttattcctgccatgtacaaaagctgcctatgctgcactagaaaacaatccaaagggggccgcattcttaacgaatgaggccctacgtcaatccactgcaagccatagtgatttgattttaacgttagcctgtttagtcgttttaatatgcgggacaacaataggctatttctttccaacacctgagtatggtgcaaagcctttacctaagcccctcaagttgttgatctcaatgacatgcggattcttggcttttgtctactatatcgatactgagaacaatattacccctgcggtcatcatttgggtcgcaggggtttcttttgtttctcctgcaattattcatcttgtccatgctgcaggtattaaattctttggcgtgcaattaggtgttactgataaagatttaaaagaaattaacaagtcttttaaaaaaaatgatagtagcgagggttaa

SEQ ID NO: 70142 - DNA, 720 bp, Acinetobacter baumannii
atgagccactttcaagacaaaattgctggccgtctttataaattcggccatatcatttgtagtgatattttagacatggcaaaaatcaaggcaaaccattacgaggccatgctaactaaagcattatgctcgatattagggcctgaggttgtaccaggtgatttatcggttaatgaacgatatgcaatttatttaaaatatttaaattttattgaagataaaaatttagatcagtcaattaatattgcagactacctttatgctgatttaaataatttttcaaataaaagaattgaagataatggtgtttcggcacgccatttgacaggtttagaagcagaagcccttgaaataggttgcgagaatacaacagattggattataggggcgatggccctgcaaattggtacagatattgaaggcttgccagcattaccaccgcaaaagaacttagatttcacctgcaaaattattcaaagccgatctgaacgtttacttgcattagatcaagttgaatttaatgatctattcaataaatttacgtatgtgagtagccagctaaatacccttgtaaatatctcttattcaaatggcatcgtattaaataaagtgaatgggggtacagatgatgcacccgttcgatttcgcgctacttcagcaatcaccggcccagcaagagagctctattcaatcttggtacaggaaaatacaacagtttag

SEQ ID NO: 70143 - DNA, 774 bp, Acinetobacter baumannii
atggcttacaaattacctgcagagcctcaaaatacacctaagcaggctcctaaatatcaaaataaatcccaatacggaaagattaatgaacatttaatcgtacgtattcgccgttgtgataaagatggcaatctcttagaagaatctgaacaagtcacagccttaggggttgatggtgagctcaccattgaaaatcaatattccacaccctttgaaaactcaaatcctgaacaaaaactaccgacgcttatggggcagctgcagtcggggaattgggtcgaaaccctcgataccgttttaggttcaatcggcattgaaatgagtgacgataaaaaagagagccttaattctctggctggccgtagtaacctaactaaagaaaactcaactcaaatctttgtctctacaggtgccttgacactgccactaactttacattttgaggcttgggcagatgcaaaaacagaggttgaagaccaattagatttattaaaacagtggaccttacccgaatctttaagtgaccaatcacttttagctaattttgcacaagataagtcgcttcagtctcttttcccttcgttggtaccgccttttgtggcggtgtattacggtggtaaacgttacgcgccgttgctaattcaatcctattccgagcctcttacaacaccgaaagacgaggacggtaaccgtatgtttgtcaccacacaagttactttcttgagcagacaagcttgggacaaaaacaatatttcttcgttatatagtgagtaa

SEQ ID NO: 70144 - DNA, 336 bp, Acinetobacter baumannii
atgcgtactattattgtgactactttagctttattaacggtttcattaactcatgcattagcgccaaaaaatggaacagaacctacttactgtgaacaagtggtagccttacatggttttattagtagagctcaatttacttgtaattatcgctattatgccaagtctttaatttcagatgcagcaaaatgcacaaagcatgaattaggggaaaaatatagtatggaagttatcaaatttgggatgagtcaatttgatgaacgtcgtgctgaagtcgggaaagaaaaactgtgtaaagaggttttgaaagattttcctgaatatgtgaaaaaatag

SEQ ID NO: 70145 - DNA, 1722 bp, Acinetobacter baumannii
atgaacctattaaaaattgaatcagatttaaaaagttttaaaactataaattttaaaccaactggtttaaatattatattgggtgatgatccaatcgatgcttctcaagatggcggcagtaacggtgtaggcaaaactttaagtttaggaatattccaccactgtattggttcccagaattcaatcccaaagctttcaaataaaatgccaaaaaaaatctttaaacttcattatgagtttaatgagtataaaaatattatttcaaggaatgctcttggtaatgaaattactgttaatcaaaaaaattataaaatttccacctttagggaatatttaaattcttgtggcttcttctatattccagaaaattcagaatatttaacatttcgaagtctcataaaaagatttgctcgtcttaccaaaaaagattgtgatcatcctcttcacacggagtctgaaaatgaatatccagctttattaaactctttacatcttttaggcctagatatatctctagctatcaacaaaaagaaattaaagactaatctagattctatcaataatgaacttaaaacatttaaaaatagtgagataataaaatctttagtattgaatggaaaaaacccgaaactacagcttgataaaacattacatgaaatagagttattacaaaataaactagataaatttcaagttgttgatgattttaaagaaattgaaaaagaagccaacgtcttaaaaaatatcatatctagtaatgaaaaagagatatccatattagaatttaataagaaaaatattcttaagtctttagatataaccccagatatatcaaaacaggacctacaagaaatgtataatggtcttgagaatattttcaaaccagaaatattaaaacattttgatgccgtggaaaactttcataatactattgcaaagaatagagaagtcaggcttaaaaatgatattattgagattgataataaaattaaaaaaataaccaatgaaaatagagaaaatctaaaaaaacaacaagaaaagattaattatcttcaagggaaaagtgctttagacgaatacactactattgccaataaattaacagaactaaaaaacacttataacactgttaataatttcctaaatcttgaaactcgtttaaataagagaaaattcgacattcaagaagatatgattaaagaggaccgccgtactttagattttattgagagcaatccattaaatgaaaaagaccaaatattcaaagatattataaatcagctctatgacaattcagcagccggtattattctgcaaaataataccggaattaatcaaataagatatgatttaaaagtagaaattgatggagctgattctgatggaattgataatgctagaattttagcatttgatattttaaatttattttatggaagtaatcacaatattaattttctatggcatgataatcgtctcttcgcagacataaatcctaaagcacgcgcatcatggtttaaatttattttaagcgagctaaaatccacgaataaacagtatattgcttctttaaacaatgagaaccttattagtatgaaagagtatttaagtcctaaggaatactctgaaattgaaagctgcattatccttaacttgaaaggtgataggcctgaaaataaattactcggcattcaaattgaaaattatattgaagaaaattaa

SEQ ID NO: 70146 - DNA, 261 bp, Acinetobacter baumannii
atgaacatcctgacagccttgctacctcataaacacactctattttcagaatcattaattggtgtagctggatttataaattcattgttgcctaagaatagcgtaacaattgatgagctatgggccttgattgagatcaatcaaagcaaatatccaaatacagtaaattttgaacaaatgatattagctactgatattctatttgctattaatattcttgatttacatcctgacggccgtattcagaagtccttaaaatga

SEQ ID NO: 70147 - DNA, 891 bp, Acinetobacter baumannii
atgtcactctttaatgatattatgagtttttctgatgcaggatttcagtctattgcaccttggggtaattggggtgatggggggaatgatggttatattcaaaatgaaggccattacttccaagtttatgctccaaaacctaatacgcaatggaatccaccagatgcttttcgaaaagctaaaacagatttccataagttaggtaataaatggaaaaatataaaaaaatatagttttgttattaacgataggtttgagggttcacctgcaccacttaattctgaattacaggtttttcaagaagaacagagtttagaattatgtgagagtttatgttctcgaaaattacaaattaaattcaacaacttacctgaagacctaaaaactattatagtaggtgctgtaccaaatccagatgaaataccaattaacttttataatactgaaatacatacattactaatgtatctcagtgataaagctcacacctccaggatatctcttttaaatattaatgttcccgactttgaaagaaaaattgtcttgaacaatttaaatcctcaaattgctgatgaactaagaagtaatataaaaaaagttagtttaattgacgattatttgaattcagtgaaaggaggaatatcccaagaaattagtacctttgtacatgaaatatatgaacaaagtaagttattgtttagtggccaagaagatgaaataaatttacaatatgcttggattagagatgagctcataccaccggaaatcagaaataatccctcacaaagaatggctcttgctggatatagaaccgtttcctctattgtcttggctaaatactttgaaagttgtgacgtctatgaacatcctgacagccttgctacctcataa

SEQ ID NO: 70148 - DNA, 294 bp, Acinetobacter baumannii
atgtttaagcaaaaatatatcattaccgtagagtccgaaacaccgccccaaatttgcttaggagattcaatatacggcgccacggttatttccttagaaatagagcaatatcccgatctcgtagatctggcctggctcactaaacgcttcccgctttctagacacaccctcttagaaaaattagagctatttaatttaggtggagaaggtaagaaattatatgaccccaatgttgttattccttttcttaaaaccgattttaaaagtcgacgcggacgaccaaggaagaattaa

SEQ ID NO: 70149 - DNA, 414 bp, Acinetobacter baumannii
atggttatacgtttattactaatctgtcttgctttattcactgttgaggctcatgcaactgatgatggtgattggtggcttcaacgtgaaattaagctacagcaagcacgtgaagactatgcaagacgtgtttatggtcgatctgctagatcatttactgaaactgaccctgtgacagcaaaaacaaaaacggtaacaagaattgttattgcagaagcatcgcctacagcttcaaaagtgggtgcatctatgttcaagcgtgttgcattctatgcaaagaatccaggcgtacaaatggttggtgttatggcagcgactcagcttattgaagcaattggttgggttatggaggatggtgcatacgtaaaggagcaagtaaccacctttgcagataattctttacctaaaaattaa

SEQ ID NO: 70150 - DNA, 204 bp, Acinetobacter baumannii; identical to SEQ ID NO: 46668

SEQ ID NO: 70151 - DNA, 336 bp, Acinetobacter baumannii
atgaataattcacaacatccaattatgacagttacaggcatccgtaaggctgctggagactttacagacgataaaggcaaaacaatcgagttctcaaacacggttgtaactgtattacagaattactctgagcgtgaacttgaacaaggtgcaatcggattcaaatctaccgattataaaatcaaaggcgctcagttctttaatgattacatgcaccagaagctaccagccgaggctgcaatgatctttgattgggatttcacaggtaaacagccaaaggctgtgttagtggcgttagatttcaatgcgaagaaacaggaaattaaatcgctatga

SEQ ID NO: 70152 - DNA, 213 bp, Acinetobacter baumannii
atgcagattgatgattgcacagccacaacggtaatcaatggggtcaattactgcgtactcgtcatacatcaacaaagctggctagacgaactcaacaatttatccgttgtccaagttggtctcttactgtctagcacagcgttgatttggtacgttgcttggggcatacgtgccactttagacctacttgggcacacttctaacgaggaataa

SEQ ID NO: 70153 - DNA, 264 bp, Acinetobacter baumannii
atggacaataaagaacaaactccaaacactaaccaagaaactaaaaaggtgctcactgctgctaaacgtgccgtgatgactgcgggtgtagtaattgctacaactgcaactgcctttgctgctgatggggatacaactattgacttaactactggcttggctggtgttgcgattgttgcgggtcttctttcagcgggtagcttgaaagctgtaccgacatacgttggttggggaatccgcaaagcattgtcaatgcttcgttaa

SEQ ID NO: 70154 - DNA, 414 bp, Acinetobacter baumannii; identical to SEQ ID NO: 70149

SEQ ID NO: 70155 - DNA, 204 bp, Acinetobacter baumannii; identical to SEQ ID NO: 63313

SEQ ID NO: 70156 - DNA, 315 bp, Acinetobacter baumannii; identical to SEQ ID NO: 54445

SEQ ID NO: 70157 - DNA, 390 bp, Acinetobacter baumannii; identical to SEQ ID NO: 47328

SEQ ID NO: 70158 - DNA, 768 bp, Acinetobacter baumannii
atggatactccatcaaaaggtcagtatctcattcaagctggttgggatgatgtcacacacttatctgagcaaacgaaacagacgcttcttgaatcatttccgccacatcaacgagaaatgcgtacgaaaggcgttccgatgcttggtcatggtcgtatctatgatttgagtgaagatttcatcacatgtgatccgtttgagattccagatcactggatgattattgatggtatggatttcggttgggatcatccacaggcacaggttcagcttgcgattgatatggatacagaaactgtctatgtcacgcatgcatggaaacaacgccatgtgtcaccagatgaagcgtggggagccaccaagatatggtcaagcgatgttccaactgcttggcctgccgatggtcatcaaactgaaaagggttcaaccaagcagcagaaatcttactacgaaaaagccgggttcaatatgcttgcaaatcacgcaacatggcccgacggtgggaatggtgtcgaagctgggttattcgaaatactcgacttgatgcgcaaaggcaagttcaaagtatttcgtggtctaagagcattttttgatgaattcctccaataccaccgtgatgacaaggggcgaatcgtcaagactggtgatgatgtattggatgctgtgcgttatgcatacatgatgcgtcgatttgcagttcgcaagggcgatgtgggtaaaccaaaaacagtcaaagtcaacgtaattccaacagcgcattgctggtaa

SEQ ID NO: 70159 - DNA, 2061 bp, Acinetobacter baumannii
gtggctaaagaacaacagcttgccaacatccactctctcgcattaagacgttacgactatatttacggagcattacgcgatgaacgcgcgcagtgtttagaagaccgtcgtttctactcaattgctggggcgcagtgggaaggcaaattaggcgaacagttcgccaacaaaccaaaattcgaagtcaacaagattcacttagctgttattcgtattatcaatgagtaccgcaacaaccgcattacagttgactttatcagtaaagacggctcaaagaatgatgatctagctgatacatgcgacggtctatatcgtgcggatgagcaggactcagtcgcagatgaggcattcgataatgcattcgaggaagcggtaggtggtggctttggtgcatggcgtttgagggcatgcaaagaagacgaagacgatgaagaaaacgagcatcagcgaatccgctttgagccgatttatgatgctgattcatcggtgtggtttgatcttgattcaaaacgtcaagacaagtcagatgcaaagttctgctttgttctcagctcaatgacgcatgaagctttcaaagatgagtataagaaagatccgacgagctttgacaaaggcttgttgaatggcaatctctttgattgggtaacagcagaggttgtttatatcgctgagtattacgtcaaagaagagatcaaggaaaaggtcaatatttatcgttttcctgacggtaccgaagaaaaacattgtgtcgaagatttaaaagaagatccagagattcagcgagctttagatgcctttggtgctcgactcattcgagagaagacagtcgaaaagtgcaaggtacacaaatacatcttgtctggtgcagaagttcttgaggattgcgggtatatcgcagggcgtcatattccgattgttccagtatatgggaagcgttggtttgttgacaacaaagagcgttgcatgggccatgtgcgtttaacgaaagatgctcaacgcctcaaaaacatgatgatgagtaagcttggcgaaattagcgcgtcttctgcaactgaaaagccaatcttggcgccagagcagatacttggatttgagcatttgtgggcacaggacaatgttgagaattacccatacttactcgcaaatccattaaaggatgcaaacgataatgtcttgtctactggtccaatgtcatacaccaagccgccatctattccacagtcgctagcagctctcatgcagtcatctgagcaagatattaaagatcttcttggtaatcccgaacagggcgaaaagattgtctctaacatcagcgcagaggccattgatagtgttcagaatcagattggacaacagacctttatctacatgtcaaacatggcaaaggctgtgcggcggtctggtgaaatctggttgtcgatggcacgtgaactctacattgaagaaggccgaacaatgaaagttgttggtcgtcagaatgaagttgactcggttgagttatcgcgaccaattgatatgggtgaaggcgttgagtacgaaaacgacttgactaaagcatcattcgacttggctgtgactgtaggcccaacatcttcaagcaagcgcaatgcaacaatcaaggcattgactgcaatgttgccgcttgtgtcgccagacgatcagccaatcattagctcaatgattatgtacaacatggatggggaaggcattcaagacgtacgtgactactaccgtggcaagctgctacggcaaggcgtcatgcaaccaaccgaagaagagcgaaagcaaatcatggctgagatgcagaaccaaccgcctgatccgaacactcaatatttacaagcagcggcagcagaagctgaagccaaggcgcagaaagctaaagctgacactgtcttagtaatcacgaaagcagaagaaactcgcgctaaaacagcagaaacgatttccaaaatgtctcgagatgagcgtcaagaaatcatgatgctgttgcagcaaatcgatcaagaacagatggcagccgcccagcctatgggtgagggaattcaaaatgaaccttga

SEQ ID NO: 70160 - DNA, 900 bp, Acinetobacter baumannii
atgaaccttgagaatgagcaaaatcaagaagttgaagaaatcgacactcctgaaattgaacctgagaccgaagaaactaccgagacggtagagggcgacgatcaagctgatcagccaggagcgggtcaaggtgaaaacgaagaagacgaggatgacttcaaaatcaatctaggtgatgagcaagagcctgaacaggaagaagagttcaacggcaagccagcaccgcaatgggttaaagatttgcgtgtcgaggccaaagagtctaagcgcaaaatcaaagagcttgaagaacagctcaaacaaaaaaatcagccagtacagcaacaagagcttggtgagaagccaacgcttgagggctgcgggtacgactctgaacagtttgaagttgagctactagagtggaacgaacgcaaacgtcaacacgatgaacaagctaaaaagcaacagcaagaacaggagcaagttcaaaaaggttgggaggaaaaacttcaatcatacgaagctaaaaaatcgatattgaagcagaaagccaaagactttgacgatgctgagcagacagtacaagatgtactagatgtgaatcagcagggcattgtcatttattccgaaaagcctgaattgcttgtttacaaccttggccgcaatccagaaaaagccaaacaacttgctgctatcaaaaacccactcgagttcgcattccaaattggaaaactcgaagcacggattgacgctcaaatgaaatctcaaacacgtaaaccacaaacgaatccagagcgtaaaccttcgggttctgctccgcttgctacaactgatgccaaattagcggcattagaaaaagaagctgagcgaacaggtgaccgcacaaagcttatcgcttacaaaaaatctttaaagaaataa

SEQ ID NO: 70161 - DNA, 1263 bp, Acinetobacter baumannii
atggctaccagttttacaaaacaagagcaggtaatgtttgaccatgtcattgatggttttgatgacttacttgtgattgcaaaaggtgcagagctatacaatcctctaacaccacaagaagcagtgaacgcccttgataaattctggctacctgcgccaatgattggtgcatcgtatgatggttttgatcagtcagcaaactttgatggcctaactcaactcaacgtgccagcatcgattggctaccacaagtcaatcccgaaaaccctttcatccaaaaacctgcgtaatacgtttgcgatggaccagttcggtaaagccgcaaagcaaaaactggcatccgatgtaaatatggctttgtttaatacagtggccctatatggatctgtagtatcaaaacgtacagttgcacctacgggttatgatgatgttgctgatcttgacaaccgcctcactcgtatcggtgttcaacaagatggtcgcatggctttctatgctccatctgcaatgaatgcaatggctggtaacttagctggtcgttctgaaaatactgaacgttcaaaaactgcatatgaacgagcaatgattcgctcagatgtagcaggctttgaggtattcaagaatgatcaagaaattttacttgctgcagcaagtggtggtacaacgactgtgaacggtgcaaaccagcgtacagttccatctgcaacagttacaagtgctggaatcactgaaaacaaagataacagatacactgatcttgtgattacagcggcaacctatgaaaacatcaaagtgggtgacgcattcactattgcgggtgtcaatgaagttcacttgattacaaagcaaaacacaggtcagttgaaaactttccgcgtggttgataagcctgctgccaataccattcgtatctggcctgcgattatcgatgctgctgaaggctcaatcgggtctaaagagtatgcaaacgttagcgctacgcctgccaacggcgcttcaattacatggttgaatactgcaaacgcagcactaaacccattcttccgtcgtgaatcattgatcttaatccctggttcattcactgtttcgaaagaagatggttggtcagtgatgcaggctcaaaccagtctcggaatcggtatcacgtacacacgccaaggcgcaatcaatgacttgtcttgtaaagtacgttgggatatcgattttggtacagcgctgcttaacccggaaatggctggtgttcagttgttcaaccagacctaa

SEQ ID NO: 70162 - DNA, 486 bp, Acinetobacter baumannii
gtggaatatccaaaagctttgtatcatggtgacaccaataaacatgacatgcgtatcgcgagtaatattgatgatgagcaagacttgcgagaagcgggttttgttgactttgtcatgttgaaagaaccgaaaaagactgctgaatcggctgaaactggcagtaaaacgcatgacggtttagtcgaaaaactagcctggacagaagatcgacttgaaacagcaaaagcagagctaattgcttttaaaaatgatgtgccagcgatgtacgcacgtattgctgagttgcagggtgacacaactcccgcaggtgcaaccaacgataatccaaaccctaagcttaacgaagagaccacggacgatgcgcaagattttgattactcacaatggactgctgatcaattgcgcgaagaactcaaaaagcgcggcatcaaattcaaagcacgtgattcgaaagatgaattgctcgcattgctaaatggtggctga

SEQ ID NO: 70163 - DNA, 480 bp, Acinetobacter baumannii
atgtcatggactaagcgtcaaatcatagaacaagcgtttgaagaactaggtctggctgcttatgactttgatttacagcctgagcaagtagaaagcgcaagacgtaaacttaataacatggttgctggatggtcatctcgaaatattcagatcggctttccactaccatctggtgccgactcagacgatattgatggtgatacagatgcgcctgattatgttgttgatgcaatgatctataacttagcaatacgaattgcaccaagtatgggcaagcaagtatcagcagacacaagggcagccgcacgtgaagcttatgacaatatgatcagaatgtcagttatcaagccaatcagcatcaagctagatcctatgttgccagcgggcgcaggacacaaacgctgctctacattcattcaaaacaaagacgacaatgtagttttgtcaccaaatcaagacttggagctattcaatgagtaa

SEQ ID NO: 70164 - DNA, 453 bp, Acinetobacter baumannii
atgagtaaacgactaaatactactgatacgcttgaagccggtgatcaggttgttctatttcgtacaaaaaattgtgactatcgtgcaattccattcgacacactggttcaattgattcttgagcaagtgcccacaccagtttatcaggctgcaacaatacagctattcaatccaaatgccaacttcaccaaagaaattgataataatgctgctggcacatatttggtgatgaatccgtctactgtaattgcggctggtacgttggtgttaccctcaataaacagtatcgttgatggtcaagaagtgcttgtgatctcatcacagcaaattacagacctaacaatcgacgcgaacggggccgcagttattggtgctcctgatgcaatgggtgccaccgcatttttcaagatcaagtatgaagaactttcacagacatggtatcgagtggggtga

SEQ ID NO: 70165 - DNA, 1395 bp, Acinetobacter baumannii
atgcaaatccctattttgagcgggatatacaccgacgataattcagattttcggacgatgtatccgcgaaacatgattccggtacctaaagaaaatgggattgccaacggttatctaaggccagcggagggtatcaaccttttaagtgatttaccgggtatagatcgtggtggtatcaattggaatggcgtttgctatcgtgtctgtggcaaccagttggttaaaatatcggatgatgggtctataactgagctagggaatgtaggtggtaccggttattgcaactttgactactcgtttgactatctcggtattaacagcggtgaaagtctgtatttatataatggcacattaaccaaagtcacagatgaagatctgggtgtggttaaggattttgtctgggttgacggttatttcatgacgacggatggggagtttctcgttgtcactgagctaaatgatccatttgcggtgaacccgctcaaatacggctcatctgaggcagatcctgatccgattaatgcactatttaaacttcgtaatgaagtctatgctcttaaccgctacacaattgaagtgttcgacaatgtaggcggtgaaaactttccattcagtcgtgttgatggggctatgattacacgtggcactctaagcccatctacctgctgcaaatacttagacacaattgcatttgtcggaagcggaaagaatgagccatgttcaatctatctttgtgcgaatggcggcactcaacgcattgcgacacgtgaaattgatcaaatcttgcgtcaatacactgaaacgcaattagcagaatgtttgcttgagtctcggattgttgatgcacaccaatggatttactttcatttgccagataaaacgcttgtctatgatgcagccgcatcacaagccacaaaccagcaagtctggttttttttatgctcaggatttggtgagggtcgttatttggctcaaaaccatgtctggtgctatgacaaatggattgttggacatccatatcagccaaagctaggaacgcttacaaacgcatctggtgaacactggggtgatgttacagagtggtcgttcaatacgcagattatctataacgaatcgcgcggtgcaatcttccatcaacttgaattggtggccctaacaggacgcacgttgtttggcgccaaccccacaatctgcactcaattttctgtagatggtattaactggtccaatgagcggtacattcgcactggtaagactggtgagcgcgataaacgtctcgtctggttccaatgtggccacatgatcaactggcgtattcaaaaatttaccggaacatcagaaagtagactatcagtcgcacgacttgaagctcaactcgaaccgttggagggataa

SEQ ID NO: 70166 - DNA, 468 bp, Acinetobacter baumannii
atgcaccttcagcagatcaatgatatcgatatcattaattcaatcatcacgaatccagatgtaaatggtgatgtgagcgatgatttttcagtaaatacaaagctcaccgtcttgcctaatacttttgaatggcttggcgtgtacgacgatggtcagttacaaggtttatatgcactggtcccacaaaacggcacgacagcagaaattcatacatgcctgttgccacattttcgcgggaaaaaggcattcgatgcaggccgattactgctggaccatcttttcagcaaatatcaaaaagcgatttcatacgttcctgactacaacagaaaggctaagctttacgcacaggtgctcgggtttacagtcgaaggaattaatcgcagttcatacctaaagaacaatcgcttgatcgatcaatttttggttggtcttacaaaagaggaatacttatgccagtcgcagcagtag

SEQ ID NO: 70167 - DNA, 639 bp, Acinetobacter baumannii
atgccagtcgcagcagtagccgccgcaaccgttgtaggaggcgtattatcaagtcgtgcacaaagcaaagcagctaaatcagctgccgcagcgcaaacagaagcatcacaagcggcaatcgatgagcaacgtcgtcagtttgatgctgtacaagagctaatgaagccatatgtgaatgcaggtaatcaaggcttatctggccagtctgacttactcggcttaaacggtgcagacaaacagcaagcagcaattgatgcaatcaataatagcgcagcaatgaaaacttatgtgcagcagggtgaaaatgcacttctccaaaatgcatcagccacaggtggtctacgcggtggcaatacacagtcagcgcttgcacagttcagaccacaactactcaatcagttagtcaatcagcaatatcaaaacttaggtggattaacatctattggccaaaacgctgccgctggtgtgggtaatgcaggcatgcaaactgctaacaatattggcaacttgcttggttcgattggtcaagctcaggctggtaatgcacttgctcaagggcaagcatcagcaaatatgtggaacagtgtaacaggagctttggggaatctagccggagcatcagcatttaagggcttttga

SEQ ID NO: 70168 - DNA, 1296 bp, Acinetobacter baumannii
atgacacagccaaataactacattcttgatctgccaaaccctatggatactgtgcagaagagctttaactatgggtttaacacagcggctcaggtagaagaagtgaagctcaagcaagaacagcttgcgcttcaaaagaaacaacaagcacaaatgcaagccgacttggctaatctggcaagcaacccttcaccagaaggctatgccaaagtcatgactatgtatccacagctttctgaaaatctgaaacgtgcctacgacaccatggatgatggtaagcgcaaagctgtgttcaatacatcctcacaggtatttgctgcactatccaatcagcagccagatattgccaaacaggttttaaccgaccaagccacagcgtacgaaaacgcaggaaatacgaaagatgcgagcgtgacaaagggaattattaagcttatcgatactaatccagatgctgcacgtgcctcagttggtatgttaatggctggaaccgatcctgataaatttaaggatgtttggactgctcttggttctgaacagcgtgcaaatgaaatgcagccttatgatattgctgaatcaagagcaaaaactgcatatacagaagctcaaacaaatgacattccattagctgcagaagaccgtcgtactggtgttgagaatcaaaacaaaaagattgaatatgacaaccaatacaactatgacaagttgagtcaggaccaacaactgttctatgctgatttgagccaaaaggaaagaattgaggctgccaagttgaaagcgactaaggcagaaacgcctattcaaagagtagagcgtcttgagaaagttgaaaactattctaatgctgcgaaacaggctgctgatgcatctaacttagctgcaaaactaacacttcaagccaaagagaacagtggtgcttattgggatcgtcttgtgcgtcaagtgcctggaacatcagaaaacacttttgcaaaagatattgaaactttaaaatctcaagtcttccttgctcaagtagaaaagatgcgtgggttaggtgctttaactgataaagagggtgatgcaattcgatcctctattgcttcacttgatattaatcaggggccaaaagcagttcagcaaaacctttccaaaattgctcaacaaatgtcagcagcagctaagagtgccaaccgtaaagctcaattatatgcaacaaaaggggaaggctattctcctgctgttatgagtgctgcaaagactcttggcatttctcctgctgaggctcagaagttcgttaatcagaatggattgtaa

SEQ ID NO: 70169 - DNA, 2505 bp, Acinetobacter baumannii
atggcaacaagagaaaatttcgaaaagctattaggctcgccaaatgtgcagaagatgcttgacctgattgccaatgctgaaggcgtccaacatggctataacacattgtttggcaatgaacgttttgatgacttgtcaaggcacccgaatatttcaaaagagtttactcaaactgatggtaaaaagaatcgaactaatgcagctggtcgatatcagtttatgaaggacacatgggatgatgtgtcaaaacagcttggtctaaaagacttttctccaaagaatcaagatattgcagccgttgcattattagctagaaacggtgcattgccttctgtattgaaaggtgatctaaaaactgctgtccaaaaatctggtggcacttgggcatctttgccatcatccaattatccgcagaaaaaaagaacatggagtgatttaggaatatctaatcctgcacgagatcaatatcaatcacaagcttcaaaaattgttactgcatacaagcaaaaacagaaggagcaggaagtcaaagctcagcctgtagatcaagcagctcgctctcaaaaaattgtggaagcttatcaaaaagctcaacaaaacggacaaattaagagtgctgccaatcaaccacaagggctgccagacttcgatgcaaatggtgtgattacttatgatcaaccgcaagcagctcctcctacacctgagccatcttttgctgataaggcacttggtttaggtgaaactgcattatctgctgccactggagcaacaggtggtacgcttggaatgattggtggaacaatttctcaagcaggccgtgagatcctttctggcaactttggaacacctgaagcggcacaacgtatttcacaaaatgcggcagagggtgcagcagacttaacttatgctccaagaactcaaactggtcaggaatatactcaagctttgggtgaagtatccgagccattagtagcgttaacaccagctttgagtgagttagcattagctggacaagctgcacgtggtgttgctccaattgcacaagggcaagctatacgagcagggcaagcggttgcaccaatagtagagcgtgctgggcaaatggcagctagaccagttcaggccgttaccaatgccacacgctcaggtgttcagagtttgggcgaaatggttaggttaagaacaccagaagcagagggcccagcgcctgcgaacgtcggtgcagctcaagttgatcaagctactgttcgtcaatcattagctcaagatttgccatattcacctgaacttactcaaggtcagatgacacgcgatcctgggcagctaaagtttgaagtcgaaacagctaaaaacgctgagcttggtgcgccaattcgacagcgttatgagcaacaacatcaagtgatgcagcaaaatcttgatgctttcattgatatgactggcgccaaagcaaccaatatgcgtgaagcgggaattgcagttgataaagcattgcaaaagcaggctcagattgataagaaccgtgtacgagtagcatacgccaaagcggataagtcggacgaggcgcaatatccggttgacttaacacaaccggtaaaaaatggcgaagagtcaatgtctgttctggattatctcaattcccaaccagatcttaaatctacaccaattattgcagatgctaaatcaattgcgcttaagcttggtattgcgagtcgtgatgaatcaggaaacctaattcctgcaagaccaactgttaaacaaatggaaaaatggcgctctgaaatcaatcagaatacaaacattgaagctccaaatgtgcgacaaacagcaattctcaaaagcatgattgatcagcatgtggaaccggtggcaggtgatctatatcgagcggccagactagagcgtaaaaaaatggcagatcattgggaaaaccgcaagatcattaccgatttgacttcaaataaaaaaggtacagaagatcgtaccgtggcgcttgaagatattcaaaaacgtatcattcacgatggttcgcttgatgatttgcgatttgcccgtcgtgcattgttgacagctggtgatgaaggcaaacaagcatggaaagacattcaaggtcaaacgctacaagagattaaagatgcttcaaccgcaggtgtggcaccagatgcgcaaggtaatcaaatgatcagccctgctgcactcaacaaagcaatcaataaactggataaagaaggaaagcttgagtacatctttgggccacaaggcgctgagaagcttcgagcagtcaatgaattatccaagacactgtttactgtgccgagttcagcagcgatcaactacagcaacacagcagcgaccttaacagcagcgcttgatatcgcactatcaggtttttctggattccctgcgcccgttgcatcagcacttcgtttagcaaccaagcacatcaaagacaataagattcgcaaacgtgtgaatcaagctcttaatctcaatcaatcaaactaa

SEQ ID NO: 70170 - DNA, 2022 bp, Acinetobacter baumannii
atgagcagcaaagtactacctccatacccacttttcaacgatatagacggacgagcgctcaatgctggttacatctatattggtgaagcaggtaaaaatccagaagtatatccgattcctgttttttgggatgaagatttaagcattcccgcttctcaaccaattcgcacacgaaacggctattttgctaaaaatggtcgggcagggaagttgtatgtagctgacgagaattgctcaattactgcaaaaaataaaaaacaaattgtggttcatactgatctttttgctgatttgttcgggcaaaaagacgctgtaaaaaccgtggaattagtgtctgatctacaaaatttagtaaaatttgatggtcgcatagtttatgttaagtctacagtaaagcccctggcaggactaacagttccatatgcgggaggtggtgagtttgtttactctaatactcaaaacttggttgaggatgggtacattgttgtaaattcgggcagtggacaatggattaaaagttataaatccttatctgtagcggattttggagctagagcagatggagtaactgattgctcagcagcattccaggcttatattgacagcccatacacatcaaacattcttcaacttgaagatgctacgggtcgctatgttcttaagagtgaagttgattttaaaaataaagggctaaacggtaacgggtatggagtacatactaaccagtcttacaagagttgcatatttataccgagtgactttaacggcacaaacgcaatgaaaaatgtggctgggtcagtcacgaatataaacattaagcaagaaagtgcgaacgataaagtttcagcattacacattgttccgtacatgttcacattaagtaatgcaaatattgacggttttgcataccaaatatggagcacaaaagaaacttgtgtcacaagatttgttgattttatttctttaaatgcaaaaaaatccgcaatgtatttccccgacacaggtgttgatcacaccacaacatggctggagcgttgtcatttccaatggggtaattatgcatatatatgtgatggaaactgttacggatttagctttaaagacatcattattgaatggatgtatggaggcttaaagtcaaaactttttacaaactgtacttttgatacgttttggtgcgaaggtcgtcaaggcaatacaaataatacaaataaacctgtaattgaacagattacaggacagcagttattaagctgtcatgctgctaattttagatttattggagggtggacgtctccccatctggagaacaaggaattaactgcattaatgggtggtattacaattcatgatagtgagttgtttgcttcaaactcgactggtgcacgaatcgtattttcaaatactggattaaggactagtttttctgattggtatggcggtgtaaatcgtcgtttgaaaattcaaacacaacctacctcgactgaaagtggttatgtaacaccgattgaaatatcaacaccgaataccggtttgtattttacaaatatagatgacaatgattatcgcgccagtgtatttcgtcgcgttgttggtaaaagcatcaattcaaacgctcaatatcttgcaaaagaaactctatctgtaaatgaatttagtgccgaggcatataatgaaattactggtgatctcggtaaatttcatgcccccctaatgttaacctgggatactaatatcggagtactgaaagctgcgggttgggtattaactaaagtagctatgggccaatacagattatctcgagatacggggaacactaaagaaattattaatggacatctaatagtttcaggtgttcattctggcacatttaatattcacagagtttcaccaatagattcttatactgggtcttggaactcatatcgaatcgcagcaggatttgatatatttttcgctaatctagctggcaatccaacggatcctagccgttttactgttgctttaacattagtatcttaa

SEQ ID NO: 70171 - DNA, 399 bp, Acinetobacter baumannii
atggatatagccagattaattcaaattccaaacactcaaatgtttaatgacggtgttatggatcaagcatggtatatgtttttctatgcactaagtcaaaatgcaagcaaaggtgaggaaattgatactagcaaccttcttcaactatctagtcagctgcctgcagtaacaatctccaatgaagttctttctgatattgatgatttgcagagaaacttcccaataagtccatatgtacaaaatgaagatattcaaccgatgccaactgcatcggttttttattttgagcaagaaaccattttcccaacatcttctatctgttgcgatgacaggatttcttccttgccgacggtacagatcactaatgacatgcaggtaattatcaatggcaatgattaa

SEQ ID NO: 70172 - DNA, 1323 bp, Acinetobacter baumannii
atggctattgatccaagcatcattacgaatgcaaccctacaacagcaagcacagcaaaatgaaatcggcaaaaatcttgcagggctaacaggtgcacttgggcaattggtgcttggtcgtaaagctcagcaaatgagtcagttagccacaccccaagagcagcaggcatttgctaatgattcaattttttctccatacttgaaccgggtattaaaggcaaagcaagctgaatcccaaaaaaatgctatcgatttgcttaaagctcaagctgagataggtaaaacaaacagtgaagcaactaaaaataatgctcaagcaggtggatttaccttagataactcacagaaaaagtttggtgctgttcaaagcgtatttcagcaagctgcaatgactggcgataaagggcaagtattgttaggtctggacgcattgcaacgtacaggtatgatatctccggaagattattcacataacattgcgattgttcagactatgacaccagaggacgtcaaaaaatatgctggcgggattgcatttactgacaaagatacagctccattcttgtaccaaaccaaaaacaatgaagcagacaatgctacatccgttgctaacaatatccgcacaactgatgcgtcgcgttatgcgactgaaactgcagcagcgacagcagataaaaaccgagctcaagatgctcaacagttcagtcagaaacagcaacttgatgaatggttagcgaagaacaagcctattggaactgagatggggaacgatggttatatgtatgccatatatccgggtgggaaaggagtaagaatctcagatgagagaggatcgcccatccaagttcaaccaaaagggtccaatagtacggttgcttctcagaatgaagaaaagcaacggattagcagggttaatgccgtgctcgatgagattcaaggaatcttgccgcaagctacagcgagttatgcaggccgtggtatcgatcttctagcacggggagttggcttagcaactccgggtgatgtagcaactggcaagcttggaacattaggcgggcaattagtagcgcttatgccgaaaatgtcaggccctcaatctgataaggatgttgcaatgtacaagcagatggctggtcagttagatgatccaaccattccattgcaagttcgacaggctgcattagagactattcgcagcttgaacaacaaatatgctgaaatgaatgctcaaaaaggcacaaccgtaccttatcgaaatgatgtatcaggcaatacacagccgcaaaaccaagcaaaattaaataatattttatttgggcagtag

SEQ ID NO: 70173 - DNA, 2289 bp, Acinetobacter baumannii
atggcattactactttctgccgtacggacccgcttttttgacaaaagcaacaagcctcttgctggcgggaaagtgtatacctatgaggcaaattcaaccgacccaaagcttacttggtctgatactgatttaagtgttcctaatactaatccagtacttcttgataatgaggggactgcatatgtttatctagatggaaactataggattcgggttgaagataaggatggagtgcttattgaagacaatcctttcgttcaaagttttttcactaaatttggtttgccagctgatttagtaatagataaaaacgaaacacaaaaagaaattaatgataaaacgattcaagaaatcgaatctattaatgatttaatcaatataacaccacgtaaagttggacaagttgtctatgttaaatcatattacgcaggcaaaaatgtaggtgggggttactttatatatgatcagtcaaaatcaacaatcaatgatggggttataacttttaatggctgggttcgacagtggaataatttagagatttatcctgaatatgctggcgcgttagaaggcactgactgcactgtacagcttcaaaaagtactcgatttcattagtccaacaaagtttgatacctctgttgcaactatgaataatagcgaaagtaagcttgttttagtactaccctctacaaaactaggttacacaatcactgatactctttggattggggctggaacgaaaattaaaggatctggcaagctttcttttaaagagccttatgctaaattggcatctagaataattacagatttttcagatccaagaaagcccgctctgtcttcatccaattggaaaacagatggagtccgtgttgcatttgatgagatgacagatggaaatatgtatgacagtggattaattagccatactccagaccttgaacttattgatttcaatttagtaactaaaactggaactagaggttacattggagcaaggatccaaaattcaccaagatcaaaaattaatattggtagttttggttttgattatggcatcgtaatgaatgcctcatggacatcaaatgtagatagtatggctctgtcatacaagtgtggattactagctcaatttgataacaacaactgtaattttgatggttattacaacgcaataacagatcaaaacccgcttgcgctaactaatttaattaacttttttacatctgatactggcaccgatacatctcttaatgacataaacaagagatttggatttgtgtctaggtatgcttatggagcatcttcacagaatctaacttgtgaggggaataacgtaaatacagctatttgtaatggagattattcaatctctgttttatatactgaaaaagctgttgattacgggttggtaacattcgcaaacccgacaggagtaattattaattcttatgttggctcatatgattctgcaatcttttgttcaggtgttaattcaaaagttattgttaattcaatcgagaaggatggcacaactaaagacaatatcttcaagatactgaaccggtataatactatcttacaggttcctttagctcttaatgcctacaagagtggtgttacatatgcagaagatgatggcacagtgtatgtaggtacatcaggaaatgatttaaatagcgggaaaattaatagtgaacctttattaacgcttaatgaagcctttaagcgtgttgtagataaatttatttttggagataaaggaattagaaatggttccaaaaaaatgcgaatagtttttgtgagtggcggtgatttcactttggatgatacttttattttaaataatagtgttgaaatctcatctttaagttctactgcaccaaaaataacatttaatgggcatattgtattaaataatgtaaatttctctatttctgattgtgatcttgttaaaagcaatgttgcaggagcacttgaaaactcaatgttctgggcaagaagtggaaacaattcattatcaataaatggtggaaatctgaatatcctttcaggtggtgttatttattgtgattttaatggttcttctaatacttccttattattaaacaatgtttcaactattggaacttcagtttcacaattgatccaaggaaactataatgacacctcgccacatattatcaatgttgtccgctcaaagggtaccatcagctctgatattataggaagaccagataagggaatttcagtaccagtatcttggcagaataaaattctaggattataa

SEQ ID NO: 70174 - DNA, 996 bp, Acinetobacter baumannii
gtggaattgtctttacttctgtattactacatttttttaatattccttgcttttgtaactgcactattcaatacaaacacaagattaagctatttcatattctttcttgtgtttgtgggttattctgtattatcgagagatagagttccaaaaaatgacatattagcttacaacagctttatggatatacctctttatgcctacaaagatatatattttctaagagaacctgtttactggtttagctcaaagctgctttatgagtactttgacaacccttttcccgtatatttgataattgatatattctctattgctgttttcctttttgctctttataaaaacaaatatcaagcatacttcttatatctctttacagtattctttgtaagtgtacttggttttcagaatgtttatagacaatatctggcaacatttttcatattagctgcaatatttctgattgctgaaaataagttcaaaactaaagtatttactttaatacttggttttttaactcacaatgttgttgctctatatgtgccaatgttgttagctactagtaagataaaaagtatttttagaatgattttggcactaatccctcttgttgttttcttgggagttgttgcttcttcaaaatcaaattcagaaacaggagacacaaatccaattctatttattgctgtatttattgtaacaatgatattttatattgctcttaataaattaagatttacagggaaatacttaaaatatttttattactatatatactctttaatcttgattattgtagcactaccaatttttggacaagcacaagttaaacgtattgcaatgatctgtctattaatttcgttatttgctatttacgatacaatagagtcaaaattcaaaagagagaatctaataatagttagaatactcttcatattgttcgcaatttcaccaattctaatatcatcaactctacaagatattattaattattaa

SEQ ID NO: 70175 - DNA, 495 bp, Acinetobacter baumannii
atgaatatctataactctcctgttaccaaaatagctttctgggtcatagtcattggtggtgcggcttgcctgcttatccctttgtttgcacctcttcttccgctgcaatatttgaaaggttatggcgaaataggagatgctcttggaggtatttcaagcccatttctacaaattctgggttcagtgcttctctttctggtgttaaaagctcagattgacgctaatggcatcctccatcagcaaatcgaaaaggaatatacgaaggagcaactgaggcacgagttgaatcagcttcacgaactttatatgttcgtcgaaagaaacattaaaaattttagctactatcaggaaaagatgattgatggcaagtcgcaaatgatccttttgcattcccggcgagcgattaaatgtttcattgaggatctagagagcttagatgttgatattcacaaagatgacgacattttaaggttcgacggggttgatgtgtgctga

SEQ ID NO: 70176 - DNA, 936 bp, Acinetobacter baumannii
atggatgttctcagtgaaattttagataaggtagagcttactaacagctactggtatagaacctcatttgcgggagactggggcatcagcttcccgcaggaagagaatctagcgagatttcacatcgtgactcatggcgagttttggtatgaggtgccaaaacttaaacttaaagcattggcggagcagggcgatattttgatctttttcaaagggatggagcacaccatggccagtgcaccaaaaatcaaggccgagcctgcggtcgaatttagagctaaagccaacctcaccgaagctcaagttttggaatacggtgatcagagcaagctcaaagccaacgtcgtttgcggacatttttgttttaatggcggacccgatcatccattcttaaattcgctgccaaatgtcgtgcatatcaagagtgctgataactcccactcgccttggcttgccatgcttttaagtattatagagcaggaagcaaaatcagggcttcctggaagcaacacgttagtcagaaagctgaccgaaattatcttcgtgcaagcgttaagaatccacatgtacaaatccaataaaaatgctggattcttcaaactgatcgaaaatccgcaactcagcaaaaccttggaagctattcatcatagtctcgataaaaaatggagtcttgacgatctcgccgggattgcggggatgtcgcgtacgaactacagcgtcaaatttaaggagctgtcaggcatgacacctcttgattatttaacctattgtcggcttgaaaaagcaaagcagctgcttaaagaatccggtaagtctattcccgaagtgagtgaagccattgggtattcggcacatgaacactttcaaaagttgtttaagaaaaaaattggcaaaactcctagcgcgtacagaaaagaaaattctgaaaaggtgtaa

SEQ ID NO: 70177 - DNA, 237 bp, Acinetobacter baumannii
atgaaagcacttaagaatgttgttatttatacgaaagaccattgtccattttgcgcacgcgtgaagaattacctaactgctgaaaaggtcgatttcaaacaaattcgcgtagacgacgatccgaagacttacctggagttgaaggaaagaacaaatctccaaactgtaccgcaagtttttgtggatggagaattcattggtagtgctacagacttcttctcgtggattgatagctaa

SEQ ID NO: 70178 - DNA, 495 bp, Acinetobacter baumannii
atgaacccaaacatgaccacaacaccaacagtgcatcacagcactttaactacaaccaattcaactgctgtcgttgattcaggacggctacatccaccaccaagcccttcaaaacgtagttttaatgccaaacgtctgatcaacaccaaacaactggagtatcaagcatggctggaagtgcgtaaacagggaataggcagtagtgacgccgcagccgcctgtggcttgaatccttatatgtcgatactggaactgtggatgatcaaaacaggacgggtacagcaaaacattgatgatgaaagctcaggacatgcacctttatattggggcaagcagttagaacccttagtcgcagaatactacagcatgcacaccaaccataaagtccgtcgggttaatgcggtgttacagcatcctgatcctgataaagcctttatgttggcgaacttggattatgccgtagtgggcaatgaagacgtgcaaatcctagaatga

SEQ ID NO: 70179 - DNA, 1815 bp, Acinetobacter baumannii
atgaatgctggtgaaattggaaaagaagcgggacgtatttttgaatataaattacccgcgcattggatcgctcgcagccaagaagatcaagatgaccatggtattgactatgaggttgaaataaaagatacgctggggaaggctctcggcgaagacaacgtttttaaaatccaagtaaaaggagaggagaattgttcatatatcaatgatgggcaatttgtgtctcacagtattaaggttgaaagacttaaatactatttatcattcaatataccagtagtattggtagttgttgatgttactttggaaaaggtgttctgggtatctattaccgacagtgaaaaaattcgagagcagatagaaactacaagtgatgagaacaaaagtgtacatctgcctatacaaaatgaactcattcgaaaagatgataattcatttctaaagctaatcgaagcagtcaagcagtgttgggattatctatctttaagaggaattaagaaagctgtttcgaactatttagttgttagacctgatgaaattgataagtgtattcatgacattggtgatgcattttttaaagcttatcatgtaaaactcaatcgacttcttctacagaaagagtttacagcggtttatgagcaagctacccagatagtacagtcaccactggtccctccaaaggatagattcgtggctttagcttactatgctgaagcgttcgagtctgctccatatacagaaattaagcatgaacaagtcaaagagcgtctaataattaaggagatgctagttcaaatagcgagagcggtacgtaataagatatatggaactactgcgataggtaagttgcgtatagagttatttagaatcaagctggagcaactccatgctttacatttttcaaatgcgaattttgataggaaaagtatcgaatatatgcttatagatgggcagacgcatcaattatatattgatgtgtgtcgagaacttcagaagatcattgttctttgtaataagttaataagccaaagtcaatttgatgtacttgcaatgttatttgttgagttagctcgattactttatttatttaaaacatttcattctgcgcgtggttcaaaacagtctatagagtttcttgaggagtggctctctcaaagtgtcgagacggttatagcttatgtatctttatgtgctgactaccagaagttaggaaagctttattttttatatattaatgaggtttatgaagatcgaactaagttgacttcaatgagagcacttgtgcttaagcactttccagatgcgaaagagatgttggataaaatcgaagtgcatgttgaagagttacatgcagagcagggtttttatgaatcaagtcctgaagaacaaaaagccttcttcaaaaatttagctaagagcttagggatggaccctgatgattcggaaaataaagcaggccagtttgtaaaaatagggcttcaaaactatgatccaactgatgtaatgaagaattgtgaaaacttatttgtacattacaaccctgcgggcatgattgctcaacagttaggaatgcactctttaggaatgattactttggtgtgtttgaagcatcattatgctagaggcgggtggtcattaactgaagcttatgatcaagatagtgagcatgatttcttgcagggatttaagcagcagcattgtaatcaatgtagcgattgcacgttgagacaaaatgattggaagtggagcctaaagtggcatcatgaagaggcgagtaatcataaagcgctcttgggtaagtttagagctttttga

SEQ ID NO: 70180 - DNA, 390 bp, Acinetobacter baumannii
atgtcgaaattgaatgaattaaaatgtgattttgatgagttaaagaaatgtattaaaggatttgaagacggtttagaagcttttgaaaataatttggaggaacagttaactatacttcgtcaacgtcctgcagaatttaaagatgatttgctgggtctggtgcatttgatggataaatctattcccccaaatggtgatgttgaaatagtagaagaggaaattattataactcggttttgtgaagcttcttttgaacgggttactcttatgtgcgatttgtttaaaaagagtagagagtttgatctttcaactttagttaaagatttacttagcataaattcaattatggagggagatcgattgaatcttgaagaagaacataaaggatga

SEQ ID NO: 70181 - DNA, 366 bp, Acinetobacter baumannii; identical to SEQ ID NO: 66781

SEQ ID NO: 70182 - DNA, 363 bp, Acinetobacter baumannii
atgaaaccagaacagtttattcgtgacttcggggtggagaaggcgagaaaggttgttgagggtgctcatagctgggcagatgtacttctagccccaacaggagaatattgctcaatatgtatcccaccagatgatgcagatgaatttgtttctattgaagacctcaagcgtcttgtggagtcggttgacttaatcgagaagcttggcggctatggtaagtgcaaattttacatgactggaatgaagcttaataaatgtgattctgtcaaatgccctaaaactggactgattgtttcacgtgctgctctggaaatagccataaatgactatcgagaatcaatatacggaggcggggatgagtaa

SEQ ID NO: 70183 - DNA, 216 bp, Acinetobacter baumannii
atggatttttcttctgtagcctctcttaaaaaacatttcaatgctgattcagatcaaaagttagctgaagcactggcaaaaattggaatcttaagaactggcgcacgtcaaacagtctatttgtggggtggaaaagttccgcagcacattcaggatgctttggagcttcgccagtaccgtatgaatgacaagcaaagaacggaaaaagcgagttaa

SEQ ID NO: 70184 - DNA, 654 bp, Acinetobacter baumannii
gtgagtattggtcagagaatttcaaaattaatgcttgatatggatgtgagtaatgcaaagctcgctcgcatgattggtgtatcacgcccaaccatagggaactggatagagggtaaatcagcaccaactggcgaaaatcttacaaatctagctaacgcactcaaggtagacccgaactggcttatgtcaggaaaagagtcgcaggtgaggtttgataacaatgtggatctttcccagagaataccttttgaaggtcgcccagttcctgttatttcttgggttgctgctgggtcgtttgagccgattgaaaccgttttaagggatgcagaggttgatgagtatctgcctcctattaaggaatgtggtaggaatggttatgggctaatagtgactggcatctcaatgtcgccaaagtttgagccagaagatcgtatttatgtaaatcctgattttcaggtggttgacctaaaaactggcgatctagttattgtttcctgcgctggagataatgaagccacttttaagcagcttatcattgagggcacaaccaagtatctgaagccattaaatccaaaatgggatgagcaaattatcaagctgacagaggattgccgattagttggtaaggttgttggtttatatagaaagatttaa

SEQ ID NO: 70185 - DNA, 246 bp, Acinetobacter baumannii
atgagctcgctagaacgcaatgagttgcttcgaacagttaaacgtttaggaagaactatttggaagaaatggtcaggctatcatcggcgaagtttggttgaaaccaagatgcattgcatcaaattattgggggataaactcagtgcgagaaattttcaaagccaagtcaatgagattcatgcacgtatggcagtattaaataaatttacggacttaggcagaccacatacccgagttgtcacttaa

SEQ ID NO: 70186 - DNA, 1308 bp, Acinetobacter baumannii
atgctagaagtattaaaaaacacaacatatcggcatttgttcttagcccaagtcatcgctttgattggtactggactcattactattgctctagctttacaggcttatgacatcgcaaaagagcaagcagcccaagtcctgggtattgccttggcgattaaaatgattgcttatattagtgtcgcacccattgcctccgcatttgcagaaagattaccgagaaaaaaagttttggtagggttggatgtcattcgagccttaaccgcattgtgtctgcctttcgtgactcaaatctggcaaatctatattttgatctttattcttcagtctgcctcagctgcttttacccccacatttcaagccatgattcctgatgtattgcccatagaagaagagtatacaaacgcgctgtctctatcacgattggcctacgacctagaaaatattataagtccaatgctggcaggcttgttactcactgtgatgagttatcacaacttgtttttgggaactgtggttggatttattggttcggcactatttgtagtcagtgcaaaattaccaaatgcgaaaatgccggagtttatcggggtatataaccgaatcaaacaaggcgcaaaaatatatttcagaacaccccgcctaaaagccttactcgctttaaatctggctattgcttcagccagtgcggttgtcattgtcaatacggtttttttagttcaaacgacatttgaattaactgaacaggcgactacttgggcatttggtttatttggattaggctcaatgcttgctgcatttgcattaccaaaaatattagataaattgaatgatagaactgtcatgctttcaggcactgtggttctcgtcgttggattgtttagcggttactttatttctgcctatactgggctattagccctctggtttatattaggtattggttattcagtttctcaaacaccaaccggacgtcttattagaaagtctgcatcaagtgaaaatcgaacagcgctatttgcagctcaatttgcattttcacatgcctgctggctaatcacttatccattagtgggctggttaagtacaagctttggaacgcttataacttttttgcctatggcattcatcgccttggtatcaatagtcgtcgcgtttgttatctggccaaaaaacgataatttagttttagaacatactcatcttgatttaccagaagatcacgagcatttattgcagcacaactataaaggtaagcatgaacatgaatttatgattgatagctatcaccagcactggcctaaatag

SEQ ID NO: 70187 - DNA, 426 bp, Acinetobacter baumannii
gtggcttatatttttttattcttaagtgcatttggggcagcaacattactgcctcttcaatcagaatctgtattggcaggaatgctaatattgggagaatattcaccggttttacttataggtgtggcaacgctagggaatgtattaggttcatgcgtgcattggtggttgggagtacaagttgagaaatacaaagagaagaaatggtttcctgtgtctgaagaaaagctattaaaagcacagaacctatatgggcgttatggttcacctctactgctattaagctgggttccagtgatcggtgatcccattaccctggtcagtggaatgcttaaggagaaattttataagttcctttttttagttttgatggctaaattttcccgttatatttttatatatttgatttatttaaaaatggtctaa

SEQ ID NO: 70188 - DNA, 267 bp, Acinetobacter baumannii
atgtctcacttaaatcagaacaaaaaaattttaaatcggattagacgaattcaaggtcaaactaatgcccttgaacagaatattttaaattctgaaaattcttgtattgaggtattacagcaagttgcagcaattaaaggtgcgataaatggcttaatgaatgagttaatagaacttcatcttagagaacatgtactcggtgatactgaggaaataaaggaaaaagaactgaatgaatttttagctttagttaaacgctacttataa

SEQ ID NO: 70189 - DNA, 1902 bp, Acinetobacter baumannii
atgtcaattaatggtttctctagctttgatcccttagacgctaaacagattcaaagtactgaagtagcagccttggcacagaaaagagagttgaaaaatattttaggtagttatgtaggatggtttgatcctttttgtgagttaatacaaaattctttagattcgatagaaaaaaagttagaaacagctcctgttgaatatagacctagtttgtatataacgcttaatctacaagataattctttgattgtgacagataatggtttaggcctagatgaaccacgctttactcagtttttatgtccaaatatctcttttaaaacaccaggaaaaaaaaatcgaggacataaaggtgtaggggcaacatatatagcttatgggtttaatgatgtgcaagtatcgacaaaaacaaactctttcaaagctattggtcgaatgcaaggagcaagacgttggctggatgatgaaagtccagcgggtaatcctcaaatgtattcagaccatgaagctggatacttggatcctgactttgaagagtttgatacaggtgtatctatttatctgaaatttgataagcagacccatcctagtgatttaaattattatcaaacaaaaaaacctgaacaatggctcaaaatattaaaagttaaaacaggtataggtgctttttttgaaaataaaaaaataaatatcagaataagtataatagataaaactggtaataggtctttccaagactttcaaggggtggaatatttatggccagaaaatgaggttgtaaagaaggttagattacgcgatatattaactaagcaagatgaattatatgacaaagggaaggatataaaaaaagatcttccttcaaaattaaaaaatgctgagattctatatgatttctgggatacaaatgaattgctgagtttgtcagataataaaagactaggtatttcttttagtgaggatgaaatttatttaataaaaaaatatgaagtaaatgttcatgcttcatatgtttatacagtaaaaatttgggataatatctgtaagaaagtagattatagaaagaattcaaaattactttacggtggtgttcaaatttctgcaaataatatgccccagggtaatttaattcagattcctttaaatagaaatattggaaggcaaaatcaacttcattgtgtggtccatttcaataattgttcggccgatttaggacgaaaaggatttaataatgaaattagcgagcttgcaaaagagttatcaaagaaaatagcagatggcccttttttaagatttaaatttgctctacaagtgaatacaggtaattcaattagtgatctggaaagtcagcaaaaaatagctgactggaaagcggaaatggcgagacatgaggagtctatgccattaattttagagaacgagaacttttttttacctcaacgtaaaatttctattacttctgttcctacaagagaacaagatgtaattgctttatttaatcaaatgatagctggaggagttatacgtggattaagaataatgtccactaatgaaagaactagttatgatggtttatatcgaataattattgaagagcctattgatcatcatctttatgatgaaaacaaaaatccactaggtatttctgagtacgctattcctaatgaattacctttacttatggaaccaaggattttagaatataagtttaatatggatgcattatttgaagatatctcaaatggtaataaaaactcaaatgatttagatcttttaatagtgtgggagtcgggttctaattacgaagaacattataaaattacatctttattagatccggataatcttaacttaaggcagggcagagtaaaacttgaagtgcgacataaaccacctaattaa

SEQ ID NO: 70190 - DNA, 1518 bp, Acinetobacter baumannii
atgctgatcaaaggtcaggacgtgagccgaattaaactcggtaacacgctgtcgaatgatcaactcgcattagataaatttgactatatgttatctaacccaccttttggtgtggactggaaaaagatcgaacaagacattaaagatgaacatgaacacaaaggcttcgatggtcgttttggcgcaggcttgccacgcgtgtctgatggttcattattattcctgatgcacctaatcagcaagatgcgtgatgccagcagtaccgagagcggtagccgcatcggaattatcctaaatggttcaccattgtttaccggtagtgcaggcagtggtgaaagcgagatccgtcgctatattttagaagtcgacttgctggaagccattattgctttaccgaacgacatgttctacaacaccgggattgccacctatatctgggtactcagcaataaaaaagccgctgaacgtaaaggcaaggtacagctgattaatgcctcaaacctcagtaccaaaatgcgtaagtcgctgggttcaaaacgtaactatctgactgaagctgaaattgccaccattacccaaaattacggtgactttgtggcggtagatactttggcaaatgatggcgaaaccgaacagcaaaaaccattcgccagcaaaatctttgacagccatgaatttggctaccgtcgcgtgaccattgaacgtccattacgtttatcggcacagatcacggatagcgcgattgccgcattacgttttgccccaaaaccgtttaatgccgtgatgcaaagtatcgatgcacaattgggcacagcctttggtacagcgtggacagcagaaacttatggtcagttgcaggacgtggcgcttgaggtccgtgccctgattaaagccgagttcccagagctgaaagaaaaagacattaaagaggtactggacagcaaaatctggctgttccagaaagccttgatggaaaaagcccaagctttacaggaggtgattggcactgagcagtttgatgattttaaccagtttgatgaagtgctgaaaaaagccctcaagcaaaccgacatcaagctggatgccaaagagaagaaacaactgttagatgccattacttggaagaatccggaagcggaaccggtgattaacaaggtgctgaaacaggcagaaaacccgctgtatggccagttcagctaccagggcaaagtggtcgagtttgtgcaggatggggatttgcgtgatgcggagaatattgcactgaatccaaaagtcagcaccacggagctgattgaagactactttaaacgtgaagtacagccccatgtgccggatgcctggatcaatgccgataagcgcgatgaaaaagatggcgagattggcattgtgggttatgaaattccgtttaaccgtcatttctacgtgtaccagccaccgcgtgatttaagcgagattgatgcggatctggatgcggtgagtgctgaaattatgcaactgctacaagaggtgcattcttaa

SEQ ID NO: 70191 - DNA, 1518 bp, Acinetobacter baumannii
atgctgatcaaaggtcaggacgtgagccgaattaaactcggtaacaccctgtcgaatgaccagcttgctgtggatcagtttgactacatgctgtcgaatccaccctttggcgtggactggaaaaagatcgaacaggacatcaaggacgagcatgaacaaaaaggctttgatggccgtttcggtgcaggcttgccacgtgtgtccgatggttcattattattcctgatgcacttgatcagcaagatgcgtgatgccagcagtaccgagagcggtagccgcatcgggattatcctgaatggttcacctttatttaccggtagtgcaggcagtggtgaaagcgagatccgtcgctatattttagaagccgacctgcttgaagccattattgctttaccgaacgacatgttctacaacactgggattgccacctatatctgggtactcagcaataaaaaagccgctgaacgtaaaggcaaggtacagctgatcaatgcctcaaacctcagtaccaaaatgcgtaagtcgctgggttcaaagcgtaactatctgactgaagctgaaattgccaccattacccagaactatggtgattttgtcgcggtagacaccttggcaaacgatggcgaaaccgaacagcaaaaaccattcgccagcaagatttttgacagccatgaatttggctaccgtcgcgtaacgattgaacgtccattgcgtttatcggcacagatcacggatagcgcgattgctgcattacgttttgcgccaaaaccgtttaatgccgtgatgcaaagtatcgatgcgcaattgggcacagcctttggtacagcatggacagctgaaacttatggtcagttgcaggacgttgcccttgaggtccgtgccctgattaaagcggaattccctgagctaaaagaaaaagacattaaagaggtactggacagcaaaatctggctattccagaaagccttgatggaaaaagcccaagccttacagaatgtgattggcactgagcagtttgatgatttcaaccagtttgatgaagtgctgaaaaaagccctcaagcaggccgacatcaagctggatgccaaagagaagaaacagctgttagatgccattacctggaagaatccggaagcggaaccggtgattaacaaggtgctgaaacaggcagaaaacccgctgtatggccagttcagctaccagggcaaagtggtcgagtttgtgcaggatggagatttgcgtgatgccgagaacattgcactgaatccaaaagtcagcaccacagagctgatcgaagactactttaaacgtgaagtacagccccatgtgcctgatgcatggatcaatgctgacaagcgcgatgaaaaggatggcgagattggtattgttggatatgaaattccgtttaaccgtcatttctacgtgtaccagccaccacgtgacttaagcgagattgatgctgatttggatgcggtgagtgccgagattatgcaactgctacaagaggtgcattcataa

SEQ ID NO: 70192 - DNA, 213 bp, Acinetobacter baumannii
atggctgtgccacatactactgttttacaacttttaggcaagtacgtttcattcaatactgacacctgttttgaaacatatggagttatttccaacgtcgtttttaatatggatggtactgttgaaataagtattggctggcatgagttctatgattattctgctatcaataatctaaagattattggggaagtcatcttgtacccatcataa

SEQ ID NO: 70193 - DNA, 465 bp, Acinetobacter baumannii
atgtcgcacttcaagttttactctgccccttatttaaacatgagtaatcaggctcagtttagtttattgcttacacctgattttgaacatatcgaaaatttaccaacgcttttaaaaacgctgttatcccaacatgatttagtaaatcttaagttcaatatagtgggtaagcaaaaacagtttaatcacgtattagcaattttaaatacgcttgattcgaaatataaacagcgcattatgctgactttatcattacccgaaaatagtcagcaaaatgcctggcaagaagtgaaacaaggtcttttcaatattcagcgcataggtattcagaaatttggggttgatggctataccaatgaaaactcaataaatgtttatgaatatttatataactcgattagcttgaattcgagttcggtcatgtatcagccctttgcaggtctcgcgactgaggggaaaaagtaa

SEQ ID NO: 70194 - DNA, 294 bp, Acinetobacter baumannii
atgattaaattagaaggcacaattattaatgtttttacccagcaaggtggcaaagacaaaaaaactggtgaagcatttgccgatcgggacaagattcaattgttaggtgagtttgaactccctaacggtgataaaaaaaatgaattaattgatcttactgttgaaaacggtaaggaatatgagggtatgaaaaataagcgtgtgagcattccatgtggtgctcttgcttcgggtcgaaatgtgattttttatgtcgcaaaaggcgcaacacctaaacttttaaacatagtttga

SEQ ID NO: 70195 - DNA, 417 bp, Acinetobacter baumannii
ttgaaaggcaaacgcctaagtggtgcatttggttgtttatggggcgtaaaaattcctgaaaatcttgccgatgaactaccagatgaaaaagatcttccttatctcgagatgttgtacaagtttgtcttttcgaagcagtcttactatgacttaacaatgacacgacacgtagagccacaaacgattgaacgacagagtgaggaggaggagcatgccgaccgaccgaccgacacgaatggagtgaatgagggggtggcgaataaggacgacttaaggactgaaggaggaggaacgttcgaccgaaggacgaaaggaggacgaaaaaaacaacactggcaagtacctccagtaacgagggtacgagtgaaaaaacggattaaaagatgggatggttatttgtgtgttatgcacatgtaa

SEQ ID NO: 70196 - DNA, 501 bp, Acinetobacter baumannii
atgaataatcaagcttatgatcaaaaaaatagtgaagactatgaaactaatacgttaagtattaacaaagcactattagaaatcgagcaagatccaaagctcaaggccactattgcacaattatcaaaaatgactggtattcatcgaaatacaattacaaaccgtgattggcctatccataaactaaaagaaatcaaggacaaaagaaaactcaagaatgaggaaagtaaaaaccatatggtggttaatgaaatttcgttgggagaaaaactagttctaacacaaaatgaagttatctattggtttaatcaataccaagatataaagctttcttttgaaaatacaaataatcagttaaaaaaactaaaagaatcgaatgattactatagagagatgtatgaaaagcataaaaagcaagttgttttagctgagttagaaatcaaccgcttaaaagaactattagacactaaaggtattaactcagaactacttaaacattag

SEQ ID NO: 70197 - DNA, 633 bp, Acinetobacter baumannii
  misc_feature (574)..(583): n is a, c, g, or t
atgatcatcactaaactatatgtagacaattggtatagctttgttgattgtgaacttgacttaacttattcaagaaaaattaatgattctacaattccatatgagtatttaccaaattttgaaaatataagatacaaacgagtagtaattttaactggagctaatgcaactggtaagacatctttggctaaaattttagtagctataagaagttttattaataacaaagaaattaataatttttttagggaaggaatgcatccagataaaaatgagttagtttttaatattgaatttattgataaagaaccttcaacagaacctgctgtaataggtgagaattactatagttatattcattatttaaaagttaaagtattattaaatgaaagcaaagaaagacgtcgttttcattttacgtataaggccgttgaaataaaaaaatctgacaacatacagaaactaagagatttattagaaaaattagatgaaaatttttctttaaaaggtagagaatcattttacttaagtaattatgatgaggattattctagggttaggttcaaagatgcannnnnnnnnnttattctagtgttaggttcaaagatgcattatttatctttaataatttag

SEQ ID NO: 70198 - DNA, 207 bp, Acinetobacter baumannii
atgatcaaaattttgagtcagcatcagcccaatgaaattgtttttcagtttgcagatgatgatctcgaaaatatatacagtattatgattcgtcagcaaaaaactgaacaagaacctgactttattaaaaagttaagagaaattatgacgttgcgtcttgaggtggaatataaaattattccaattccacctgaggagataaattaa

SEQ ID NO: 70199 - DNA, 1584 bp, Acinetobacter baumannii
atgaattctgaattttatttgcaaagaaagcttcatgatcatgaacgagactacgatgaactcgaagttataaagaattttagaataatagttatcttagctgaacctggggctggtaaaacctctttactacagagcttttcaaattatttaaatgttaagaaaagaacagcgaatactttttcgtataggaataatctagaaaaaaattcaattttaattattgatgcattagatgagttagtaagaatagatcaatcagcggttaatagtttactaggaaaagccgcagatctagatccatctactttaattatttctagtagatccagcgaatgggatgaatcttatactagaataattaaagatcactttgagattgaaccacgcattcttcgtctgtttccttttaatgagttagaacaaaaacagatctttgaaaattataaattagaagaagattttcataaatttgaatctgaagtaaaaaaatataatttagaacaattgctttccaatcctcagtttttgaagatttttgcagacgcttatattgaaagtaatagagtttttactgatcgaaaatcaatatttagtcaagctgttaaggctttagtaaaagagacaaatattgctttcaatgtaagaaatgatctacctttacttagaaaaatagaatgtactgaggaaatatttgccaaattactgctatcgggatctgagggtgtaagcactaatgtagatgatctagataatctatatccgcgaatagattccttaattaatttggataatacagatcactatacatctttattatccactagacttttcaaactagctgataatgaaagtcaacatcagccgagccacaaaattattgctgaattcgcggctgcacattatttaataagaagaattaatgctaaccgtaatagtatttcactatctcaatgtctttcaattatagctcctaatggagttgtacgtgatgaattgcgaggcttattagggtggatggcagcgttaggtaataaattaacgcaagaaaccctaatccatatcgatccatatgcagttttagcaaacggagatccttcccaactgttatcctcatcaaaaaagtatttattagaggaattaattaatcttgctgatatagatccatattttcgtcgtagtgatatgtggagaaatttttcagtctcaggtttttttgacgatgattctatattaatagttaaatcaatattagttgaatcagaacagggattactaagaggattaattctagagttactagaaaatgcaagaatacttgaatctttagcaccagaattagaaaaaattctattagatgagaatattgataagtatattagaaagttagctggattaagagtaagtgaagtaattaattatgatgttaaacaatctattgtcagacttatagaaattggaacagaatcttcattagatattgctgctaatttgatagaaaaaattgacataatatctgtgcaatatgaaataattttaagctttctaaaaaaatgctcttttttatatccaagtcataattaa

SEQ ID NO: 70200 - DNA, 315 bp, Acinetobacter baumannii
atgcctaatcaaatcaattctaaaaatacacctaaaacttatgatgctagtgacatgcacgacctagcttcattagctgaatcagatatgaactggatgagtgtagcaatcagtcatatcagaaaagaagtaatgaagttaaacaagctggcagagagtggaaaagaagtcagccagtatcatttttctgaattggtcactcatttagatatgtatgaatatttagcagaagaccgccaccgcaaccatgctaaaggggcagaagcatatgagactgaatgggagaaaatgaaagggggtagccacaatgcttga

SEQ ID NO: 70201 - DNA, 522 bp, Acinetobacter baumannii
atgagtaaaattgagcaagtcgtaaatttctttcgtaatcatcctcggtttccatttttaaattggaatactaattatgatgattactgcgctatgtttttatgtttgacgaatattttaaaatgttatattccaaaagaagcatatatggattcatcatatgcatacggttatatggagttcagaggaaatccagatggaatagttgcttttccattaacatgtaaactgtcggaattagaattagttatttttttaggaacaagagaaataatacaacataataatggtgaagcttatttttcagttcaaataagtagagatgatcgttgggatgatcgttgggagagaaatgctcctgaaaatgaatggtataatgagattgctattcttttcgactttaataatccagtagcattacaaaaaatagatactattttcaaaacagtttttgaaaagaaaatgacttttaaagaattgaaatcttttgaagaaagtaatttgaattttgatggtgagtga

SEQ ID NO: 70202 - DNA, 1260 bp, Acinetobacter baumannii
atgaatttacttaaaacaagtgtactaaatggagtggctgttttaattaaaacagccacaatgtttattttaaacaagattttagctctttatgttggtccagctggttatgctgctattggccagttccaaaattttatacaaatggtgacaacctttgccggtagtgcaatcaatactgcagttattaaatatactgcagagtattatgaagatgaaaccaaacaacgaaatatatggaaaacagcgggaagtattgtcttactttttagcttaattttttcattaattattctaatttttcaaaagcaactttcaatttatatttttcatacggatatttatcaaacagtttttgtttggtttgctgtatttctgacattttttacttttaatgcactttttttagccattttaaatgggaaaaaagaagttttaagattggttattgcaaatattgtaggcagtattttttctttagctgtcacaagccttttagcaataaaatataatttatatggggctttagttgcgctttcaatttatcaatcattagcttttttggtaaccctgttattatgttataaagctaattggtttagactctcatatttatttggaaaaatagataaaaccgtagccaaaaattttgctgcttttgctttaatggcgttggtcagtgcaatatgtgttccgctttctcaaatggctattcgaagttatttaacctatgaatatggtctaacttatgcaggatattgggaagccatgatccgtttaagtgcagcatatcttatgttagtcacaacaaccttaggggtatattatttacctcgactttctgagctatctgaaattaaggagataaaggcagaagtttacaatggttataagtttatatttccattagctgccttaggtggtctaactgtgtatattcttagagactggattatagcgattttatttaccaaaacatttttacctatgcgagatttgtttctttggcaaatgataggtgactctctaaaaattggtagctggatacttgcctatttaatgttaagtaaagctatgacaagattatttataaccactgaagtgatatttgcaattacctcaatattattaacttatatatgtacgcaaatttttggttttgaaggggtatccattgctcatctgattaactatggagtttactggcttataatgagtatttgtgtttttaaaagtttaaaagaaaagggtacgatatga

SEQ ID NO: 70203 - DNA, 411 bp, Acinetobacter baumannii
atggctaaagccaataaccagattattgctggaggtgaggctttagatcgatcaggatattttgtacaaccgactttaatttcctttaaaaataccgatgatcctttattttcagaagaaacttttggtccagtagtcggggtaatgccattcgaaactgatgaagaacttattcaactgatgaatcagtcgcgctttggtttaaccgcaagtatttggacaaatgatttgtctaaagctttgcgtttaattcctaagattgaagcagggaccttgtgggtcaatatgcatacgttcttagacccttcggttccatttggtggcgttaaagcttcaggaattggcagagagttttcagatgcatttattgaagattacaccgaattaaaatcggtcatgattcggtactaa

SEQ ID NO: 70204 - DNA, 891 bp, Acinetobacter baumannii
ttgttgaagaatatcataaaagagtatgaaccagatatcgttcatagtcataccttatatccacatttgtttgtagattttctgagcctattttataaaaaaaattataaacttattaatagcgagcatggtacatataactctacattaaaattctataaaagaatgaatttttttagaatactcaaccctcaagctgaactggttacaaatgtaagtgtagctagttgtgagagctatattaattcacatatagtaaaaagagagaaaataaaacctatttataatggtattgatactgagaaatattatttttctcaaagtgttagaaataaaattagaaaaaatctcaatattgatgagaaaattaaagtcattggatatgttggtcgattatctgcagaaaagaatgtcacgaatttgattgaggcaatatcgcggattcatttaattgattttaaattaattattattggtgatgggccggaacgcgtgaatttagaaagattggtatctgaaaagcacttaaatgataaagtttcttttctcggtgctttgtccaatgcaaatgaatattattctgcatttgatatgctagttctttcaagtaatacagagggtttaccaactgttattcttgaggctatttcatcaaactgtcttgttgtatcaacagattgtggtggtgtaagagaaatgttaccagaaaattatgaatttttagcgaaacccaattgtcccgaagaactttctttagttattaataacattttgaaattagatcctttaatattaaatcaaattaaagaaagttgttttaaaaggttggaaatgtatttctcaaatgaagctatgtgccaaaattggtggagaatttacaatgaattgtag

SEQ ID NO: 70205 - DNA, 828 bp, Acinetobacter baumannii
atgggcgcccaaacagttgcaacgggcatgaatattgggattaatcgtcgagtttatatttatagatttatttttaatcttttaattgtttttatgattcttgagttttttttaagagtagttaattcgagtcatacaggttcattttatgactataagtggagtttattgtatttcgattcaaattttgtttcatttattattttattctttttaatgtttgctgttttcttgaaagaaaaaaagatttttaatattgggaaaatgcgtttttcttttttatttgttttattaattcttacattttcaagagcaagcttggtttcatttatagttacctacttatttgttaaatctggaaataaatataaaactccgatttttattctatttttgataggttatttttatatcgcatctgagctaattggtaaatatacatctggtgttagttatgtagatgttgatggaagtttcaatagtaaattttatttaatttctgttgctattgataattataattctattccggtaataaataaattgtttggaatcggcttaaataactttttatattattctgatggtatttttgctcataatatatttattacattgctttatgagtttggagtattaggtactataatgtttatattttttttatgttattcatattataaaataggaaaggatgttgcttatatttatattcctttgttagtcgcgggattctctttgttttcagcttatgtaccatttttatttgtattaatagcttgtatgtacattgaaacaagatatcttaaacaaaagtttaaatattaa

SEQ ID NO: 70206 - DNA, 177 bp, Acinetobacter baumannii
atgaaaattctttttgtaattaattcattaaagaacaaatctggaactgaacgtgttgccattgaactggcaaataaattatcactcatggctaattatgatattactctcttaaatagagaatcaattaaaagtaatacagcttatccagtttctgattatggtgattgtacataa

SEQ ID NO: 70207 - DNA, 474 bp, Acinetobacter baumannii; identical to SEQ ID NO: 59147

SEQ ID NO: 70208 - DNA, 252 bp, Acinetobacter baumannii
atgatgaaaaaaagatataaagttgccttgcttttccttgtacttggcattggggtactcgttactgcctgtgccacactaaatagtcctcaatttggtaaactgcctgaacaggcacgccttgaacgtatccagcaatcccccaattatatcaatgatgagtttgcttatcccgaaccaacaccaatgctacgtgaaggagaaagtacgcttaaaattttttgggacaacttttgggctgaaaaacaatag

SEQ ID NO: 70209 - DNA, 339 bp, Acinetobacter baumannii; identical to SEQ ID NO: 62549

SEQ ID NO: 70210 - DNA, 3939 bp, Acinetobacter baumannii
ttgcagcatgaagtcttggccgatatttttgtccatactgcacaaactcttcctgataagacggctttaattgaagcagataaaacgttgagttatggtgagttatatcagcaagctttaatcatggctcagcatttgacgataagaggggtaaaaccaggtcatattgttgggttatggttgcctcgtggtattgagcttttaaaagctcagttggcaatttgtttaagtggtgcagcatggcttccattcgatatggatacgccggctgaccgtatagcagtttgccttgaagatgccgaagctgtaggaatgattactacagatgaatggtatgcacatttagatgaagtaccacaaacaaagtggaccaatactgaattgcaaaagccgctcagtgaaaatattcctttagctaaaacgaccccagaacaacctgcgtatatcatttatacatccggttcaacaggtaagccgaaagggatcgtgattacccaaagaaatatttgccactttttacgtagtgaaaataatgttttgggtattgaagagcaagataaagtctatcaaggcttttctgttgcttttgacatgtcgtttgaagagatctggctttcttacttggttggtgcaacattgtggattgcacctaagtcacttgtgagtgaccctgaacgtttatgccaaacattaaagcaagaaaacattacggtattgcatgctgtaccgacattacttgctttattcccagaagatgtacctaacttaagaattattaacttaggtggggaaatgtgcccggattcactagttgaccgttgggcattgcctcatcacaaaatgtttaatacgtatggtccaactgagactacggttacagcaagtcttgaggcattggagcgtggcaaactcgttacgattggtaagcctttaccaaactatggcatgttggtcataaacgctgaaagagaattactaccccaaggtgaaacaggtgagctctgtattttcgggccaagtgtggcagaaggatatttaggcagacctgatttaacggctgataagtttattcaaaacccttgggcagaaggtccagatgaacaatcgctctatcgtactggtgacttggctaaaattgatgaatttggacaagtacattgcttgggacgtgccgacgatcaggtaaaaattcgtggtttccgtgttgaactcggtgagatcgaagctgcgctttgcgatattgaaggtattggtactgcggcagttattcttcgtcctgaagacggtattgaccagctcattgcgtttattgcaccagaaattgatgcaaagaaagcaatcgaaattaaagagattcgccataatctcagccaacgattaccaccttatatggtgccaaaccgttttgagattattgaagaagttccgcgtttattgtcaggaaaaattgaccgtaaggctttaaaagcacgaccactcaccagtgtgattgatcgaagtgaatctgaccaaccacagaacctggccgaagaagttttatttggaattttaaatcgcttgtttccaaacatgccgattaaactcgactcagatttctttgatgacctaggtgggcattcactgctagcggcggttttaatttcgaacctacgtgaacatccggaatatagccacttaactattcaaaacttatatcaagcgagaagggttggggcaattgctgcactcatgctagagcaaccaacgcctactgtatttgatagccagattggacaagataaccctcgtaaccaaacttataagtggttatgtggtattgctcagtttattactattccagttttaatctcgattaatatcttgcagtggttagcgccattctttacctatcattattttaccggtggaacacgagatagtattccaaatgcaatcgcgatgtctttattggtttatatcagcgtaattattgccagttttgtggtttcaattacagtaaaacgattattaatgacaggcgttggtgcagggcaatatccattatggggattaacttatttccgttggtggttagcagaccgtattagcaatatttcaccagtctatcttttgtcaggttcaactttacttaacttatatttgaaagcgcttggtgcgaaaatcggccatgacgtaacgattagttcagtacatattcgtatgccatctttacttactgttgaagatggggtgagcattggttctcaagtaaacttggaaaatgccaaagtcgaacatggtcacttggtattaggctcaattcacttaaaagaagatagttatgtgggttcttatgctgtattagaagaaaatacagtgttagaaaaacaagctcatgtaaatgccttaacctcaattgaatatgacacagtggtaccagccggagaaatttgggatggtacacctgcgaagaaaattgggcatgtggacgaacacgctaaattgccagagcgtccaaaattatcgtttattcgtaaaattgctgaatatgcatattatggaattagcgcattaattattgcctgtctgttctttattccaattttcccaagcttccttttggtcgactggttagatgcaaacgtctttaatattagtaccaacgaccatttgcaaatcgcactttactatttcattttagcgattccagctagtgcaatgatgatgatgattactgctgttatttcttcagtcattcgtaaaattgcattgcctcgtcttgaaactggaacctatgcggttcatggcggcacgtattatcgtaaatggtttgcgtctcaaatcttggaaacaagcttacaaactttacatggcttgtttgcgaccatttatgcgccaacatggttccgtatgctcggtgcaaaagtaggtaaaaataccgaaatttctaccgcaaacggtgttattccagaaatgctgactttgggtgaagaaagctttattgccgatgctgtgatgctaggtgatgaagaaatcaaaggcggctggatgacattaaaatcgaccaaaattggtaaccgtagttttgtcggaaacagtgcttatattgctgatggtaccgtgttaccagacaacgtcttaattggcgtgcaatctaaatcaccagataaccgtgaaatgtatgatggacaaacttggtttggttctccaccattgttattacctgcacgtgaagctgctgagaaatatccagatcatttaacattcttgccaagtatcaagcgccgtttaatgcgtggttttattgaaggccttcgtgttgtattacctgccgctcttgcgattggtgtgggttatatgattgtgcttgagattattgatgttattaacaaatacaacattccaactggtttgttggctttaacgcttgctggtttgctctatggtgtaggctgcttcgttattgttgcattgttgaagtggattttgattggtcgttatcaaccacgttcagctccaatgtggaccatgtttgtatggttaagtgaagggatcacgagcttatatgagtcagttgcgattcctaacttcttaaactacttgagaggaacgccaatgctgccattcttcttgcgtattttaggtgttcgcattggtaaagatgtttatatggatacggctgatattacagaatttgactgtgtaagcatcggtgaccgtgctgagtttaatagcttctcgggcccacaaactcacttgtttgaagaccgtattatgaaaatcgggcaagtgaatatcggtaacgatgttgtggtaaatacacgcagtattattttgtataatgccaacgtaagcaaccatgctgtgttaggtccattaacattggtcatgaaaggtgaaaacattccggctaaatctgcttggattggttcaccagccgttccttgggttcataaataa

SEQ ID NO: 70211 - DNA, 507 bp, Acinetobacter baumannii
atgaatattataattcgagatgaacaacccgaagatattaaaaatatcgaagagttaaccaaagcagcgtttctgaatgcagaacattctagccacaccgaacaatttattgtgaatagccttcgcaaacataagcaactcacgatttctttggtcgccacagaaaacgacttaattgtaggtcatgtggctatttcaccagttacaatcacgtcaggtgaaactggctggtatggcctaggccctatatctgtatgcccaaataaacaaggaattggcattggttctcttttaatgaatgcagcacttcaaaagttgaaagaattaggtggaaaaggttgcgttctattaggtgatccaaattattacagtcgatttggttttaaatcatattcagatttaaatttacctgatgttccaaatgaatactttcaagctataagtttcagcaaatatattccctcaggagaagtttcttatcatgaagcatttatggcaactgaataa

SEQ ID NO: 70212 - DNA, 258 bp, Acinetobacter baumannii
atgaatctttcaaagttcgaacaacgaactctccatgtccttgccaaaggcggacatattaaataccaacgtaatacatcaggcacagtctatttcgttgaatgctatacacgagaaggtttcgtgctatctgattgttccttagatgtatttaaaaagctaaaagcaaaacgtttaatcaagtctaaaaatagccaaccttatcaaattacattgttagggctacagactgttcgtcctcaactagacaaccgttga

SEQ ID NO: 70213 - DNA, 939 bp, Acinetobacter baumannii; identical to SEQ ID NO: 54279

SEQ ID NO: 70214 - DNA, 339 bp, Acinetobacter baumannii; identical to SEQ ID NO: 62549

SEQ ID NO: 70215 - DNA, 4686 bp, Acinetobacter baumannii
atgatgaatctaattaaatcaaaagtattgaaattaatatatgttttttttagtattttaactattttatatcagtatagctatgctgatatgtatacagtagataaagaatctattgtttcatttgatccaaatataaaatcgtgtacagcaggttataatctactttcagggcaaataaattatagtaaaaatttaatttccggagcacttccttacaatcttcattaccggaaagcgacacgtttgcaaacaatagatcaagaaaactcaataggagtggactcatggtcagataattatgatggttttgtgaatgttttttatggtacttatcgtgctaaatatggttatattacgattacaaactatgtaataaaattaccgaatgataaccaccgttattattttaaatatggtcctacgagttttaaagaaactggttatcctgaaccatttcttcaagaaaataatcgtgctttatatagactatatacttcttcagaacccgaagcctctagtttacctggtggtgggtatgttagtggaaatgcttctacagattttggtgaaattaaattctcaattgcatctaactcaatgactgttactcgtgcaggggtggtttatagcgcgacagtttctaagtctatcaataatgaaattttatttaggttcaataaaattacttatccaaatggaaatactattaatttaagttatgataatcaacttaatttagtacaggtaactgataataaaaataataagctttctctagttcgaaatggctcacaagttagctcagtaagttttacaggcggaacacaagcggatagtcagaaatatgatttaacttattcctctatacaggcaggaggaataagttatcctcagctaactcaagttaagaatgctaaaaatggcaggaaagaagactatacttatgatgctgctttatcattatctcattatgagacagcgttagataataatgttagtaatccagaaactgcagcccagcgaccaatattaaaatcagtttcagataactctaatcaagttagacagacctggaaagttgattatccaagtgtggttgtaacaacaagtggaatttataaaacgatcactgctgtaaaagttattttacaatcatatctcggggagagcacaggaactaaggcacttgatacgacaacaacttacgatgatattcaaaattctagtaaaatttctatgcttttttctccagatggaaatcaatctgcaaatacagtaattaatacaacacatcctgattataaaaaaacaattattgatgtatcaggttttccatgtctaacaacaggagacaatcgaccaattaagtctattgtttacgcaccaagcgaaatccatccaacacaaattactgaccaaaatggtaatattactgcgtatgcttttgatacgttaaatcgtattctacaagtggttgaagcatcaggtacaactattagtagaacgacaaattatgtctatggagtattatccaatggacttgaaaacttattcaatatccctacaacaattaaaacctcaaatttcacaataacaaatgaaatcaatgaaaaaggtcagatagtcaaacaaactgaatcttctactcaagtgcaaagtacgtctaaagttacaacatataattattttacggatattactaaaccaaataatggtcttttaagtagtaaggatggtccacgttcaggtactttagataaaataagttatacatatgataattatgggaatttagcatccgtttctacgactattaatggtactgaaaggactgaacaatatgttggatataattcatttggagatcccgaacgtattgtttatccaaacgggatggttgagaaatatacttataatgacgatggtactataagtagtgttgtaacaggaagtggctcaactgcagggactattacgggaaaaacagttacttttagctatgattcacttggtcaactagtaggtagcttgaatgaagatggagaaaagacaagctattactatgataatttaggccgcattattaaaacaatttattctgatggaagtattagcacaaaaaattattttaataacaatattatcagtagtgatgaggtaaaagatagttctgctattacagtttttaaaggtttgtatcggactttagatttaagtgggcggataaataaaattcaaatcggaactgattctacatcaaattggaaaacattaggttatgacggaaatggtaatgttatacaaacaaaaacagcgcaaggaatcattgaaagctggacttatgatgcattaaatcgacctattagtcatattgatggatcaggtaataccgatactaaaacttatgatgctttagataatccaattactgtacttgatgcattatcctctggaactaatccttatctctatcggaatggtaatgtcttggctcaagagactaataaagattttggcattaaaagttatagttataacgaggctgatcaattagttcagagtatatacggtaatcgcaaatgtagtttctcgaatatagatgaaattgggcggaataagactattcagtgtcaaagtaatagttctagtacacctgatatgcttacttatgatgatacttatacatttgattcaagtcgttatagtcgattagataaaatagtctctaataagccttatggagttgatatcagttatgtctatgacttatatgatcgcattattgggaagagtcaatctaataaagctttaactgcatttggatctagtgcaaatactttatcgaatacctatgcatggagtattggtaataagatcacagggataactttaccttctggtcgtaagcttacttataattatgacaacacatcgaaaggccaaattacaggtttaactttagatggcaatgctttgttgagtaatattggttatgacgcaagtggacaaatgacaggctggacatggggaagtaatgctggaagttacacatggacttatagttcagcaaaagatggtgtcattaatcaaattagtaataaaaacagtggaggggctgttacttatagccttaattatagttttgatcgtgataaccgtattataagtattaagcggaataataacttaaatgataattttagttatgatcaggaaggacgtttattgacagaaagtcgaagtaatgatgcaagctctatctacgctattacctatacttatgataaaaatggcaatcgtttaagtttacgagcgtccggcactcatttacagcctgctgcaaatgtggattatgcctatacaggtaataaacttaccacattaacaaaaaatggaacagctcagccacttaattatactgcaaatgcagaattatatatgggtgaaatcttaccgagttacgattatgcagggcgacgtcgaggtgaagggacatcaacaactattaatcgttatatgagttataacgctaataatgaaagaacactaagtggaagtacaagtgcatggagtaatacggcagttcaattcatctacgatgaaaaaagtcatttgattggtgaatatacagctactggaattccacttgtagaatatatttggttaggagataaaccagttgcagcagtttacgagagtggagcaactaccaagatttattatattgtaacggatgtacaaaataccccgcgtcgactaattgatagcaatggtagtgttgtatggagttgggacagtacagcttttggcctaggtagtcctgtaagtacgataacatttaatttacgttttcctggacagtactatgatgcaactacagggcagttttataaccataatcgtttttataaccctgaacttggtcgatacatggaaccagatccgattggtcttgcaggtggattaaatccatacatatacgcattaaataatcctgtgatgtatgtagatatgactggtgaaaacccaatattaattgcaatgggtgtgagcgcagcaacagcaggtgcattttatacaggagaagtattttttaatgcagtatatgacgcatataaaaatgaccaaagtatattagatagtttttctaaatcattttcaattaaagagttaggtcaacaaatggttataggtgcagcatttggtggagttggtaaagctgcttttttagctgctgatgtacatataattagtaaagctgcacctactatcattccagcgggaacatcggttctgaaacggtgggggttaaaaggtttaaatgcaattaacaatatggctaaaactagtaaaattaataaaataagagaagtaactactcctgctggattggttctcacaggaaatataattgcaggtaaaacaacaacaaacttgatattaaatgatattaatgaacggagttctgctcgtagacaagggggtggtgaagttggtaatagtggtattaatcaaggctctgattatttaggttttaaaagttatcaacctaatggttatgtagcaggatattcagagatgtatattaacggtgtatataatggtaggttatggactatttactttgattcaggtgatactgttcaatatggttgttatcttaagtgcgcattgccattgtaa

SEQ ID NO: 70216 - DNA, 306 bp, Acinetobacter baumannii; identical to SEQ ID NO: 55036

SEQ ID NO: 70217 - DNA, 693 bp, Acinetobacter baumannii
atggctagagctagattaacagtagatgaaattactttaagagttgaaaaaaatttaaaacagatagcaagacgtactcattcagatgagttggtacttcaattaattcaatctaaacctgtaaatcaatttaccgaagaagatataataaaattaaaaaataaatatcacaaagttttagaattacaaaaacttgaaaagttaattgactctatctgctcaatcaaaaaaagtgatcgctctgatattgaaaaggacattgttgattttagtggatatgaagacctttcctctcagactgatgaaagattaaaaatagcattaaggatgctaaaaaattataataaaaaaattcccgatgaaattaaacaaaaagcacaccatgaaattaaaaaatctttgaataattcgtataagcaaagagatcagaagataaaaaatatgaagaaagagaatcatgagaagttttttcttggcagtgtgcttatatcatttttaaaatctaaagatgttgaaatgaattatcttgatattacacttaagatgatagagctttatcagactaaaaattattttagcagaaaagtattttcagaatatgaaataaatgaatttaaattttcagaacaaggtagaaaatttaacgataagaaaaacgcgattttatctgatcctaaaaatccttttaaataa

SEQ ID NO: 70218 - DNA, 849 bp, Acinetobacter baumannii
atgcccaaagctaataagaacaatctcctgatttcaggagactatcctttgatcgcttcgccaacgcttgcaaaagcgtttggcgtggctgccgctcatttgctacagaaactgcattactgtttagaaaataacgagggcaaaacttataatggtaaaaaatactggtttcacagctatgagcaatggcaaaccacacttggcgtgtatagcatatcaacgattaaaagaatcgtagctaagttaaagcaggctggaattttaatcattgaaaaattggcacagaataaatggctacaaaccaatttttatacgattaactataaaaagttaaaacaactcattagctcgaatgacaagcaaagaaatcaacctaacgaggtagttacaacttctgatccagtagtaatcacaccatccttggcgaagcctgctcaagccgcgcaaccctctgtattaataaagtcaattcaacaggcatttcaaaatatcaaggttaaatcaaatacagttgaaccctcattaaaagtggcaaaagaatcccgtctacgccccaactttgtaacgcctgaatcttattcagtaaagggattaagccaaccactccaccctcctgcatcaaaggaaatattaaaaaatatggcaatgaattaccgccatttttatcaggcactgcgacagcaacgtgtagatattgcttatgatgatcaacgtattcaacaactattaaaatatcaaaagcgaattcttcaacatattgtatatatcaaacagacatttgcgggacaagagcgttaccaatggcacacggttgagcaattgcaaatggaaaattatttaaagaagtag

SEQ ID NO: 70219 - DNA, 264 bp, Acinetobacter baumannii; identical to SEQ ID NO: 54289

SEQ ID NO: 70220 - DNA, 3300 bp, Acinetobacter baumannii
gtgtctgctactcaagccaatattcaagccaaccaatttactgaccgtaatggtgaaatgttgtttagtgcggtaaatggtcaaagttcaattcgtgtaaatggtgactaccaacatcaaggaagtgtattacaaagtaaccatagcttagacattcaaacaggttcgcttagtaaccaaagtgggaatatcttagtcactcaaaatgaagcaacctcacaaccagtacagttaaatattgttagtcaaaacgatattcaaaatgatttgggtaacattgtgagtgaaggccagcttacattgaaagctggaaaggggctaagcaaccaacaaggtagtataattagttctaatacgcttgagcttacaacagatcagttaattaataaccagtcagggcagatacaagctaaggatattaagctctctgcatcaaacttagataatagttcaggagtaattgctgctaaaactggtgatgtatcactcaatattaataatcagttgattaatggtcgtgttgagcagggtaaatcggctggtattattcaggcagcacaaaatatagatgttcagactgggttattagacaatagtggtctgatttatgccggccaagatcaacaactcaaagttgctcaaaatcttaaaaatgctggacagttagctgctcaaaataacttaaatatacagacggctacactgacccagacttctgcagggagcattattgctggtttaacatcagatggttcattagcaaatcagggtaatcttaacattgatgctacaggtgctataagtgcgcaggggcaactgatcgcgggcggtgatttaagtagtcaggcagcgagtcatgtcttaaaccaaagccttgttcaagcaaaaaatatttcgctcaacagtaaatctggtcaattgagcgctcaacaaagtacgattcaggccgcacagcaacttaatttaaccactccagatacgctagatactcaacaagccaatttaaaggcgaataaagttcaaattaatgcaaaagacttaaataaccagtcaggacatatccagcaaacaggtttagatcacactcaaattttgttgacaggtgatttaagcaatcaaaacgggcaaattgacagtctaggccaaaaactacaaataaatgccaataatttaaataaccagaatggtctcatccaatctggtacaacagacagccaacttatactcgctatagctaatacgctcaataataatcagggcaatatcaaaactgctggtagtttgcaaacgaatagttccgagttaaacaatgatgctggaacgctacttagcttcaatggttttaacatcaatacacagcagcttagtaatcaagcaggtcaaattgttgaggctggaacacaagacaatattgttaaccaattaattgttaaaaaccttctaaacaatagtaatggcaagattcagacaaatcataatcttgaaattcaggctggtgcgttaaaaaacaatatgggcagtattgtgaccgcaggcacagcaggtcttaacctcaacacagcatcacgactcgataaccagtctggaaatattcattccagtggtgatctaaatataaaagctcaagacattttgaatgatcagggacaaattcttgctgccaaaaatgctcagtttaatagccaagacaccttaagtaaccaagcgggattaatcgcagcacaacaacaattaatgattcaaagtgctgctttgaataaccaagcgggtcaaattgggtcggtagatgcgggcgtaaatatccagacgactcagcaagcattgaataatcagagtggtaagattcaggcgaatcaagcgattaacctcgatgtacagggccttgataatagtctacaaggcttgattagtagtactaaaggtgatcaaagcaaaattcagattgatactcaccagcagagcctgaataaccaaaatggacagattaatagcggtaatacattacagattagtaccaatagtctgaacaatcagcaaggtctaatcactgcacagggtgatcttggtataaacgccgtgcaactgattgataaccgacaaacctatttaaatgctaccttgccagagttggcccaaggtattcaatctttaggacaagtcttattacaaacgtccgaattaaataatgaacaaggtcaggtcattgctggaaatggattaaccattcaagcgcctaaggtgaataacagtaatgcgggcttgttagccagtggacaagacttactgatcgacagtgttggacaagcaggtacgattaataatcagaaaggcaaaatcagtgctaaccgaaacattagtctaaatacaggcctgatgaccggaagccaactcgataatagtcagcagggcctcattagtgctgcaaagcaagtcaaaattgttagtcaaaatattgataattcaaacaatgaccagaaccaaggtattcaggcagggcaaatagaaatagccgctagtactttaaataatagtgctgggcgaatctccgctgagcagcaacttaatttaaatattttagataatttaaacaataccaaaggcttaattagcagtcttgatcaattaacaatacaaggtcagcaagacaataatcgtctaattgtaaacaatcagcaagggactattattgcaggtgaagaaggctcatcaactgcaggattaaatattctggccaaaggtttaacaggcgatggtaaggtcttaagtcagggacagctaaatcttcagctcaatgatgattatgtacaagatgctcaaggtcagttgcaggcacagggaaatttaaaccttagctctaaaggtaaagttaccaatcatggtgcaatcaaaagcaacggacagttatctattttagcaaatacaattgaaaatgctgtagatggcagtttggaaagccagcaaactcaacttgaatctgtaggtgtgctcaataattatggactcattaatggttcaaatacatatgttaaggcaggccaactcaataatattgccggacgtatttatggtgaccatattgcaattcaggcgaatactttaaataaccaaagcctcaatggtttagcgccagtcattgcctcaagaggtgatctggatctgggcgtacaggttttaaacaatcttgaaaataacctaaatcatcaaagtggttcgcaaattattgccatgggagacttgcgtataggaggttcgcttgactcacagtggcatgctcaaggaagaaaggtacggtggtattga

SEQ ID NO: 70221 - DNA, 192 bp, Acinetobacter baumannii
atgaaatatgtgcaacgcaatacaaatatcgaggctttctttctcaagatgggagaaagtacttttaacccaattttgcttaatcagcaaaatctcaaatttttcttaaatgaactattaattgcagagcaaactaaagttgatacggttaagaaagttggaatggttaatcggggagtaaatccattctaa

SEQ ID NO: 70222 - DNA, 774 bp, Acinetobacter baumannii
atgagttcacatgagattggacgtcaaaaaatgtctgcaatgacattgggggctttaggggtggtttttggtgatatcggtactagcccactttacgcttttatccaatgttttcatacatcacataatgttcctataaatgaagcgaatgttctaggcattttatcattgattttttgggcactaatgatcgtggtgtccttgaaatttagtatgttaattatgcgtgctgataatcatggtgagggcggcattttagctttattagctcttaacatgcacaataagcaaattgggcctaaagtgcgctttgggttaattacaattggtttatttggtgcttcattattttttggtgatggcattattaccccagctatttctgtattgtcagcagtagagggattgtccgtagcaacccctatttttacaccgtatgtgataccaattacgattgtgattctaattggattatttatgatccagaagaagggaactggatccgtaggccgtttttttggacctatcatgctactctggtttttctcaataggttttattggcctatctcacattatcaagaacccttatatcttgaatatgcttaatccgtattgggctcttcctttcattgaaaataaccccgtgactgcatttgtagtcatgggagcagttgtattgacgattacaggtggagaggcgctatatgcggatatgggccattttggtcgtaaaccaattcaattggcttggtttttggttgcgctaccgtga

SEQ ID NO: 70223 - DNA, 531 bp, Acinetobacter baumannii
atgttcattgaaataattaaaattgcaacaccttacattttagcattcattgtttatttagtttggcatgttcaaaaagaaaaagaagtaatatcttcagaggctagaaacttacttaatttactgaataattataataatgaatctagacgatttgaaaaggaagtggagagaacttacagaaaagaaactttggaagaaaaaagtagttctgttagttttttagatgatgaattaaataaattatttgatcttcatgaggaaatttttaattctattgattttattagttcgtcagtcctagatgtagatctttttgatcacactagaaattaccttgatgcggtaataaaaatattagagcagtattccaaatgtcgttcacatgaaaaatattttgaaatcaaagataatttaaaaaaagatagaaaagttatattagaggagacttataagttaaagaaagtgatattgacccatgtactatttaggaaaaaatattttctttccttactgagaagatcattttaa

SEQ ID NO: 70224 - DNA, 519 bp, Acinetobacter baumannii
atgaatactctagttaaaactgcgttatccatcatcggctttggtatagcgatgtctgctgcacacgctacagacacctatactccccctacaacacaatacccacaaggctgtacagaattatgtggtcaagcctctattccaattaaattggaagtacctaaaaaatgtgaactcagtgatgtgagtggcagtattgtactaaatagcaatacaggcgcaggtacaggtggatttaaagttggcgcaaatgcaccttataatttactggttaccacagacaaccaaacttcaacgactgcttcggcagtaaaatttggagctaactctatcccaaccaccgtgacgactacacgcggctcaactccgattttgttaggcactgtaaaaaccaatgaaccaatggcattggttgtgccaaatgcttataacattgcaattcaagcaggtggttcttggggcgttagcaaacccgcaggcacatacaccgacaaatataatattgcggtatacttctaa

SEQ ID NO: 70225 - DNA, 717 bp, Acinetobacter baumannii
atgaagaaattattatatttattggcggggagtgttttgggtttttctcatgtagcatgggcagggctatccattagcccagtccagctttatttgggcgaaaaatcgaaacaaaaaagtaccaccattgtcattagctcgaaggactttacgaccagtaaaacttttgaagcctcggcggtgagatgggctcaaaatgaacaaggtgaagatatttttgaacctgatccgaatatgattattaatccgaaaaattttattattgcgccagattcaaaacaaattgtacgtgttggcttaaatcaggctgtggtaaataacgatcatcctgaaaaaacgtggcgaattattttccaagaagttgcacctccagcacaggataatacggttaattttttatttaatatttcggtacccctctttgtgggtaggcaagcacccatcaatttggatattcaacccaaattagacacaccagatttaaatttaagcataaaaaataatagtctgtcacatatacaaatctctaaaattaccttgcttgatgccaataaaaaagaaattgaaaccaatcatgaaatgaaatatttattaccacaaagccgttatcattttaattttaaaaagaatattccagtcgttgattttgggaagtataaattattagttcaaacggataaacaagatcaacctctagagtttaatttaaaggaatga

SEQ ID NO: 70226 - DNA, 2298 bp, Acinetobacter baumannii
atgataaaaaaaaccatattaaccgtacagatcgtgtgtctttgtacggtggggtatgcatacgcaaatgttgagaatgaacgtctaattttagccaatatctgggtgaatgggttagaaaccagtacggaaacattggtactacaacaagaccagaaaaattatattgaatgtcgtgtgctcgaatccctcaccttaaaagcatccctatttcagaaaaatagtgaagataatcaatattgtttggtcagcacgcaagagattaattctaaaattgatccttcgagccaatcattaaaaataaccattccaacccaatattttatgggctatgctgaccgaacttcaattttacaaccacataaagcctcgctaggtgccttcttaaattatgattttttttataataaatacgatgaaggctcagactttaatagctattatgaattaggtgtctttaaagatttttggcttttgaataatgcctttatttaccgtgaaaatagtgaaaatcaaacccaaaaagttgtccgattaaatacttctttagatattgattttccagagcgttatacacggttaaccttgggggacaatgcaagcctttataatccattgattaattcgttccgttttggcggattaagttatggcactaattttacggaacgatccgactttatttattggaacacgccagtattaagaggaagtgctattgttccatctaccattgatttatatattaatggaattaatatctatcggcagaatgtgacacctggtgattatacattgcaaacaggtgcgaatattcaacaggcagggacagcccaagttgtggtggaagatattttaggcaatcgctcggtacaaagttttcccgtatatattaataatcgattattaaaaaaagggttgagtgaatataatatttcgctcgggaaattgcgctataactatgattatgatagcaatgattatcgcgatttttttagtaatttatactttcgtaaaggtataacagattctactagcctaggttttaatgctgcgtatagtgagtcaatcaaaaatataggactaatgtggacgcagtccttatttcattcggttctattggacacgaatgctgtcgcgagttctgccgaaggtcggtcaggttactctctcgggattgcaatgagcgatagttttgatagttttagtgtgggtttcaatagcaaatattcttcgcaagatttccgtgctcttggttatagtgatcaagtacaaaatccaagatttgaacatttaggctatatttcattttttaaaattccttatatcaataacttaaatttgaattatattgagagaaactattatcagaatacggaatttcctttaaatgacaccaaaatgttgagtgttggattatcgaaaacctttacacctaaactctcaatggggttgtcctattttaaagattttggcagctcagatgatacgggagcatattttagtttgagttataactttgatcaaaatagaagtgtttattttgaccagtcttctacgccaagtactcgtctgacctatgcaaaatcttcttcagaacaagttggtttcgattattcggtgggggtggatcataataatggcaatgaaaattataatgcgtttggtttgcttaaaaacactttcggagatctgagaattcagcatactcaaaatgatgagcattataattctcaagtgaattatcgaggtgctttggtttggttaaatcgccaactgaatttgagtaagtcggtagataatgcatttgcattggtgaaagttggagatacatcgaatattgacgtatttcgctcgctcgctccaattggacagaccaatagaaaaggctacgtttttattcacgatattttaccgtatattaattacgacttatcgtttgatcaggatcaaattccaattgaatataaagtagataatccaatttataaaatcgtcgcccttaatcagcgaggttattttgttgattttcctgtggttcatacgcaacaagtgattgtgaagctgaaggacaggaatggcaatttatttccacgagcgagcaaagtttatattaatcatgatgaaaataacccttatcccgttgataaagagggcaatgtctatttatatggtttggttcccgccacctatcaattgaacattcaaggcgatacaccttgtcaggctcctttatcgatccaaccacaaccaaattcgaccgctacggtacaaagcattgaattggtttgtcagtaa

SEQ ID NO: 70227 - DNA, 408 bp, Acinetobacter baumannii
atgaaaattttattggcctgtctagtgagtctaggtattaaccttgcgcacgccgatcaatgttcgatgggagctttgacggattcgcaaatgcgattagacaattattatcatagccaagctgccacggcttttaatgtgtcctgtagtcgagcatacagtatacgttttagtagtatgaatttacgcaatcgagaaggagaaagttatctctcgaatggaccgtataaagtagccacacgcatgaccatcaatggacccgtggagaatttatggaatgttccgttaagtgtcaatgcacgtggtaaaaataaatatattatttccgtgcatttggaacaacagccgaccacccgatttcctgcaggaacttatcgagatgtaatttatgtcaatttgtctttttaa

SEQ ID NO: 70228 - DNA, 342 bp, Acinetobacter baumannii
atggaaactattggtaatctatggctgtatgtcgtattcttcggccttgtcacagtcatgcttttggtcgattttttaggctttaaacaaaaacaaaatcaagatgttccaatcaagcaagccgcttactggagtattgcttgggtcactgtagcagtgctatttggtgggggcttgtggctctatctacagcaaacagtaggactcacccttgcgaactctgtacacgacaaatttcatagggctcttctcctatcaggctttttctttcttaaaattgcgagcactttcttaaattcttctttttttccaaaaccaatcaaacgtagaatagccatttga

SEQ ID NO: 70229 - DNA, 834 bp, Acinetobacter baumannii
atgagccatcgtgatcggcgccacgcgcaggctgccggcgcgcggcatcgctggctcaatcgcctgcaaaccgcgctgttggtgctgaccctgcggctgtatggcgcacgccctctgcacccgaatgaagcgcccgatctttgggctgtgttgcgcgaactggcggcgcgggccgggttgcctgccgtgccggtaccgcactacgtgcccagcggggtcgtcaacgccttcgccaccggtacgaagcatcacgcggccatcgcgctgaccgacggtctgctgcgtagcctcacgccccgcgagttgaccggcgtgctcggccacgaaatcgcgcatattgcgaacgaggatttgcgtgtcatgggcctggccgattccatcagccggctcacccatcttctggccttgttggggcaaatcatgctcctcttcagcctgccggccttgctgtggggcacagtcgctatccagtggccggcgctgctgttgctggccgtttcgccacagctcgcgctgctggcgcaactgggtttgtcgcgggtgcacgaattcgacgccgaccggctcaccgccgaattgaccggcgacccacagggattggctttggcgctcgccaagatcgagcgggagagtcgcgcccggctgctgcccggatggggcaacccggaaccctcctggttgcgcacgcatccggcgacgacagagcgcatccaacgcttgcgggaattggctgattcgatggcaccgcaaccgcttcattccagcccatttctgccggacatccccttggcgccacgcccaccgcgttggcgcgccagcggtgtctggcgctga

SEQ ID NO: 70230 - DNA, 948 bp, Acinetobacter baumannii
ttgggagatgaatacattggtggattattagtcattgatgagattgaggcgggtttacaccctagggctcaaattaaattaatggatctattaaagtctcaagctaagaatttaaagcttcaaatcgttcttacttcacattctttaactgttattaaatatatttttgaccttaaagatcctaataatacaagtgaacttgactctgtagtttacttagctgatacaagagtacctagattatttaaagatcctacttatactaaaatcaaacatgatatgttattagttaataacgaggaaagaaattatccaaaagagaaaatcataaaaatatactttgaagatgatgaggcaaaatatttttttgaaaaaatattagaacataaaaatttgacaaatggtgaaatggcttttggtgctaatattgaaacgatttccctaaaggttggtagtgaaatattagttaaactagcacctacggacaattattttaaaatggctgtattgattgctgataatgatgtagctagtagatcaaataatagaaaaataatagatactcatacaaatttttgtgtactacctgcgagtaaattcataaaagaaaacagcccgtctaaagatagaaatccagaatcattaatatataatttcattaaatatagatttgataaccctaaggagtttaaagacttttgggatgaatcagatgcttattcgactgattatgtgttagatcatattctaaccttatcagatactgatagaactaatagggtcaagatgaaaagttggtttaattcatgtagaagctactttgatgaacaaaaaattgtgcaaaagtggtgtgatgaaaatatggagcaagttgatgccttcataacagatttaaatcaagctattgatgaagcatctaaaaatattgagatggccaaggttgtttga

SEQ ID NO: 70231 - DNA, 864 bp, Acinetobacter baumannii
atgagtattgatatctacaatacacctttaagataccctggcggaaaagggaaattttcgcctgtagttaagactatttttgaagaaaatggtctagttggtgggcattaccttgagccatatgctggaggtgctggagttgcacttgaattactttacagtggctttgtttccgacattcatattaacgatatagataaagctgtttacagtttttgggcatccattactgcaaatactgaggaatttcttaagcttttaactgatactcctgtaaacatggatgtttggtataagcagaagcatatattagatgatcaagattgtgatgatattttattgaaaggtttcgctgctttttttcttaatcgtactaatagatctggtattttgaaaggtggtgtaattggaggtaaaaagcaagaaggtacatacaccatggaggcaagatttaataagaaaaatttaagtaagcgaattgaaaaagtaggattgaatgctactcatattcatgtttacaatgaggatgcattagatttgatcaatagagttgactctttgctacctaaacaatcactcatttatctggatcctccctactatgttaaggggcaggggctttatagaaatttttataatcatgaagatcatttggacataaagaaagccttagataagataaaaaccaaatggatagtttcctatgacaattgtattgaaataaaagaaatttataaggattattttatgactgattatagtttgaactatagtgcttatcataagatcaaggcgaaagaagtcatgttttattgtgatgaattggttaaaccagttcaatacgatttattttcggctggatag

SEQ ID NO: 70232 - DNA, 1983 bp, Acinetobacter baumannii
ttgtggacatattttgtaagttcgcatcaattttattcaactagtagaaatgagactaactatgagctacgaaaatatgcaaagttgcaggcaagagaaaaatctgattttttaaaagcttgggtaaaaaaaaatttagcttctaaacaagagtataaagagacacaagctttaataaataaacgtcgtgtgaaaaatggtaaattcaaacgacaaaagataagaaatgaaaacataaattatatctataataatcgaagacttatagagaggggagaacattggggacttttaaaggatttcgcaaacttaactttgaatcaacctcaaagaataatagaggaatttggagatgaagaattagtaaagacatcacttagaaactgtctaccatttattgaaactcatgttcctagtttaattgaattatctaaggcacaatgtgattctgtttgctattcttcagaagaaattttaaatgctgcgtgtttggaaatatttagagatagcggaaatcttgaaaatgttaaattagaattattaaaagtcttacgaacaaatatagatagtccttcttatgcggttgatgaaaaagaacatcaagcatttagacaggaagttgatagaatacttttccctgactctaaaagtcgactacaatttctaaaagattatattgaacctcaactgacctataacgactgtaaatacacacaagtaagctggttacgttacagtgatacattcaaagagtttcaagacacgttaccattagaatggttatataaatattcagatatcagtgtagaaaccacaaaaacattattcgatctaagtgctcaattttgtgatagaaataaattaaaaaatctaattataaaacgatgtgatgagttaaatacgttacttaaaaaaagtactattgattttgaaagtttgaattctaaagttatgttttggtttttaagagcatttttctttcttgatgaatcagaagttgtatcttattggagttttttaaaagagcaagaaaaaacgatatttcttttaagtgatagacatgaaggaattcgacatggcgattatccattttggccggcattaacgcctacaaaaattgggtggattttagatacattcatagatcagtggccgaaggttaatctacctgattcttggggaacaggggatcctcctaatgaaatagcatatagatttataagtaatgtaatttggaattttacaaaaaatatttctgaaaatactttgtcaatcgtaagtaatttaatttcagattctagatttgaagctatgctattagacttaaaaagtattcgttcaacaattattcgaaatcttgctctaaaaaattttaatgctccttcaccagaagaaatagttaattttttagatagtgacggagtaattaccgtagaagggttgagatcattaattttagaggaattaaaaatatttcaattagatttggatggtagtgaaacaacttctaagaatattttttataatttgcaatataagacggctaaaacaggcgaatttaaacgattaggtgaagttgaggctactttacgtgttgctgataggttgcggttgagattagagcataaaggaattactgtaacacctgagcatcaacttcaaaatgctaatcgttgtgatataacgttctcaaagattattgataatcaaagaaaactcttggtgttggaatcaaaaggtcaatggcattcagagctctacaatgctgcaacaactcaattatctgaacgatactctatacatccacatgcagaacagcaggggatttattttgtattatggtttggcgcggatgaaaaagttgcaaactcaactaagcatggtgttagttcagcacaggaattaaaagaaattttggataagcagctaccaattgagctaaaagggcttattgatatatttgttttagatgtttcactatga

SEQ ID NO: 70233 - DNA, 513 bp, Acinetobacter baumannii
atgacacagcgattagaactacatcaggtagagcagttaacagcttgtaaaatatcactattacttggattaaatgccgagcagaattatattgagcaatttttccggtttagtcttcgcctgttgaagtgtcaaaaagctttgcttacttttaatcaggaaccttatttttggcatcattgcccggatggcatgactgcaatttcctttaaaccttcaagacacctaaaacaatgttttgctaaacaacaggtgattcatcacaatcatccttcttatcaaaatttaatcaactatttaaaagagctaaatattgaatgtgggcgtgccttagctgtccatttagtgcagcctgatcagacctctatgggatttgcagttttcttcgatgacgatgaaacttgttttgaagatgatcaaattcagttgcttctcgattactgttctagctttatgcaacaagtcgagttgaaatttaattatgaagaattaaatgaactctatgagcagtaa

SEQ ID NO: 70234 - DNA, 363 bp, Acinetobacter baumannii
atgactgaaggtcaaaaatttgataacgctaaaccgcgtttctcgttaattccaaaaggttcgcttgcgcccgtaatcaatgtacttgaattcggtgcgcgtaaatattcagaagacaattggtgcaaagttgccaatgcggaaacactttatttcgatgcagctcaccgacacctaaacgcatggtgggatggacaaaaggcagaccctgaaacgggtgaatcacatttagcacatgcagttagctgtttgctttttctcattgcattagaaaagaacagtattcgtgcgatgtgcagtacttgcggttttcatccgtgccaatgcgcaaaggtcacttattcagctgaagaggggcgttga

SEQ ID NO: 70235 - DNA, 1419 bp, Acinetobacter baumannii
atgactaatgatttgaatgtaactggtattgaaaaggacccattgtcagatccaagcattgaatcctctgttctggtttcaattctgacgattagtgaggctgctgattatgtggcacaaatgcatgagcatttattcactattcatactcatcaagtgatttttaaagctatgcgctcactttatgagcgtggtgaaattattgatgaacttacagttttgagagcaattaagtcgcttggggcagagtcaaaaggtatcaatgaacaatacatcattgagctattagggaatgtcgtaggcaaagcaatcaactttaagtcatacatcaagatgctggaggaattgcaccttagacggcagcttcgagatgttggcaaaaaaactcagatttatgcaaatgatgtgggttatggatctgccgatgatgttttggaaaaggcaaataccctcttaagcaatattaattccgtgtctaacaagggtgatgtagagcacctttctcattctgtaatttcaataatggaagagatcaacagcatccaaactgaaaggatgagcggtcaatacagagttcgtggggttaatactggttttgtagctcttgatcatcgaattggggaaattaataacggcgatttagttgttattgcagctcgtccaagtatgggtaaaacggcctttgctttgaacttggcaaccaatattgcaactaatttacgtaagccggttttgattgaatccatcgaaatgaaaagagatgcaatcaccaagcggatcatctcaagcgtaggggatcttaaactttcaaaaatcaaaaatgctgagttggatggcgaagattggacttgttttactgaggctgcaaaagttattcaaaattcgcctctcatgatcatggatggcgccgtcacaatttctgatatcagaaagcatgcgcgcaaagtgagatcggaagagggttcgctgggtgccatttttgttgattacttacaaaaaattattacaccgcatttgccagcaagtgcgtctgaaaatgaccgtttgacttatatctcagattcattgaagcgcgtggcaatggaatttaattgcccagtgtttgctttatcgcaattaagtcgtcaattggaaaaccgatcagataagcgaccaattatgtcagaccttcgcggatctggagcaattgagcaagatgctgacgtaattttattcctttaccgggatgagtattacaacggcgagaagtcaaaaacacccggtttgcttgaagtgaacgccgcaaaagtgcgtgacggctcagtaggcaaaacctttctttgttctgagctggactatagccgcttctcaaatgtgcatagtgatcaattggcagctcttgaaagtaaagataattcaactctgacccaacctctatag

SEQ ID NO: 70236 - DNA, 225 bp, Acinetobacter baumannii; identical to SEQ ID NO: 61551

SEQ ID NO: 70237 - DNA, 504 bp, Acinetobacter baumannii
gtgattgcaggtcaaggtacggctgctaaagagttatttgaagaagttggtgatttagattacctgtttgtatgtttaggtggcggcggtttactggcaggttctgccctgtctgctcgccagctttctccgaactgcaaaatatatggcgttgaacctgcgctaggaaatgatgggcaaatgtcttttagaaaaggcgaaattgttcatattgatacccctccaaccattgccgatggcgcccaaactcaatatttaggcaaattgacctttcctattattcaacagaaagttgatgacattttgacagtcacagacgaagaactcattaacgctatgaagttctttgctgaaagaatgaagatggtggttgaaccgacaggatgtcttggatttgcggctgcccgtaatgtaaaacatgagttaaaaggcaaacgtatcggcattattattagtggtggcaacgtcgatatttctaaatacgcggagtttttatctgcttaa

SEQ ID NO: 70238 - DNA, 273 bp, Acinetobacter baumannii; identical to SEQ ID NO: 51247

SEQ ID NO: 70239 - DNA, 273 bp, Acinetobacter baumannii
gtggcagttgatgaaaacggggaagtagtcattggtaaagacggccagacaccgatgaccccaaaagaatgggttgaatctctacgtgagcaaaaaccgtattactggcctaagcctaatggtatgggtgcaccaggtagtaacaattcaaaaggtcaacctgacatcttaaaagcagatggcacggtaaatatgaccaaacttgcccaattacgaaatgaaaatccgcaactagctaaagagctggctgcaaaacacggtattaaactttaa

SEQ ID NO: 70240 - DNA, 465 bp, Acinetobacter baumannii; identical to SEQ ID NO: 49359

SEQ ID NO: 70241 - DNA, 180 bp, Acinetobacter baumannii; identical to SEQ ID NO: 51115

SEQ ID NO: 70242 - DNA, 585 bp, Acinetobacter baumannii
atgcagatcaaaatgatggtcagggatgctgggaatccaacccgtgtaaaagctgttgatcaaattgtacagtggctagcaaaaaatccgacgcaagtgcctaagcaaaatgctttactcgttggagacatgaatagttatgcaaaagaggcgccgattttggcatttgaaaaagccaattataaagtcttactcaatgacgctaaagttgggcaaggcgctcaggcgtacagttatgtttttggtgtggcaagcgatgcaaatggtaatggtggagcgggtaacttagaccatgctattgctgatgcagatttatatccaaaagtagttcgtacttttgcttggcatattaatgctgacgagccgacggttctagattacaacgaagaatataagactgatgagcaaaaagctttgttctatagtgaagatgcctatcgttcttcggaccatgaccctgtgattgtcgacctagatttaaatggcaaagactcgaatcagccaaatgataaccagaaaagtccaattttcgatttcttatctcaattaatggaatggattagccagctttttaaacgtagttaa

SEQ ID NO: 70243 - DNA, 225 bp, Acinetobacter baumannii; identical to SEQ ID NO: 61551

SEQ ID NO: 70244 - DNA, 1104 bp, Acinetobacter baumannii
atggcctcagaagataaatcactgctcgaggtattaactcaacatcaggcgtatttatatcgggtatcttctcaatctgttaatgagctactaaaaatctttaatgatgagtcggcattaatgttggcaaggcttcgagatttactcgatgaattaaatgattccgaaaaggtggctctagcaagtgggcagtacacaacgtcaaatctgaaagagatccgagatctgattgctcagtggtttactgcaataaatactgcattacctgaagcttttgccatttctgccacagcgttggcagtatatgaagctaattacacggcgaagctatatggcggcaagatcaaaaagccaaatggtgaaaagctatatgcagcagctaaaaaagtacccttagtaggtggagcattagttgatgatcttctttccaagattgctgagactgcacgccaaaaagttgaatatgcaattcgggatggcattaactcaggtaaaactaatcaggaaattgttcagcgtattcgtggtaccaaacggcttaattatgaggatgggcttttaagcggctcaaagtctgatattgaccgtacggtgagaacagttcgcagtcatgttgccaatcaagcatatttagacactttcaataaaatcggttttgagtatgtacgttttgtcagtgtcttagatggtagaacaacgaaattatgtgcttctttggacggatctgtttgggaagtgaatgacccagcaaagcgggtaccgccgttgcatcctaattgtcgtagtatcttggtaccggtcgagaaagatggtcaacttgtgggtgagcgcccatttgtaatggatgaacgtcgagttaaagacatcccgaaagaagagcgtagccagttaatagggcagctagatgccaataccacttttaaagagttcttcaaaaagacagacgatttctttcaaaaagagtggctagggctaacccgctataagctctataaagaaggaaagtttgattttgaaaagttcttcgatccggaagggcggctttataccttggaccaacttcgaaagttggatgagcaaactttcaaggagttgggcttatga

SEQ ID NO: 70245 - DNA, 951 bp, Acinetobacter baumannii; identical to SEQ ID NO: 65157

SEQ ID NO: 70246 - DNA, 951 bp, Acinetobacter baumannii; identical to SEQ ID NO: 65158

SEQ ID NO: 70247 - DNA, 336 bp, Acinetobacter baumannii
atgcaatttactggctttgcaggacttgcttttatacctgaatttgcatctgtgttatgggcaatttgtttaggaataggcttgggaggttgttttgccttaacacttattgtggcattagatcattttgaagagccgaacaatgcgggtgctttatctgcacttatgcaaggaggcggttttttacttgctgcaataccgccttggtttgtagcagctttgcatgactttacagggacttataaggcaggttggatttttcatttatgtagtgtgatattggttattgtgttagtggtaaggttagctccaagaagttataacaaaattcactaa

SEQ ID NO: 70248 - DNA, 222 bp, Acinetobacter baumannii; identical to SEQ ID NO: 56425

SEQ ID NO: 70249 - DNA, 315 bp, Acinetobacter baumannii; identical to SEQ ID NO: 52100

SEQ ID NO: 70250 - DNA, 879 bp, Acinetobacter baumannii
atgtcttgttttgcactgattgccgccattgagtcagattttaggctaatcatatattttgaaacaagtgacaaaaaaattgaaagtgtattaccagaagatgtactctcaaatgctaagcatagatttaggtcagataaaccttcagaaaatcatgaggaggtaagcttatctgatttactagaatatgtagacttttacgatttaagtaaaattttaaataaagtaaaaaatgagcagaaattctttacgatagagcaactcactgttgtaacaagaaatttagaaaatttgacagctgctaggaatagagtttgccactcgcgaccattagaagctgatgattttacatctctttttgatttttcttgcgaattagaatcaataaataaaagtgataataattggcgcaatctaaaatatgctaaacaaaaccttaataatgcagattttattttaacaaatactattcctgatttttggaaaaatgagaaaaatcatattttacaaaatttacctttaactgaatttgatgatacatctttccttggaagaaaggatgatagaaaaaaaattacagatttaattctttctaatactagagtcattacaattataggtgagggagggatagggaaaacggctattgcacaacgttgtttatacgacatattggaaatctgtgaaaatcaaaaagaagaacaacgctcatttgatatgatcttgtgggtttcactaaaaacaaatcgtttaacgcaggctggggctattagtattaaggatgctattactaatagtagtgatatgtttaaaaacattcatgataattttgctaatagctcctgtctcttatacacatctgacgctgccgacgaatag

SEQ ID NO: 70251 - DNA, 531 bp, Acinetobacter baumannii
atgaatgaaacaactgactctttgctgataaattcagataagccatcacgtaaaagccgtttatttgaatctggccatatgaaattgctagtgctttttttaattgaacaagcacctagatacggttacgaaattattaaaagcattggtgagttggtaggtggtggatatagcccaagtacaggcacaatttacccaaccttatcttatcttgaagacatgcaatttgtttctattgaaaaacctgatggtgaccgtaagcagtacaagattacagtgactggtattaaccatttaaatggtcaaagagagcatttagaacatatccttggccgcttagagacgcgacgtgaaattcaaaataatgatcaatatctagatatctatcgtgcaatggcaaacttaaaaacatcattgcgacttaaattaaaaaataatgcactgactgaagaaacaattcatcaaattgctaagagcattgatcaagctgctgttgatattagctgtcttaaaaatgaggtagtccgatga

SEQ ID NO: 70252 - DNA, 969 bp, Acinetobacter baumannii
atgaacttacctttaaagactttttatacaatagatgaagctgtaaagctgtttcaggggctttccccccaaaggcttgatatcgaagattcttactttcttcaattagctataaaggggcatattaggttaggtatatttaaagacccaagccatgagaaaagccacctatcaagtggaacattaaattttgattggtatgaagggacagaagacccagaattattaatagaacatgttaaggctgtgacttattgtttatctacaattgaggaagaaggctcgattttaattttacatgatgcctatattgaggacttatttctaaggggtgaaataagcctaagtgaagcaaggtttgataatctattttcacttaaacattctgaattttgtatcaaagaccaaatattaaatgatttatttttctttgaatatgttgataagttaaggtatcacaatttttatgaatctatattttattctgattctacccatagtcttctctatgtctttaatgaagaagatggcaattattatgtgccatcaatggagcatgaagtccctgactgggtgactggcttctggtttgatagatttgccgataattatgaagataaagacaaattttcagatcgtatgataaagaaagaagaatgtttaatatttggtgaagatttgcaattattgctcgatggaaaacatagagagcctattcaaaatgtatctagaattaaaaaaaataatatggaagtagtaaaagaacagataaaacaacaccctaaaagagctaactctataaatcaaattatttatggtttagctaaaatggctgatttagacttatcccagcaccagtctgcatatacgcaattggaggctttttgtaattcaaatggcatagagatacctggaaaagatacgtgtggaaacttatttagggaagctcataggaaatttaactcataa

SEQ ID NO: 70253 - DNA, 951 bp, Acinetobacter baumannii
atgaacaatttaataaagaaatgtttaaacactctgggaccgtggcatgaagtagtggtgacaattaccaaagggagtattgcaataggtgtgttgtgcttagtcacttatcttttaacaatcggttatatcccttcagaaattagctttggtgatacacttgtttttttactaattttcgcagcttgttctactgcttattttgcattaagtgtagtgttatttttattaggtatgtccttgatgccagtaatatacattatattaaaattagctaataaatacttaccacctcataagcaattcagagatgacttgccttttccaaaaattagcattagtacattttgtttattcatttattttatatatacattttatggtttatttttcgtattctggcaagtaagtctctatgcaattattacagtaagcttaattgcttttctaacgtatgctttttatgttaatcgtcaagatatccatatttttaataaaaagtttaaaaatatagaggaaattattgatgacactagtgcaagtgaaaatcttaaaacatttgcaaaagaaaaactgaaaagtttagaaaattctaaaaaaaattgtttacaaatggctttttttcttattacagttccactggtttatatgtttccgtttggggatgttggtaaagtatttcttaatactactatgcaaaatacaggggtaagaatagaaaaagcaacgttatatattaaggcaccttatgcaaatttaattgcactaccaaaaacaaccactaaagaactaagtcaagaccagatttttatttttaaggatatgaaagttccctttcaagggattggtaaaaacactttagtttcttacaaggtgaaagatatagaaaagcagttagtcattcctaatgaatacattactgtagagcgaacaaaaaagatcgataagtaa

SEQ ID NO: 70254 - DNA, 576 bp, Acinetobacter baumannii
atgagtagagaacaatttgaaatcaatttacatgcaaatagcggcttgagaagcggtcacatatcttggagcgaagagcagcaacagtaccaagcgcatgatgacgattatgttgaagaagccgaaggcatgaactggtcattagctacattcacaaaatgtcagaaagaaattgaaggattacgaatgcttctatggtttgtcaaagatcatttcgatatgaacggtttggacaaagcaatgcctcgcgtctatgaaaaattaaaagatgcaactaccaacatcattaaatcaaaccacaacacatcatgcacatatcaatttgaacttgcttttcacaacctgcaagacacacctgaactacgcaagatttattggtctgcattaggccaattgcaatttgattctaacgatcaggtaatcccacctgagcttgaagagtgtccgtgttgtaagccattaattcgcaaaatcggaactgagacagaaggctacgagacttatgaaataggggttgatgaaaggggggttcgttacgggcgtcaccctcacggcgattgggagctattagaatga

SEQ ID NO: 70255 - DNA, 1149 bp, Acinetobacter baumannii
gtgtttttttatattgatgaaagtggccatacaggtaataacttatttgatcatacacaaccatatttatattatggagttgttggctcaatggttaatttggatatcttggctaaagaggatattttaaaattaagaagaaagttcggtgttgatagattgcatgcgacagaattgggagaaggtaaactaattcatttaatttctgagttaaaagaaatatcaaaaaaattttctataactttcgatttttacagagttaaaaaagatgattatccagtcatatgtttttttgatcaggtatttgatcaaggtataaatccagcgatgacatggtctggatactggactccactaagatatgtattattagcaaagttgaactttctttttgatgaagaattaaaaaaaatagcctgggaagctagattatgttcaaaagataaagaggctgatgaaaaagtaatttatatttgtgaagaaataattagtcgtctggaaaaattaaatgatattaggtcaagagaactattttccgatgttctaatctgggctaaaaataacgtaagagaattaagttttaatgctaaggcaaaaagagacaaaaagttcatttctcctaatttaataggttttcaatcagtttactgggggatcactaatcgagctaagaagaaaaagagaaaagtattggggattatagtagatcaacaagatcagtttaatacagtacaagattatttgttacaaatttatagaaacgcggaaggttttttttatccccatgactttggtttagggggaatggattatagaaatattccaacgattattccaaaatttcaaagctctaaagtatcggcaggcttagaaatagttgatatttatttgtggttatttaaaagatatcttgatggtaagttattgaatccattattaataaattttgttaaatcacaaatgaataaagtttactgtgatgaggtatcaattaatgcaactaatcagcggtttagtgcttggatgaaagggctaccagatgttacatatgaacagatattggctggacaaaagatgacacaaatagaagaaatagaaagaaaaaggagtgtagaacaatattataaatcactaccagttaataattga

SEQ ID NO: 70256 - DNA, 783 bp, Acinetobacter baumannii; identical to SEQ ID NO: 47622

SEQ ID NO: 70257 - DNA, 1437 bp, Acinetobacter baumannii
atgaatcaatctgtccaacatgcaagttcatttcgcgaacgcctagaaccgcataaatctataccgccacagagttttaaaagttacaactcacagtttgaccctttaaccactcctgtcctatcaggtaatgaaaattatgcgccaacttattgggtcggcacagcaggtacgccacccgaagatgatgggccattaatgggtgacaccgaagcggacattgtcattattggtggaggcttcactgggctatcgacagcactaacactggctgaacaatttggtgccgcacctcttgtgcttgaagcaaaccgtaccgcatggggctgtaccagccgtaacggtgggcaaggtcaaaatgcgtcgggtcgtctgtatcgctcccaatggattgaaaaatggggattagacaccgccaaacgtcttgatgccgaaattcgggagggctttgactactttaaagacctcgtgagcggtattgaatgtgatgcacaagatggtggacatctttatatcgcccatcgtgcaaaaaaaatggctttccttgaaaatgaaggtcgcgtcatgaaagaggcgttcggctatcagactcgtatgttgagccgtgagcaactgcatgaagagtatgtggctgatcaggaagctgccggagccttactggaacccgatggtgttggcgtacaccccctaaaactggcttttggctatttaaaacgtgcccgtgctgctggtgccaaagtacatacttcaagtccggtacttggatgggaaacgcacaatggcatccattatttacgtactccaaatggtattgtcaaagcaaaacgtgtggcagttgcaacaggtggctatacgcctaatggcttacacccgcatctttctggaaaaatcatgccgattttatccaattctattgtgacacgccctttaacagaagcggaacgtgctgaggcaggcttacacagcaccacatttattacggatactcgaactttacgtcactattatcgcctactccctgatggatccatgcaatgtggcagtagaagttccttaaccggtgcagatgcagataatccagtccatctcgaacgtttaaaagaagggctttatcgcaaatttccaagcttacgtggcatacctattgcttattcttggtggggttgggtcgatgtgagtcatgacatgatgcctcgtatcgtacaacccaaccctgaggaaagcatttattatgctattggttatggtggtaatggtgtgtctttctccgcgatggcaggactccgtcttgcagaacgagtgatgggaatacaccgccctcaatttgagcttccgatttataaatcccctttgccttcacatctgtttcgaccattccgtcgactcgggcaagcattgttatatcgctggtaccacttaagagatgaagtgctttaa

SEQ ID NO: 70258 - DNA, 1440 bp, Acinetobacter baumannii
atgtatgattcagattcaaatcaaagtttaaaaagtgctttaaaacctcgtcatgtccaaatgatggcactcggcggtgttattggaatgggactatttgtaggtagttctgtagtgattcaagctgcaggtccagccgcaattttgtcctttctgattacgggtgtgttgattattttagtgatgcgaatgcttggtgaacttgcaaccgcctctcctgtatcaggctccttctatgcatatgcacgccatgctttccaagattcgccctatttatctcgactcgcaggcttcatgacaggatggatgtattggtatttctgggtcatcgtgattgcattagaagcgattgtcggtgcaaaactctttgcttattggttacctgatacaccacaatggatcgtcagtctggttttactcgccctattaacagcaacgaacttattctcagtcaaatcctttggtgaattcgagttttggttctcatctattaaagttgctgcgattggtcttttcattttcctttgttctttatatatgttcggtctttggccaaaccatcaagccgctggatttggtgaattgttaaatcatggtggttttatgccaaatggttggggaccagtcttatcgggtgctattgccgcaactggattttactttggtgctgagatcgttacgattgctgctgcagaaaccaaagaccccgaaaaatctgttgccaaagcaactcaatctgtaatttcacgtgtacttattttctatgtttgctcaattttattagtggtatgtatcgtcccttggaatagtccagaaattgcgacgccttatgtaagtgcattaaaagttcttaatattccgtttgttgcagacattatgaatgtcgtaattctcgtagcggtgcttagttgtttaaattctggtgtttatgctgcgagccgtatgttgtttgcgttaacccaaaatggtgatgcacctcgtagcttaactaaactttcaaaaaatggtgttccaattcgtgccatcctatttagcacattgtttggttatctatcaattctagcttcatacttctcaccagatgctgttttccctttcttggtcgaatcttatggaactgtagccttatttgtctatatcgtgattgcattctcgcaaatccgtttgcgtcgccacttagaacgtgtagcacctgaacgtttaaaagttcgtatgtggtgtttcccatacctcagttattttgcaatcatcggcatgctttccatctttgctgccatggcttttattcctagtcttcaaaaagcgttctggttcggtatcgcaagtgcaggcatcctgttctgtatcttcattattcgtgattacatagagctgattaaattacgtcatcaaagtacacaactgaatacgctcatccctgccaaacaaaccaaaatttaa

SEQ ID NO: 70259 - DNA, 897 bp, Acinetobacter baumannii
atgcttttaaaagataaacttgctgccttcgcagtcgtgttcatctggggtattaacttttattttatgaaagttggcgtcagtgagatacaccctatgctcctcggatgtttacgctatctactggttttattgcctgccctctttttcattcgtattccaagcatcgggtggaaatggttattactttatggctttattagtaacttttctcaatttgcttttatgttcagtgcaattgcgacaggaatgcctacaggtttagtcgctttagttgtgcaatcccaagccttttttactgtcatgattgcagcattttttttacgcgaacaagccttttggaaccagtggctggctatcgcgattgcctttatgggcttaatgctgattgcctttggtcaacaacatagtcatgttccattaatgggtttggcattggtattatgctcagcaatttcatgggcctgcggtaatatcgtagtcaaaaaaatggggcctgttcacccaattggtttagtcgtatggggcaatattcttacccctttatggtttttacttttagcggtacagaatattggctggcaaggtgtggttgcggattggcatgcactgacttggaaaggattcggcgccgccgcatttctcgcctatttcgccacgattatcggatatggcttatggatctacctactgacacgttatcctgttgctaaaattagcccattgtcactttgggtacctgttataagtatgatttttgcctatttatttttagatgaacaattaaatactttgcagtggttgggttcatgtattgttatgctgggtttaatggtgcatttattggggcaaaaaattcaaactctattgttaatgcaaagagcatcaaacacttaa

SEQ ID NO: 70260 - DNA, 732 bp, Acinetobacter baumannii
atgtttgaaattattgatgatttaaaaaataaattagatcagcatcgccccctatccccagcaatagtaaaaaatttacaagaagatcttattttacgatggacttaccactcgaatgctattgaaggaaatacccttactcttttagaaacgaaagtcgtgttagaaggcataactgtcggtgggaaagcattaagagaacacttcgaggcaattaaccatagaaatgctatttattacgttgaagatattattagaaaagaagaactattttcggaatggcaaattcgcaatatccatcaactcattttaaaaaacattgatgatgataatactggccgttatcgccaacaaaatgttctaatctctggtgccacgtctaccccacctgattacacattattaaatgacaagatggctcagctagttgattggtacaattcagaggcacataagcttcaccccattgaacgtgcagctaaagtacatgctgattttgtaggtatccatccattcattgatggcaatggccgtacatcacgcctattgatgaacctcgaattgcttaaagctggttatccaccttgtgtgattactgtagagaatcgtttagcttactatgaagcattggatcaatggatggcttatggaaaaactgaagcttttattcagttgatttccaaagcagtggtcgaaggatttaaaccgtatcaggtggttttaggtctttaa

SEQ ID NO: 70261 - DNA, 936 bp, Acinetobacter baumannii
atggacatcaaacaattacggactttcgttacaatattagaagtagaaaaccttactaaggctgcagctatgctaaatattgtgcagcctgctgtatcacgtcagattcaaatgcttgaagaagaattaggagtgaaattatttaaccgttcccgtcatgggatggctttgactgaggatggtaagttactagaaccttatgcaagaagaatcttagaagaagttgagactgccaaattagaattaaccgcaaataaaggaatgatacgagggaaagttcatatcggtgtattgtcgagtattagtgaattactttctgctttgattatgaagttgatcaaggagaagtatcctgaagtacaagtgaaaatatcagtgggatattctgggcatttaaaagaatggttagaggctggagatattgatttagctttaatgtatgacactacaccttctaagttaattgatttgactccgttggtaaaagagccactatttttaataggatcggctcaatctacacttcagcaaaatgaagtccttgaacttaaaaaaatagagccatttccattaattttaccttttcaccctcatcgattgcgatctctgattgagcaggcttataagcaaaatgaagctaacttaaagatttatgctgaaactaatgatttgaatatacaaaaacagctagttatccaggactttggttatacaatcttacccctagtttctgtaataaatgagtatagggcaggattaattaaagttactccaattttagacccctcattttctcgtgtgattactttagcaacgcactctacaagaaatatccccaagcatattaggattatttcacgcgaaattattggttgtgttgagcaatctattgatgagaaaaaatggccgaatgctcaatggatatatgaaagttaa

SEQ ID NO: 70262 - DNA, 1161 bp, Acinetobacter baumannii
atgaaaagcacttttaataactaccaagaaatccgtgaagctgttcgtgcattatgtgcgcaatttccagatgaatatcatcgcaaaattgatgaagacaaaacttatcctgaagagtttgtagatgccttaactagtgcaggctggttggcagcaatgattccagaagaatttggcggttcaggattgggcttggctgaagcatctgtagttatggaagaaattaatcgcagtggcggaaactcaggcgcttgtcacggtcaaatgtataacatgagtacactgttacgtaacggctctcaggtacagaaagaattttatttacctaaaatcgcatctggtgaatggcgtctacaatctatggcagtgacagaacctacgacgggtacagatactacaaagattcgtaccaccgcagtaaaaaaaggtgacagttatgtgattaatggtcaaaaggtgtggatttcacgtgtgcagcatagtgattggatgattcttctggcacgaacaacgcctttggctgaagtgaaaaagaaatctgaaggcatgtctattttcatggttgatattaaagaagccatgaaatcaggcatggcggtgcaacctattcccaatatggtgaatcacgaaaccaatgaattattttttgaaaacctagaaattcctgaagaaaacttaatcggtgaagaaggtaaaggttttaaatatattctagatggcctgaatgcagaacgtactttaattgctgcagaatgtattggtgatggttattggtttatggatcgcgcaaccaaatatgtaaaagaccgagaagtatttggccgtccaattggtcaaaaccaaggtgtgcagttcccgcttgctgaatctttcattgaaatcgaagctgcaaacttaatgcgtttccgtgcttgtgaactgtttgatcatggccagtcttgcggtgctgaagcaaatatggcgaagtatctggctgctaaatcaagctgggaagcagcaaatcactgcttgcaattccatggcggttttggatttgccaatgaatacgatattgagcgtaaattccgtgaaacccgcctgtatcaagttgcccctatttcgacgaatttaattctcagttatgttgctgaacatttacttgatttaccgcgctcattctaa

SEQ ID NO: 70263 - DNA, 822 bp, Acinetobacter baumannii
atggaaaaagtacaaaaatctgcacgctcttatctttttgtaccggctaatcgtgtagaacgttttgaaaaagcgctcagcacatcagcggatgcaattattatcgatttagaagatgcggttccagtgaatttaaaaaattcagccagagaaactttaaaatattggctgatggagcatccacaaaaaaatatgatgatccgtatcaattcaaaaaacagcgaatggtttgcggacgatatccagttggcaaaattcagcaatgtgcaagcgattgtgttacccaaaactgaatctgttgcagatattgatgctgtgactgctattcgtgcaatggatatattcgcactgatcgaaaccccgcttggatttgtcaatatccgtcaaattgctcaggcaaaatcggttaaggcactgatattcggttcaattgattttcagttagaaatgaatatgcaaggcggttatgaggagcttttgtcatttcgtaatgaattcgtattggcttctaaacttgcaggaatcgagtctcctatcgatggggttactgttgacttcaaagacgaagctttagttgaaaaggaaaccttacaagccaagaatctgggttttgcaggaaaactttgtattcatccaaagcagatcgatattgtgaatactgcatttagtccaacagatgttgaaattcagtgggcgcagcgtgttttggatgctattaatcaagcccaaggccaagccatcagcctagatggaaaaatgattgatttacccgtcattttgagagcgcaaaagattttgaagcaagcgggtttaaacgcataa

SEQ ID NO: 70264 - DNA, 840 bp, Acinetobacter baumannii
atggaaaactacagtaattggattggaaaaaaagaagtactggatgattattcagatcatcgtcctgtagcaatgatgcaggctttactcaatgaagaaaataagttaccggctgatttaccgcatttatatcattggttttattttctacctttggttaacggacaggatcttgctctagatggacatcctaaaaaaggcggattcttaccccctattccttttcctaagcgtatgtgggcaggcagccgcttagagttcatcaaacccattgccgctcatcaatccatatgtcgtgaatcagaaattttaaaggttgagttcaaacatggaaaaagcggtgacatgtatttcgttaccgttcagcattcaatttatgcagaaaatgaattggccatcattgaagaacaagacattgtgtatcgtgatgtaagcaaccaagtacaacgtgctcctcagaagcagcctgaaaatgcagaaacaaaagcattcgattataaaaaatcgttccctatcgatcctgtgacgctattcaggtattcggctgtgacattcaatggacatcgtattcattatgaccgtccttatgccacccaagaagaaggttatcctggccttgtggtgcatggcccacttttagccactcttttaattcatcatttcaaacaagaatatccagataaacaaattactcattttgagtttcgtgcggtgaatccagtctttgattttgatgattttcaaatctatggcagtattaaatccacgcaaggagaattatggattcaaaaagacaatggtcaaatttgcatgaaagcaaaaatttcttttaaggaataa

SEQ ID NO: 70265 - DNA, 1191 bp, Acinetobacter baumannii
atgcttcctttaaatgatattaccgtcattacactcgagcatgcaattgctgcaccattttgtacacggcaactcgcagatttaggtgcacgggtaatcaagattgagcgtccaaatatcggtgacttcgcacgaaaatatgatgagcgtgtcgatggaatgtcttcgcattttgtatgggccaatcggtctaaagaaagcttaacactggatattaaaactcaagcggctcaagatattctcaggcagcttgtattaacagcagatgtactggtgcaaaaccttgcgccaggttctgcttcccggcttggtctgtcttttgaagaattgtctgcaatcaatccgaaaattgttgtctgtgatatctcagggtatggtgatgatgctgaaaatcccggtccttatcatgataaaaaggcctatgacttactgattcagagtgaatccggatttttatcgatcactggcaccgaaaatgagtatacaaaagcaggctgttctatttctgatattgctgccggtatgtatgcctattccaatattttggctgccttgattgaacgcgctaagacaggtaaaggaaaacgtattgatatttcgatgcttgaaagcatgactgaatggatgggctatccgctctattatgcgtttcgtggcaataccgcacctcagcggaccggagcctcgcacgcaaccatctatccttatggtcttttccatacgggtgatgataaacaagtcattttagcggttcaaaatgagcgggaatggaaagccttttgcaaatttgtattgcaagacgttacactttcagaaatgcctgaattcataaacaatacattacgctcaaaaaatcgtgaaaaactacaagctattattttagatgtatttaaacatttaactcagacagaagtgatcaatcgtttagatcttgccaatattgccagggcgaatgtgaatgaaatgaaagacgtctggcatcatccacaattacaagcacgacagcgctggactgcggtagacaccccggttggtcgagttccgacacttaaacccgtcggatgcaagaatgataaagattaccaaatcggtcctgtaccagacctgggagaacatacccaggcaattctagaggaattaggctatagcagagttgccattcaagaatttattgaccaagccatcatttag

SEQ ID NO: 70266 - DNA, 894 bp, Acinetobacter baumannii
gtgaactttgatttaaatgatttcaggctgattctgaatatcgccgagactcaaaatttaactcgggctgctgaaaaaacctttatttcgacacctgcagccagtaaccggattaagaatctagaacagcaattaggcctaaaaattttagagcgctcatctcaaggtgtcagactaactgaaattggccagatttatctcaaatacgcaaaatctttccagcatgaaattgaatgcctgaaaggtgaattgtctcaatttaacaacctaattcagggcaaattaaccattgccgctaacaccacggccatcactgaatatattcctaatgcactgtcggaatatttaattacccatccacatgtcgatgtaaatctgaaagagatgaccagtgaagagatcattcatgtggtcgcagaccggcaagtggatttaggcattatttcaggcgatatcgacaccgatcatttacagactttacctttaatttcttctcaactcgttttgattacaccgaaaatgcaccctttactggaaattgaaaatatcactttaatcgatattattgagtattctgtagtgaccttaaacgaaggcagcgccattcagcagttcttatataagcttgcccttcaactagacaaaaaaatcaacatccgagttcaggtttcaagctacgattccatctgtcaaatggtcgctgccggtgccggcatctccatcattccgctggcggcatttcagcgcctccagcatattcatccccagcttacctgcaccaaaatcaatgaaaaatgggcgcagcgcagctttaaaatctgttcaataaatttcaatcaaataagtcaattttctaaagattttatccagtgtttacaagcacacattcattaa

SEQ ID NO: 70267 - DNA, 675 bp, Acinetobacter baumannii
atgatcaataaaatcttcaattcggcaaaggatattgtcatagacattcaagatggttcaatcattgcaattggtggctttggtggatctggtatgcccaatcaacttatcgatgcactcattgaacaaggtgcgaaagatctaactattgtaagtaataatgcggggaatggtgatcaaggtcttgcagcactactcaaagctaaacgcgtcaaaaaactaatttgttctttccctcgccaaaaagacgcatatgtttttgaagaactatatcgcaataatgaaattgaacttgaagttgtacctcaaggtacgcttgcagaacgtttaagagctgctggttgcggtatcggtgggttttatacacgtacagcttatggcaccttactttcagaaaataaagagaccaaagaaatagatggtcaaggttacgtctttgagaaagctttggccgtagattacagcctgatttatgccaaggcaggcgatcgatggggcaatctaatttacaacaaaactgcacgtaatttcgctcctattatggctatggctgcaaaaactactttagtcgctgtagatcaaatctgtgaacttggtgatttagacccagaaatcattattactcctggaatttttgtcgatcgtgtgacactaaaaagtgaaattggagcataa

SEQ ID NO: 70268 - DNA, 645 bp, Acinetobacter baumannii
atggatatccaacaaaaaaataatcttgctcaacgtgtggctcaagatataccagaaggttcatatgtcaatttaggtattggtttaccgactctagttgcagactatttcactgataaagaagtgattctacaaagtgaaaatggtgttttaggtcaatggactcaagctgaaaagggtaaagaaaattgggatttgatcaatgccggaaaagaagcgattgatttaaaaaaaggtggtgccttttttcatcatgcggactcttttggaatgatgcgcggtggacatttggattactgtattttaggtgcattccaaatttcagccaacggtgatctagccaattggcatacaggacatccagatgccattcctgctgtaggtggtgcaatggatcttgcttcaggcgcacaaaatgtttacgtcatgatggaacatttaaccaagcaaggccaaagtaaaattttagaagaatgtagctatccattaactggattggcctgcgtaaaccgtgtttatacagagattgcgacttttgaatttattaaaggccaagtatttgtaattgatatcgtttcacctcatacacccgaatatatccaaactattacagatgtaccgctggatttttcaagaatgaaataa

SEQ ID NO: 70269 - DNA, 1266 bp, Acinetobacter baumannii
atgggaatgttaaattggtacaaggaatcggattccaaccagaaaaagacattttgggcatgttatgcaggatgggctcttgactcttatgacatgcaaatttttagttttttattacccgtcattatggcaacttgggctcttacccaaactcaggttggcctgattggtacagttgccctgattgttactgccattggtggatggatcgcaggtattttggccgaccgttatggtcgtgtaaaaatcctgatgtttactattttatggtttacattttttggcatactggcaggatttgcacaaaactatgaacagcttttagtcgcaaggacgctacaaggtcttggttttggtggcgaatgggctgtgggtgcggcactcatggccgaagctgtttctgcaaaacacaaaaataaggctgtcggctttgtccagtcaggaatggctttaggttgggcaggatcggtgattgtagccacaatacttattacgatgctaccaccagaatggtcttggcgtgtggttttttggactggtgtcattcccgctttaattgtgatttatattcgccgtaatgtgaaagaatcagttaaattcgttaatgatgtggctaaaaataaagaaaatattgagaaagcatcttttagttctattttcaaaaaagaatatttacgttcaaccattttcgcaagtttactcgttataggtttacaagcagcatgctatgccattcttatttggattccgaccctgatgaatgagcgtggactgagtccaagttctaaaattgtcacgattttaattatggctgcaggagcatttgcaggctttatgtttacagcttatctagctgataaatggggtcgtaaacagactctgattggtatgtctattttgagctggattgtgaccgtggtgtatatgttgattgcaatgaatcaatacatcaccttggcactgggcttctttgtcggtttctcttcaatcggtatgtttgcagcacttggaccatttttaacagacttatttccgactcatattcgtaccacaggtatgggcttttcctacaatgtcggaaaatcatttggtgctctatcagtcgttggtgtgggtattcttgctgaatcattaggtcttgctccctcgatcggtttgttctgcttaacagcttacggcttagcaacagtctctattttactcattagagtgcctaaagatgaacctaacttaatatctcatcattatcaaaaacagggagtttaa

SEQ ID NO: 70270 - DNA, 324 bp, Acinetobacter baumannii
atgatccgtatcctttatttacttgctaaaccagaagacatgagtaaagaaaaatttgatcaagaatgtctacgccactttgaaatgtcagccggtattccaggtttatataaatatgaagttcgcttgattgcttcagaacctaccgatattcatgttcccttctttgatgtgccggatgtcgatgctattggagaatgctggttcgaaaatgaacaacaaatgcaaaattatatgaactctgaaattcgtaaaaactggtttgaacatggcaagactttcattggcaagttgaagccatttataaccaaagacgtcggataa

SEQ ID NO: 70271 - DNA, 279 bp, Acinetobacter baumannii
atgcttttttgtgtagaaatgactgtaaaaattccattagatagtgatcctgtaaaaatggatgaaattaaacgcgctgaaaaagaacgtgctattgatctacagaaagcaggtaaatggccacatttatggcgtgtcacaggtaaatattccaacatcagtatttttgatgttgaaagcaataatgaattacatgatttactgatgagtttgcctttatttccctatatggatattaaagtgacagcattatctcaacacccatcttcaattcactaa

SEQ ID NO: 70272 - DNA, 1263 bp, Acinetobacter baumannii
atggaaaagatatacgatatttctcagcttgatttatccagctatgttcgacatggtgatcgcgtggtatggggccaggctcaagctgagcccataccgcttactcaaaatttaattcaaaatcgtaaaaaaattgggaaacttaaagtttttttaggtattagccagtttcctacttgcctacctgaatactccgaacatgttgaatatctgagctattgtggtgcaggacataatcgaacccttgcacaacatcaggttttagatattgtgcctgtgcattattcgcaacttccccgtttaatcgaagatcaacagcttaaactagatgttgtattgattcaggtttcagcagcaaatgctcaaggacaatatagttatagcttggcacaagattatttaaaatctgccctccgacatgctcgaattgtgattgcagaagtcaatcagcaagcaccttgggtgtattcggatgaatatttaactgaggctgattttgatgtgatggtgtataccgaccggaaaatcgaagcacaacatagtgctgattattcagcaactactcaaagaattgctcaaaatgttgcctcttgcatccccgatcattcaactttacaacttggaattggctctattcccgaggccattatgcaggctttggatcaacatcaacatttaggtattcattcaggcattattagtgatggtgttgcagaattgatgcaaaaaggggtgattaccaatcagaaaaaaagtattaatcctggaaaaaccatcacaggtttaattgtaggttcttctaaattacatcaatttgttcatcaaaattcaggcattgaactgcgttcaaccgaatatacccatcatgctgcgactcttgctgctattcaaaaatttattgcgatcaactcggcaattgaagttgatttaacaggtcaggtaaatgctgagattgccaataaaacctatgtgggcgctgtaggtggagctttagactttattcgtgcagccaatcagtctcatgggggcgtttcaattattgccctgcctgcttctggaaaaagttttagtcgtatcgtaagcaagctacaaggccccgtgtctacaccgcgcagtgatgccgggctgattgtgactgaatatggaatcgccgatttacgcggtttaagcattccccaacgcattaaaaaaatgattgcaattgcacatccccattttcaaaaagaacttgaacaacaggctatggatttggcactaatttaa

SEQ ID NO: 70273 - DNA, 1194 bp, Acinetobacter baumannii
atgaaagacgcttatattatcagcccactgcgtaccccaattggtaaatttggtggtgtacttgcctctttaactgcagtcgatctcgctgtaaaagtcattcaatccatcgtagagaaaactggaatagatactagcactttagatgacgtcattattgcgcagtcatactcatctagtgaggcaccttgtattggacgctatgcggctttagctgcaggacttccaattgaagttcccggttatacattagatcgacgttgtggttcaggcttacaagcgattatcaatgcagcaatgaccattcaatccggaaatgctgaagctattatggttgttggtgtagaaagtatgagtaatattgaatattactctaccaatatgcgttggggtagccgcgcaggtaatgtcactttctttgatcgactggaacgtggtcgtgaaagatctcagccgattgaacgctttggagctatttcaggcatgccagaaactgctgataatctggcccgagactataatattggtcgtgaagagtgtgatgcttttgctctacaaagtcatcaaaaagcccagcaagcttgggatacaggaaagtttaaagaggaagtgattccgcttgaagtgaaatccaaaaaagaatccaaaattattgattttgatgaaggtattcgtgcaaatagtactattgaaagtttagctaaactaaaaaccttattgccaaatggtgtcaccaccgcaggtaactcaagtcaacaaaacgatgctgctgcaggctgcctaattgtaagtaaagaatatttagaaaaacatcatttgcaaccgatagccaaaatcaccggctggagcgcggcaggttgcgatccaagccgaatgggtattggccctgtatctgcggtgaataaactacttaaaaaactagatatgtctcttaaagaaattgatttgatcgaaatcaatgaagcctttgcagctcaagccttagcagtaatcaaaggcttaaatattactgatacttctcatatcaatgtgaacggttcaggaatttctctgggtcatcctattggtgcaacaggacttcgtatcatgacgtctttagtacatgagatgaaacgccgtaatgctcgatatggtttagagactatgtgtattggtggtggacaaggtttagctgccctatttgaacatgtttaa

SEQ ID NO: 70274 - DNA, 903 bp, Acinetobacter baumannii
atgattgaatcaagaatgattggtgaagtaaaagtaacccgtattcatgaatatgctggcccgagccatgatccaaaatttttatttccgacagcagatcaaagtctgttagaagagcataaagatatgcttgcaccacatcattggattccacaaatgaatcgtcttattgtcagtattcaattttgggtggttcatgcgggtaataatattattgtgattgataccggtgttggtaatttcaaacaacgtccagaaattcctcggatgcatatgctgaataacttgatcactgagtggatgacagctgctggcgcacctcctgaaaaggtaactcatgtggtgattacccatttacactctgaccatgttggctggaatacgatttggaaagacaaccgctggacaccaaccttccctaatgccaaatactatttacctaaagaggactttgatttttgtcatgaaggaaaaaataaagaacctggcgttatcgatgtttttggtgattccttcttcgatagtgtaatgcccgtatttaacgaaggtctggttgagtttataaaacctcacactgaaattgccgattgcttagttgtagagcctgcacccggtcatagcccaggacaagtcacttttcgtgttagctctcaaggagaagaagcaatcttttgtggcgacgtattccatagtccactacaaattgttcgtcctgaaatcaattcaggttattgcatttggccggatatcgcacgaaaaactcggcttgaatgcttggagcgtgctgtaagccgagaagctttactcttgcctgttcactttggtgacccgtattgtggctacattcgtaaacaagataatggatttatctttgaaccttcagatacttgggatcgtgtttaa

SEQ ID NO: 70275 - DNA, 1344 bp, Acinetobacter baumannii
atgaaaaaaccagtaaataaaaatttactggttatgggtactctttgcctatccataaccagtatcaatacaactcgggctgatgttattgatgatacaaaatttaatgtgctagcaaaaaactattatttcaatcgcgactttcgtaaaggtgaatttaattctgccggacagaatgctcaattacctgtatctgaacgtaaaggttatcgtgaagaatggacccaaggtttcattgccaacatagagacaggttggacagatacgcctatacagttcggtttaaacggttatggcctgattgctttaaaactcgatagtgatggatatcgaactggtacaaataatttagaagtcgactcgacaggaaaacctaaatcggcaaccgccgaatttggcggtgccttacgggcaaaatataaggaaactgaagcagtactaggtaatcaattcccgaacaatcctattcttggaaccaattattcgcgtctacttccttcaatgtcgacaggtctatcgattaaggatcagagctttgagaatctcaatttagattttggttattttacgcagatgagccctgttgattcgaccgatcgcttaaactattttaatactgattacaataatggaattcaaggtgattatgttgcctatataggagcaacccataaacacgataatattgaaacttctgcttatatttcagaattagagaatgtctggatgcaatattatttaggagcaaaatataaacatcaaattgatgctcaatcaaatttcaatctacaaacaaataactatattaaccgagatacaggtgatgccacgggcggaaatattagtacaagtattgtttcagtaatgggaacctataaattatctaaccacaatttcagtttagcttatcaacaagtattaggtgacgagccctttgactggataggatttaacaataatggaggaattcctagtacccccaatactgtgcagttctcaacatttactgaggccaaagaaaaatcagctcaagttaaatatgaaatcgacttctcaccttatggagttgatggtttatcatttatgactcgttatctatatggctgggatatggataatacagggagtgataatgttttttacaccaaacgtcatgtttatgaccagagtatagataacaaacattgggaaagagatatcgaattacgttacaaagttaagcaaggcattgcgaaagatcttgatgttcgtcttcgtcaagccactcatagagcaactaaaggctatagatatgggaatattgatgaagtccgtttaattcttgaatatccattttcattctaa

SEQ ID NO: 70276 - DNA, 297 bp, Acinetobacter baumannii
atgccttatgttgtagaaacctgggacaaaatagaccatcaacttcttagaaaaaaattaagacaggatcatttagattatctaaatcaaaatcttgaactacttttagcttgtggcgcaaagttggatgataatggccaagacttaggcggtggaatttatattattgatgtagcttcaagagaagctgctcaaaaatttattgaacaagatcctttttacattggaggtctatttcagaaaatcaaaatagaccgctggagaaaggcttatttggacggaaaattttgcttataa

SEQ ID NO: 70277 - DNA, 705 bp, Acinetobacter baumannii
atgtcaaaaattaataaagttctcatcacaggcggtgctcgaggaatcggtgctgcaattgctcaacaatgtaaaaaaaatggatggtatccaattattttagataaagagagtgcggatatagaagtcgatttattagatgtagaagcaactgccgccgcactgaaaaagcttctaaaagatggccccattactcgcttagtgaataatgttggaatggtcaaaccagacaatattgagaatcaaagtttagacgattttaatcaagtacttagtctcaatgtacgatgctccttacagtgtattcaagccctacttccaaatatgaaatcagaaaactttggacgtattgttaatatgtcttctagagcagctttaggtaaaacacagcgaagtgcttatgcagtgagcaaagctggccttattggcttaagtagagtagcagcgctagaacttggtgtttatggtattactgtaaattcgattgcaccgggtccaatagaaacagagcttttcaccgcagctaacccacccgattcacccgtaacgcaacagattttacaaagtattcctgtaaaacgactgggacaaccttcagatattgcacatgcatgttcatattttttaagtgatgaagcaagttttgttacaggccagactctatacgtgtgtggcggtatgagtatcggagcaactcctgtctaa

SEQ ID NO: 70278 - DNA, 1044 bp, Acinetobacter baumannii
atgagaagatggttacaacgtcctaagggatcaaattggggagattttggtgatgatgatcgtattggtcgtttaaacttaattaacgctgaaaaagtacttgaaggtatccgagaggttaaagaaggaaaaactttttgcttaagtttaccattggactatcctggtggtaatgcactaaatataaatagaaatcctccaattcttcgtccattacaacgatatggtaaagtcaattttaactgtgaaatgaatcaatttgatcatgaaatctctgatgtcatgagtgacgacttagctattttacacttgcagtattccacacaatgggacgctttcgctcatgtaggtactatgtttgacctatataaaaatggagaagaagaagcagcttactataatggattttccgcaagagattctatgatctatcctgattgcttagaagatactggcctccaaaatataaaaagccaaagcacgtcctctgcaataaaattaggtatcgaacatctagctgaacatggtttacaaggccgggctgtaatgattgatttagctcatcatcttggtacagaaaggactaatgtcggatatgaaattattaaagatattattgaaaaggatcaattaaaaattggcgtaggagatattctctgtttacatacaggttatgcagaagcactattaaaaatgaataagtctcccaatattaaagttctaaatcgaaccggcgctgtattaaatggtggcgatccaaagttattggaatggattacagattcaggaattgctgcaatagctgctgataattactcagttgaagaatttccatatagccaaagacagtcttgctgttcagccttacctttacatcaacattgtctatttaaacttggaattcctttaggtgagttatggtatttatctgatttagctaaatatttaagaactcatcatcggtctagctttttattaacggctcctccattacgtttgacaggagctgtggggtctccagttacgcctattgcaactgtttaa

SEQ ID NO: 70279 - DNA, 180 bp, Acinetobacter baumannii
gtgaaacacttaaaagggacatttaccaacaaagtcgaagctgaacgtgtgagtgctgcgaagatggctgagattaagcgccaaatggcgaaattcagtatcaatttagcgtatggtgtaccacagatcagtacagggtcccccattaagcttcagggctttaaagctgaggtagactag

SEQ ID NO: 70280 - DNA, 312 bp, Acinetobacter baumannii
atgcctgtagcatctaaaatatgtgagcttctaaataataaaagtaaaccaaactggtggcgattcaccataaatcgagccattgaatgtggtgagttatcatctgtagaacttgaggaagcatatttaattgctaaaatggaatttggactagaagaaaagtgtgcaaactacccttcattaactaagccagtagaacttacgggttatcatgaagaagtagaagagacaagattagtttctattggaaatacaactaatatctcaaatcttgtatcacaaaaaaaattgaattttcaactactggattaa

SEQ ID NO: 70281 - DNA, 1095 bp, Acinetobacter baumannii
ttggatgaattactaaaaacaagtgaattcataaagaataaagcaaaaacagaagaaactttttatgctgcggccactgttctgccaaagatgaattcaaatacaacacctagcaaattagttataagcgcatctttagatccaaatcaagtagatctgctgtgtgcaacgcaggaagagttaaaagaactatctgacctacgggttgaagtattggaattagaaaacaatacacctgaaaaacttcgagaagaatataaaaatagaagattaagaattgtcccacttcaagtattcctgacatcacttataaatgaattaggatctgaaaaatttcaacaaattaaagaattacatgaaaaaaaagttcagacaaaaaatgcagcagacttgttaagtaaatcaactttttctgtattacccatatctgaaatcggatctgaagaatggattacaatgtggaaatccgttaaaaattttatagaatgtttaaataacaattttccagttttagaaggggatcattgtccgacttgcttacaagtagtggatcatgcaacagctgcaagacttttaacatttgatgaatatctgcagaatgaattacaaaaagaagctgcaattgcattagataattggaatactgtactaaaaaaaattaagaaattaaatttctctaaaactccctatgaggccatactcaatgatattaaaagcaaagatgaagcgtttagtctccttttatataatttaattgaccaattaaatgaacgggcaaaaagtatattaaaagatataccctcctttgactttgatgatataaatttagaatcatttacaaggcttaatactcacattttaaaattagaagagcttgaaaaaacagtattaaatgatgatagtaaaataaaatccattttattaaaaaaacagagaatcttggaaattgaagatagagaaaaaataatatcggtgaaggatcaaataaaagaagagataaaaaaagcgaaaaaaaatgaattatttagtaaaattactagcacttacattttgctggggagtatattctataaatttacgtccagatttatatag

SEQ ID NO: 70282 - DNA, 363 bp, Acinetobacter baumannii
atggaaattactcatatcgttggactgcttggtgccttagttggaattattggtatattttttaaacgacaagaaatcacagctttggcgcataaagattatacggctaaacttgattcaacaaatagatttttcgaaaacttttttgagaaatatggagttaggagattagttcttgatagggcagcacaagaactagctaggttggattatgttgactatgattttatttgttatctagtaaagttacatgaggctcggttaattaatttagatcaaattattagactatataaatctggacgtaaatttatagaatatactccccagcaaaatgtaagtgctagtaattttactaaataa

SEQ ID NO: 70283 - DNA, 1368 bp, Acinetobacter baumannii
atgagtcaagatacgaagtaccaagtatttattagttcaacatatacagatttaatagaagcgcgaagtgccgcaattaatactgttttagaatcttataactttccagtaggtatggaattatttggtgctgataatgatgagcaatggacaattattaaagatttaattgattcaagtgatttttatattttaatattgggtcatcgatacggttcgatctcgaaacaagatgggattagctttacagaaaaagagttcgattacgctatcagtaaagggttaaagatactttgttttgttcgtaatgataatgttcctacacgcccgcatgaacgagatgctaacaatgaaaatattgataaactacagcgttttcgagaaaaggttctgactgatcgtttgtgcgaattttgggatacggtagatgatttaaaacataagatttcaaattcactttataaaaacatgagaaagcatcgggggggcggttggatcagaggaaaccaaatttcaggtcaacttgctgaagaactagctaagctcagtgaggaaaatagaaaactccgcgaagaaaatgaacgtattaaagagtcgattaaagtaaaacaacctttacttaaagtaagcattaatgacatagcgaatacttcaatagaagagtttgatcaaatagagctattttggttcaaattaagggaggatgactactatgaaaaacctgaaagaatttccactcgcatggaaatgcgacgtgcaggagatttattgacaactcattcaattttgggaatgcatgatataaaaaaatatattcaagaatataatgatgaagttgatgctatttcagaagtagatataaataatcataatcacgctttaagagcacttcatcagttagaagtaagatcaagtcagttaaatattgctgttgaaaatattggtaataatttggctaacatgattagtgtagaaatcgaatttccaaattttattacaattattgatgataaatctgatgaagatattaaatggtatcaaaagaacatacagaaaagtttgattccaaatattaagtcacccgaggcaagacagcaggaatatatgtcaggagtgttaaaaaacttagcgactatagattacggaagtttaatgccaaaagtaaatatgggcttaagtgatagctactccgatgaaaatactatttacattacaactaattcacttttacatacaagaaaaataaaatttgataattattatctagttcctaacgctattgatgaaggtgtaataaaaataaatattatgtgtgcggaatatacagatcctatttcttttgaaataccagtagttgttactgcttag

SEQ ID NO: 70284 - DNA, 933 bp, Acinetobacter baumannii
atgatcaaaggtttagcgattacaccgccaatactaggacggatcagtatcggtaagagggttgagaaaaatggtaaacgcatccctgaaaaggatgaccaatttaccattaccagccaaatccaaaataaggacagtggttgggtcaaacatccactcgatgaacaacttcgagttaaagcacccaatcaaaaaatcagaaccattccagtgcggatgatctttaatgatcctgaactcaatcttcgtgcagagtacagcctatttgaccgtcaaacgggtagacctgtttgtgtgggtaatggagaaacttgccagcgactgacccatcaaggggttgagcatcatccttgtccatctccagatttatgtgcattggcccaaggagggctgtgtaaaccgtatggccgactctatgtgaatttagatgaatccgatgagttgggtacattcatctttagaaccacaagttttaatagtattcgtactttggcagcaagactcaactattaccatgcggcatcgggtggcttactgtcatgtctaccgctacaactgacacttcggggaaagtccactacgcaaagctatcgtcagccggtgtattatgtggatttaaccttacgagatggcacaaaccttcaacaagcgattcaaactgccaaggagattgaccaacaaagtaaaaccgtaggcttcaatcaaaatgccttggacgcaatagcacgactaggcttgagtaatgcacagtttgaggtgaatgcggaggaaggattggatttggttgaggagttttactcggatgaggttgttgagtctgaacaaactcagactgactcaaaaactaaggcaaagcctaaattcaatcaagatgatggatttgtacaggatatgcataaagagttacaggggagtgtgagggcagtgaattag

SEQ ID NO: 70285 - DNA, 1044 bp, Acinetobacter baumannii
atgaactcagctttaattaatccaaacaatgcaatactgaatatacataccaactgtccgaaactgtttaccgctaaacgctttgtggagaccaaaaatatgagccaagcggaatggcttgaagtaagacgcaagggcattggcagtagtgactgtgctgctgcctgtggccttaatccctatatgtcgatgctggaattgtggatgatcaaaacaggacggattcaacaaagcattgaagaggatagtgaaggctatgcacctttatattggggtaagcgacttgaaccgcttgttgccgagtattacagcatgcataccaaatataaagtccgtcgggtcaatgccgtattacagcatcctgatcccgacaagtatttcatgctggctaatctggattattccgtagtgggtgatgcagatgtacagattctggagtgcaaaaccgcaggggaatatggggctaaactctggcgagatggtgtgcctttatatgtactttgccaagtgcaacatcaattggcagtgacaggcaaaaaagcagcgcatatttgtgtgctgctctgtggacatgaaacacgcatttttaaagtcacgcgttctgaatcggtgatacaacacatcattaatgcggaacgttacttctgggattgtgtggaaaaggatatcccacctgaagcagatgccagtgaatcggcagccaaagctttacagctactctatcctgaacatgtaccactcagtactaccgatctatctgaagacgagcaagccaatcaacaatttgagcaaatgatccgagtacgcaatcaagttgaaaagtatcaggagcaatttgacttccttaaacatcagttgcaagccaagatgcaacaggctgagcgcgccacctttaaaacaggttcagtgacgtggaagaaatctaaagactcgattgctttggatacaaaggctttactcaaatcacaccctgaatatctcaatcaatttcagcagaacaagcaaggcacacggcgttttcagatttatgttaatggtggataa

SEQ ID NO: 70286 - DNA, 249 bp, Acinetobacter baumannii
atgccgtatcgagattttgaccagatggaagattcaaacttttcacaatatgaaccgttaaaaccggcgctacaggaatggggtcttcgcaattcacccaccactctggcggtgctgggcatgtcgctggcgaagtcactgggctattcaccttttattggtgggattgcaggagccatgctgggtggggtaattctggtcattgctgaccagacacaggcatcttaccgttcgccattgcataaatag

SEQ ID NO: 70287 - DNA, 279 bp, Acinetobacter baumannii
atgtctttttctaatcgtctgcccttactgggcattgtgctgctggcggctgccgtgttagctggctgcgaaagcaaatccaaacgtgattttaatgccggctgccagtcgggtggcacagaccgttccacctgttcctgtgtctatgaccggctggaagctcattactctcctgcatttatggaaaagctgggccaacagaatgtcagtcaacttgatctgcctcaggattttaccgagcagatgctacgtgcagctcaagcctgccagtctcgctag

SEQ ID NO: 70288 - DNA, 417 bp, Acinetobacter baumannii
atgaataaacagatcaagaattttttgcagtcaggggtgattgtagccagtctggcattaccgggcttaagtcatgcagacatgacgcaggtgatggcgctggtcaatgatccttctgccgcacctgcagtgaaacgctgtgagggcaataccaattgcaatgcgtttgtggcactcagcaagcagtggcaggtcatccccaaagatgatccgttgcgctatttcatctatagcggtgatctgaatgggctcatccgggaaggcaaggatttgcatcagcacaagttattagacctggatgactttgcctatcaggtttttgattatcacgccgagaattctaatgaccgctggctgtatgtcaaaggcttatgcgtactgaagtatgtgcagcgcacccagttcacaaagccataa

SEQ ID NO: 70289 - DNA, 573 bp, Acinetobacter baumannii
atgaaaaaactgatcatcacggctgcactttttaccctgctcaccgcctgcagcaaaacacctgaaagtccagcttctgctgctaatagcgaacatgaatccgtttcatctgatgacagcgctataaaagatgagacaaaagagcgtgaggctgaagcggccgccatcgcgcatgaccgctatgacccggacagtatttatgaaggggctgaaaatattgatattccaccgccacagatgaaaagaaagctattgcccggtgaagcacttgaagtgaagtttaggcctgccgaaacttatgttgggtttacagtcatcacatccactgtcttagatagcacccgcttaagagtagtctcagaagttaacgatgtactggataaagtggaaatagacaaccccaactgcaaagttattggtatagaaccatatacggttaaatttcctaagcaaacctactacggtgataactttaacctgctgctaaagggctgtactgcagacgaaatcaaggaagtctatttgtatacgacacgtggcaaactcacccaccgtgccattgttgaagaatag

SEQ ID NO: 70290 - DNA, 402 bp, Acinetobacter baumannii
atgcaaacggatttaagcgaaacactggccgatgatgaaatgccggcttcatctgaaacagatctgaacaatcaaaatttagatacggcatcgattgctgatgagcaaacagaagctaaggctatagctgaagaatttgacatacgcgtctaccgtgctgaatcgcaaggttcattgacaggttatattgataaaatcgatattatttcactcaacgatcagcccaccaccattacgggcgttcaggtcaaccgcggcaactgtgaaataacccgcatatatgattataaaaacatgtattacggctcagcggctttagcttatccgcgctgcaaggttgagtctattcgtgaagtcagtatcagtacagcttatgggacttatgcttatcggattgggtga

SEQ ID NO: 70291 - DNA, 1308 bp, Acinetobacter baumannii
gtgattagagattatcaaacagaagagttgtttaaagcagtattagcgaatctttttagattagttgttatttattcgtgtgagatgattaaagcaaaaaaaagatttccagatatgtatagatggtttgaggaaaataacgaagtcgtagcttttgaaattagaaattttctaagagaaaaaaagggtaataatttttcaatcaaagttgatagttttgatgatatgattcaatttgacctttttgaggatgatattgtttatgagttaaatcaatacttttgggattttaaacaatttcatgatatatcgtacaataaggctctaatatcagagttaaacattgaccaagatattatagagatttttttttataatttaatagataatttaagctctcctaaagaatatacaaatcagttcttagattattataactttttcaataactatgcattatcctcctttctttctaaagatagagtaaatcgatcaatttttagatactttcaattatatgcagaaatagtgagcccgaatactcaattggaaaataaggcaattcagagaaaatttatggatttgctaagagaaattccatactactcaatatttgcacgtacatctatcacaggtttttctacatttaatacgtctcaaggtaaaaaatattattcaactttgaagacaccattaaatttcaaaccaggtactttagttgataatttattgcattttttgtttcaacatctgattgagcttttttatttcgattttttaaaagatgatcccaaaaattttaaattaaagcttgctgttggtaaatcaaattttttgaatgggcagcgtttgtctaaatataataagctttatgaatgtaataatataatgaaattattattgcaaacttggcccaaagaacaacatttagtgtatagaagtgtagaaaaagagggttcaatcattcctgtgttacgcagtattatgtatgaaaattttttagacgaatatgataaatctattttttctcacaatgattctagagaaaagacaagtccaaataaaataaaacgagataaagatgctagagcaagaatattggcattttttaaatatttagagtttggttttttagatatgggttttaaggtcaaaatgagtgttgatgctgataaaaccgataattggaaaatagaatttatatcaaatagtcgtaacagcatgggtaattttacgtggacttggaatcaaataaagtcagcttacagtgatcataaaaaaaagacaaatttgtttaattatgaataa

SEQ ID NO: 70292 - DNA, 1191 bp, Acinetobacter baumannii
atggaaccacaaattaatattgaacaaaattatccgtctaatgtattagagctcactagtgaacaatgcaatggtaaatttactcttaaagagaatcccgttgtttcaagtatgttcagtatgatttttgccattaatcaaattgaacgtgaatcactagagtacttatttaagctcaacaatgaaggcttaagcttaaagacctatgacacttcacttgatttattcttaaaaggaatctattcaattgaacaagtcagtcaaagtaactatcactgtgaacatagcgtcatttttaaacaagcctatgatgcagtggttgcacctcacattcatcctaacgatgaaactttattttggaatgcactaccaaattatagattcgtagtattagatgaggagacaggaaatcccaaaagctcccatacaactgctcaactaaaaaatgagttgattcgtgagatttttatccggatagattcacctatctttaaagcggcccagaatgcacgtgctgaaaaagccaaacatcagtacaagcgggcagtcaagttaatacaatgcctgagaaagctttttagcaaattgttagtaatccgtattgatttatgctggaaacacctgatacaggataatctcacgtttgacgaaatgagagcctatttcgctcaactgttaaagcgctttcattatgacaaaaaccttcccaacattgctggttatatctggaagctcgaattcggtcagcataaaggctaccactatcactgcctgttctttatggatggtaataagttccagcgtgatactcactatgcagaggtcattggtcagtactggtcacaactgaccgggaacaagggctactactttaactgtcaccgcgacaagatcaagtatcgcaacctggctattggcatggctcatcatgatgatcagaccttctttgacaaccttgatcaggttctattgtacatctgcaagcaggatcagttcctcattgatcaacgtcttctaacccaaaaattacgtgtattccagacaagcaagcttcctcgtaaaaccgggtctgtggggcgtccccgccaatttaaataccatgagctgtcacctgttcaagctacaccaaaagagcttgtaacaggtatccatacaccggctaaatttaaagtattaaaaggaaatatataa

SEQ ID NO: 70293 - DNA, 990 bp, Acinetobacter baumannii
atgagcttcgaaaaacttgaacaaatcaatgcaacagacttaataggtggctcaaataatctgcagctcttgtcttacctgaagcatttaagtgaaactgctcatcaaatgagcttgaagaactcaaaaccgttccagaccaaaggagaggtactcataccttcagcagcattaattcaactagacacagcagtaaaaaccatgttgcaaatggttcagtcaggttgtacgccttccctctccctgcaagctcatccatttgtattagacaaaatgagtagcctgttattttttaaagtttatgaaattgttaaacagaggcaatggatagatcttttagcaattaaccagcatcccgcaaaagcccagatacatctatttttacagcaattatggaatgaaatccggggatatgctgcaagtactgaggctcaaagtaatcttaaaacccgtaacaagctaataaccgatcaagctaccaaaaattctagagtcgttagccgactacttactgctcatactaatattcaggtagcgagagtttcttgtttatttaatatgactggtcatacacagctactagacatgaacagagatgagaaggtgatgacaaagctaaaaggcaagttaattaaagagcttctacaactcaatcaaggagggatattatgtattcagtggcgtatccagcaaaccctgttcggtcagtactatttaaatatgctggtttattatcgtgatcaacatcatttaaatttacctagtcatgaagaccactttatacatggatctgatgacagtacacaaccgactgttcaactggatttaagcaatactcttatacattacgctcgaattgaaagagataattttcagggaataaatctggcgcaatggaaagtaatttttaaagtgatgctctatcctttgaagtattattattatcattccaaaatcatatcacccaagtttgaatacatcatttactga

SEQ ID NO: 70294 - DNA, 321 bp, Acinetobacter baumannii
atgaaagaaggaatttatttcgtgaagtttgcaagtgatcgtgactatggagcgggcattgtaaccatcaagaatgggatcgttaatggtggtgatcacggtttcatttacaaggggcatgttgagggagataaggtaaatcttgtagctaaacagcatgattcagctgtaccttctgtttttggcaatattagtgagtttgatctcaatcttatttctattcaaacgagcgatggatatcaactcaaaggtacaactaaattggcaccaggaagtcaaatcaacatctcggcaaaatttattggtgaattattaacttaa

SEQ ID NO: 70295 - DNA, 147 bp, Acinetobacter baumannii
atgaaacaaactgctattaatttatttatcaaatgctgtgtaaaaattactaataaatcacgagttgaacttgcccaaaagtggggggtacattactttttaactcggtcaagaataaaagcttattggttaacaattttttcttaa

SEQ ID NO: 70296 - DNA, 471 bp, Acinetobacter baumannii
ttgaaaagtatatttattaggattaatttaagtatcattttaacttttctatctcatatttcttacgcagatatggtagaagttggaatacaagatgccaaaagatttttttctcagtttacggactttaaacattttgattctcgatatggagttaattcattttattcaccaagctccattcaaattgtaaaaaatgaaatgtatccgaatatcgtgtttaaaagtatagtagttaaaacagtttcaattaaaccgtctaaaggttatgccgttgaaaaactactatttaaatgctcaccatatcaacctaaaggtaattatgtattccaaacaaccgctaggctaatttatttaaataatgggcaagtagctcctaaaaatatgcaacaattagttgttcatgctccagagaataatatcaaccccaacactacaattgatgcctatagaaaaatgctatgctcctaa

SEQ ID NO: 70297 - DNA, 2643 bp, Acinetobacter baumannii
atgacaacatcagataaaattttagatggatatgacaaggtcagtacagctaatgatctaattgataaggcaaaaactttaaatgatttcaaaaatgatttagataaggggccgccacaaacacctgaagatgctggaaataccataggtttattgcttcctttaattcctggtttgggaggccttgatggagatgttgctcaaaaatggggagaaaatgctgctagaaatattgacccaagaaatagagtagatagagcagttgaacaggcgttatctggtggtgaggggaaatatcattatgttgatccattaatactagatctgaatggaaatggaattgaaacaaatggattagaagaaggggtgaaatttgaattaaatacatctggccttcaagttaaaacaggatgggtatcttctaacgatggcttattagtctgggatagaaataatgatgggcatattaatgatgcttcagaattatttggtaatcatgttttaatgaatgatggatcgattagccaaaatggttttactgcactcagtgatttagatactaataaagataatattgttagtagtgatgatgaggcttttaaaaatctaagagtatggagagaccttaatcaggatggaattagccaacaaaatgagctgtttacactaaatgatttagatattaaatcacttaacttaaattattcagatgttaatacgaaccttgcaaatggaaatattatttctcaaacaggaacttatgagaaaaatgatggttcttctcatgtcatgggagacgtgaattttgcaattgatatcactcaaaccaatagggaagatactaatctaaaagatttaaaccttgctgatcttattctttttggtagaggcagagtttcagatttacaaatggctgctaaaggatcaggggaactcagaaatataatagaagattataagaacttaacaagtattgctgatagggaagctatgcttgataaattaataatacagtgggcaaaaacagatccttattattcggaagatataaatttagtaggcagatggatgttgtcagcaaacgaaggggttgcaataagacgtccaaatggtagtggtaatgtagctgtagaaatacccttatctacttttagtgatttgcctctaaatatacagcaaaagtttgaacaaattaaaccttatgttgctgcactcaattcttttactggtaaaaatataaccactctattttttaatgggaaagattattctggagtaagtgctgagagtgttattgataaaatggccgatgcctttgctattttaaaaggcttaatctttaaagaattatattcacaaactatatttttagaccaatttggtgatgatatttatggttctatgacagaatcctcaaaagtttttctagatatccctaaaattttttctaaattagataatttatctactattaatgaaggtgaagcatttaaaaatcttttcttattattaaatcatcttaaagagtatggatcaaaaattcaaattataaaccttgattatttagaaactttatttaatcactatgtggttgatttaggaggtatcaaagttagtacatggttcgatgaactaagccaatatagttatgctaattcgaaggtatatattggtaatgatactgatgatgtaatagaaaatatagataaaaatattgacggttatctttatggtaatgatggtgatgatcagctttatggcaatataaataaagacattcttataggcggagcgggcaatgacacgctaactggcggtgcgggtctggataccttgattggtggcagtggtaatgatgtcatgtcaggcggtgattacgagaaagatatttatatcttccagtcaggccatggacaggacacgattaatgacagaagtaatgactggaattactttaacctgtttaatgatgtgaaatttgaaggggccaacgttgccgatgcccaattcttaagaataggtaatgacctggtgatcaaggcatttggtacagatgactcggtcagctttaagaactacttgagtgacagtgatcagtacagtcgggactttaactttatctttgccgacaagaccttaactacagcagatgtaatgaatattgtcataccgcttaacggcacggatggtaacgatgtgcagaatggctggaaaggtaaggacaatctggttgggggacttggagatgacactttaaatggcttagctggagacgactggctggaaggtggagcaggcaacgatacgctgaatggcggaattggtgctgatactgcaattttcaaaattttagaaggtttgggaaatgatgctacaggtggtaatggcattgatacatggtcagacttcacagtttcccaaggagataaaatcaatatttctgatttaattattggtcaagctagtaaagaaaatctcaatcaatttgtatcctttgaaaaaagcggttcaacagttacgctaagtttggatagagatggaaatgatgtaaattattcagctaccaagctattaattttaaataatcaaacaaatataaatagtttaaatgatttaattaaagctgatgtatttatagtttag

SEQ ID NO: 70298 - DNA, 279 bp, Acinetobacter baumannii
  misc_feature (253)..(262): n is a, c, g, or t
atgagttacattctaggcatttccgctttttatcatgatagcgctattaccttacttaaaaatggcgagattatatgtgcattacaagaagaacgtttttctcgcattaagcaagacaatcgctttccccgtcaagcattacttgcttgttttaagcaagctgaaattactcttaaagatatttcttatattgcctattatgaagatccagaaattaaatttgaacgtatatacacgacttataaaaagaacnnnnnnnnnntccaaaaggtgcattaa

SEQ ID NO: 70299 - DNA, 141 bp, Acinetobacter baumannii
atgactattattctatattttttacgtacttttattgattttacttacattcggcattttttatttgttcaagcatttttagagttcaaaaatcgtttacttaaatcttttttctaccctttttatataagtttgggttaa

SEQ ID NO: 70300 - DNA, 606 bp, Acinetobacter baumannii
atgacagtaatttcttatggttcacaatatgtaagtactaaatctaaaacttcatttaccgagatttgttttgccggtatagtgggtttttttggtgcaatgggtacaggtagttctttaaatcaaagagatgtatatgaatatgctgcatatgtagttcctgtagatgataaaaaggatggaattgaatctgataaaaaaactagttatttaagtatttctgagcaagttaaaataattaaagatagtttcggcttaaatatgtctgctatggcagagttattaaatattagtagaccaacaatttatgcttggataagaggagaacctcctaaaacacaagataatatttcccatattagttttgttgaaaaacaggctttgctttatcgtgatttacatttagatagacctgataattttattaaaagacctatttttgatggtgagagtttgttttctttattacgagaagaaaaacaaattaatgactatatgtatactcttataaaagatttagatactaaagaatctcaaactagagctcatggtctaaagaaaaatgaaatcagaacatccgatgatattttgaatgatttagcgtaa

SEQ ID NO: 70301 - DNA, 819 bp, Acinetobacter baumannii
atgattttttttcttaatcgattaatatttttaactttaactattatttttctacaaagtactgtttatgccgaaagtagaactatcaatatggaaaaagtttcagcagctgttgcgaaaggagatgtagaagtcattcacttcatgggcaattcatattttgagggattatatgggaaccctaaggattataataaagcatttgaatggtatgaaaaatcagcaaaacttggttataccaaatcacaaattgcagtagcagatatgtattttaatggttttggaactaataaagatcctgctaaggggattgaatggcttcaaaaagccataaataaaaatgatacaaatgcaatggtcctcttagctataatgtactctaaaggtaatatcattgaaaagaatactaaaaagtatattgaactattaaagaaagcagatgctcttggaaattatggagccacatatctattaggtgttgcctacctacaaggaaatggcttagaaaaaaatcaagataaagggattgagcttttaaccaatgcatctaatcatggcaacactgtagctcaatcagtattaggttctatttattatcaaggtaaattaataaatcaagattatacaaaagcacttacttatttattaaaggccgctgaatctaatgataattctgctgaatttctactaggctatatgtatgaaaaaggacatggcgtagaaaaagacaaagttaaggcaaaagagtggtatgagcgatcaaaagcacatggcaacaagacagctgaattaatgattaatcttttatttttatcctaa

SEQ ID NO: 70302 - DNA, 651 bp, Acinetobacter baumannii
atggaaaattttcagcccgaattgaaaaaaggagcatttatttgcccgttatgtaatgtttatgcgaatatgcaatggattcttagtgataaaaatgaaaaaaatgatccaaacataagtatatatttagctagatgcttctattgtagatcagattctatttggcgcgttacaataccttatgccaaacctcatacttcagagatgatttaccccaaaacagatgtaattgttaaagctgaagctgatatgccagaagacgttaaatcagattttgaggaagcaaaaaaggtttataacgcatcgcctaaagctgcggcagctctattacgcttagctttacaaaaactattagttcacttaggacaaccaggtaaaaatatcaattcagaaattggcaaactagtagctgaagggaaattaaatggcggggttcaaaaagcagctgatactgttaggttaacaggaaataattctgtacatcctggtgagatgaatgaagaagacgttgactatatcgcttcaaaaatgtttgatttaattaattttattattcgaaagacaattactgaacctcgtgaattggaggagctttataggctgactccccaaaatgcacgtgaagcaatagagagaagggacacaaattaa

SEQ ID NO: 70303 - DNA, 372 bp, Acinetobacter baumannii
atgatgtggattgtatttgctgctaaatactggcgagaaatcattattgtgattctcgcttttttattggccataactctggccattcttaacttcaaaattggtgagcttaaaaaatcagatcagaagtgtttatctcagatccaagaaattgagaataagaacttgaaggctcttactgaaaagcagaatcaatttaaccaggtgagcgcggattatgaaaaactcaggtcagagcaaaacacaaaagtcgaaacagttacacgtgaagtgcaaaagatcgttgagcgtcctatttatctcaatcgctgtattgacgatgacggggtgtaccaaatcaacgatcttatcaaagccggtaataccagctaa

SEQ ID NO: 70304 - DNA, 507 bp, Acinetobacter baumannii
atgacaaacaagactaaaattgcggtaacactcttagcagcttcagctgctttttttacgtctttaattgggcatgaggggtatagctcaaagccttatttagatagcggcaacgtgcccaccattgggattggctcgactaaatatgaaaatggcactccggtcaaaatgactgataagcctatcactaaagaacgagcaatccaaatctctaaagctcacatctctaaagacgaaattgcatttcgcaagtctttgccaggtgtgaaattaacacaaacggaatatgacgtttatttagacttcgtttacaactttggccaaagcaattggaatcaatcttcaatgcgccgtcttttaattcaaggccagccacgccaagcatgtaatgccctgctgaaatggaagtatgtggctaaacgtgattgctccatacgttctaacggctgttatggcgtgtggttacgtcaggttgaacgacatacaaaatgtatggaggctcaatga

SEQ ID NO: 70305 - DNA, 639 bp, Acinetobacter baumannii
atgactattgataaattaacagagtttgcaaatcttgccgacgataaaagtagtaatacagaaggtttagaccttgataagggttttcccaaagcattacagcctgctcgtcagtggtttaactggttacttaattcatcaacaaaaaagatcaatgagttgatcgatgcaatcaatgcactcaatgacaagtctgatgatgaaatcggaaatgttgctatttatccttttagcacgattccagctagtcgacttgtttgtgatggtcaactttacaacattgcggattatccaaaattatttgcaaaattagggaatgcttatggtgggaatggtacttctacttttgctgttccggattatcgtggtgttgtattgcgtggtctggactctggacgtggattagatattggacggacattagggtcttatcaagctgacacattaaaaagccatgatcatgatcgaaatactgatggtcgtgtggagtcagttgtattgtctgatggtggtacaaatgcaggtgacattcaaggttctgctgttcgaatgaagcaatacagtaagactggtagtactggttcagatgaaacccgcatgaaaaacacttcggtgatttttgcaataaaagcccgataa

SEQ ID NO: 70306 - DNA, 594 bp, Acinetobacter baumannii
gtggacgcaagcaaatatgtggcccttcttacgagccagcatcgagataaaccaaaatttagaaagactgtagaaacgttaattagtcctttaatagattgtctcgaatgtttgaatggtctcaacgagaagtttgatcttgagacagctactggcgaccaattgcaaattatcgctgattgggtgggagcacctaactccatacctaatgcggtaccagtcgcatattttggctttcaggggcaaccaggttctttaacttggcgtgatactgagtatccgaatattaaatcaggctattggcgtgaatcgggtatgagtggatataccgcgttaaagatgtcaccgcagcttttcaaaaaagtaattaaagccaaaatattgcttaataaaagtgattgttccgagcagtctgcaaaagaaattatttctctcgtaatcgacaaacaattcaagtttagagacaacttaaatatgacgataactttcacatttttagaaagttatgaagtttacgagcgagagctagttaaattaatgttccctgtaccttccggtgtaaggttgattttcgagggcgaagatgactattga

SEQ ID NO: 70307 - DNA, 1185 bp, Acinetobacter baumannii
atgactttaacaacagtagcgccagttattactgatgctggtcccattgcaccaacctattatgaaatagttgattacatcaaaactaagtacaaagaaatttatggagaagatgcctacttagaaaatgatagtcaagatggtcaaatcattggggtttattcacgcggcattgctgatgtaaatgctgtaattgttgatctctattctaccttttcacctaagacagccgttaaagatgctctttctagaaatgtggccatcaatggtatttctcgccagctacccacattttctacagtagatttagaaattacaggttcaccaggaacagaaataacaaatggatatgcgcttgatcgaaatgggaatcagtggctgtttcctgatctagtaagaataccggcatcaggaattgttgttattacagctaaagctaaaaagcctggtgcaatcttagcgctgagcaacaccattacgactattgggaaacctactcgtggctggaagcgggtaaacaaccctgcatcatctactttgggtatgccagttgaatcagatgcaaaacttagacagcgccaagcactatctgtagctattccatcccaatccaaaacagacagcattaaaggtggaatttttagtttagaaggcgtctcacgttgtaagacttatgaaaatgacagcgataaagtcaacgatttaggtatgccaccccatagtttatgtgtggttgtatctggtggtgatgctaatcaaattgcaggacttatgcgctctaaaaagagtttaggttgtggatggtttggcaatgtaaatgtacctatcactaatgcgtttggtgacgaggtatctgtgtcgttataccgaccaaatattagaaatattggtttcaaacttaatgttgttagctcatcacagtatacaaatgagattgaaaacaatattaagaaaaacctggctgattatgtgaaccaactcgatattggcgatcgaatcatgattaataaactttatattcctgcgggcttatttgggaatttagactcagaaacttatcaaattgactctatagagatcttagttgatggcgttgtaattgacggtaatttcagccttgcatttaatgaagttgcttactgtgactcagacaatatcgagataaatgcttcaggagggttctaa

SEQ ID NO: 70308 - DNA, 360 bp, Acinetobacter baumannii
atgcgctatagaaaactttcaagtgatggcgactatgtcttcggatctggcaagaatgattttcttgttaattctccagagactgtcgcgcaagcaattctcacgcgcttaaagctatggctcggcgagtggtttgcagatacatcggacggtaccggatggaatcaatccattgttggtaaacattcaaaaaatctttatgaacttactcttcaccaacgtgtacttgaaacaccaggcgtaaaaagcattgttgattttcaaagcgcattagatccagacgcgcgccgtttaactgtctcaatgacagtgaataccatttttggtgaagcatctcttaacggggacttaacgacatga

SEQ ID NO: 70309 - DNA, 294 bp, Acinetobacter baumannii
atgatctatgaaataccgctcaataatggcaatcaaaaattcagtaccaagttaggcggaacacaatataagttgcaacttatttaccgtgcggatacctggttcttagatatttttgataatgccgaaaatcctttaatcgctggtttgcctttgttgatgggggataatttgcttatccaacatcaacatattattagtggttcattgtatgttctaaatactaatgaagatgaaatccagaaattcaccgatttaggtacgatgataaaactgttttggagtgactcatga

SEQ ID NO: 70310 - DNA, 642 bp, Acinetobacter baumannii
atggcaataggaacattacttaatggtgccctaagttcaggcgtggccatatcaaattctgagattgtaggttcgcttttgttatctggccgtggccgaacgattatggggctattcgcagatgtaactatcgaagaaaagcataaggatgaacttaaggtcacagaacatcctacggaaattggtgcaccaatttcagatcatgcttacaaggaaccgcctgaaattacgatgaaagtgggttggtctgaaagcgcaggcacacttaatggctttttgggaaatactatcctgggtggtaatactagtttatctattgtttatcaaactttattgcagctacaagaagaagctttcccgttaatcatttccacgggtaaacgtctatacacaaacatgcttattaagacgcttggatgtactaccgatcttcaaactgaaaatgttttgatgatcgatatttcatttaaaaaggttctaatcgtcagcacagaaacagctctggtcgccattgaaaatcaagctagtccagaagcaacggcagcagttagcaatggcggtactgttcaaataaaaccaaccaatcaatctcttttaagctcaggtacagaattctttaaatcggttttattgggtgagtga

SEQ ID NO: 70311 - DNA, 603 bp, Acinetobacter baumannii
atgtgtattagctgtacctcttatgcagcccaaatagaaagtaaagcttcacaagcaacaaaatatgttatcgatgatttaaagaataaggtaacgggtagtaatggtaagtattttctaaacaataaaacaattctatttgattttgatgtttggggaataagattaaattccacatttgaaagatgtgatgacgctgcccggtattttaatagtgaatcttatcaaaaggattgttatacaaacattcttagaggttatgataattgggtagaagttagcaaggatccagccattacttttcgtacttggatggcagcagcttcagatgctaccagaggaaacgatattgactttgatcattgggtatcaatgataagagtttatcaggcgaagtttgataaacttgataaagataatgccgctagaaataagttggattcagaattagatccatatgaagctgagttaaggcaagttgtaatgcaacttacacgtgaacgtcaaaaaccttcattatttggtcatgataaaaaaatgaatgaattattaatcaggcaaaaagaacttcaagagaaaattgcagaaattcgcaataagtaa

SEQ ID NO: 70312 - DNA, 375 bp, Acinetobacter baumannii
atgaataaactctttttggttggattagtctttattgctggctgggcaaatgcagcagactataaagcccaattaagcggtaaaaatctcataatggctggtgcaaattgtgcgggtatttctttaaagaacaattctggtttatctagtgagatgggtaatccagaatgttcagtaaatcttcctgcacgtgttaaatggcttgatgaaagtactttcatgttggtggaaaagaataagcctaacgagactagtcctccgagagtgtttatttacaaggttaagtcagtaaatgggaagaaggtggtattaagtgaaatatggacaggttggggaaatcaacctgatgacctgacaacttatacaattaaataa

SEQ ID NO: 70313 - DNA, 2100 bp, Acinetobacter baumannii
atggctaaaaatggtgttgttcgtgactttttggtttcacttggatttgatactgataattcaggtctagctaatatgaaaagtgccatggatggcattgagtggaaagctaaggctttgaatggcgctttgatggctttggcaactggtgcagtactcgcagtacgtcaaacagccagtgaattagataagctttatttttcatctcagcgtattggcgctagtgtcacaaacattaatgcctatgggaacgccattgctcagcttggtggtagtgcggatggtgctatagggtctttagagtcccttgcggaaaagatccgaaattcaccaggctatgaagggcaacttaagagtcttggtgtaagcactcgtgatgcaaatggcgcaatgcgtgaccgtgtggaagtaatgaaggatctaagcggcgtattggctaagatgccagcttatcaagcgaatgcttatgcaaattctcttggtatcgatcaaaaaacaatgttggccatgcgggatggtaaattcatctccaacatggagaaataccagaagatccagaaagaactcggtatgaatgatgacctggctaagtcaggtaacgaattcatgactgaataccgtgatctaacaatgatgacgaaaacaggttttcaagtcatcgttatgcaagccggtaaagctcttattcctatcttgcgtttgcttaatcagttaattcaagcgggcattcatgcgttttcacagttaaacccgcaaatcaaagaaggtttggccattggtctacgctttgcaatgttggctttaatgtttagcgctatggccaagtctttaggtctggtgctcaaatttatcccggcactgaaaacctttatcggattactgaagttattcagactagctttcctagcttcaccaataggtatcatcctagcgttaggtgcagcactagccttgctctacgatgattacaaaacatggcgagacggcggcaaatcactatttgattggtctaagtggaccaatggcattgatacgattatcaataagattaaagactttctagatattctcaacaaggttaaagataaaacggtcgagtttgttcagaagattattaaggatccagccggtgcacttaaagaggttgctacagaagtacagcaaggcgtacaaaatgcgaagaacgccgtacaaaattatgtaaatccttcagaaccgagtaaggctacccctttacaaaacaaagtctcaagcgcttcacacgccgttcaaggtgccattgaacagagtgttgcagttgctgcgggagttgctaaggctacagtaggggctgttaaaggtgcggttaactctggtacaaaaagctttagccaaaacataaccagtaaaaagtttacttccaaaaaagcaaaaactattttaagggtggcaaaagagattggtgtaaacccaaatgatttagcagcagttatttcatttgaaacaggtgggacatttagccctagtgtaaaaaatcctaattcatctgcaacaggattaatacagtttatggaaggaagtggaggcactaagggtaaatattatggaatgagtcgaaaaaagttttcttcattatcgtttgatgagcaaatggagtatgttgaaaagtactttaaagaccgtggtttcaagtcttcaagaaaacgtgatgtagccgatttgtataccgctgtaacaggatatggttacaagaaggggtcaaaagcttatgagcttaataaagtttgggattccaatggagacggctatattgctaagggagaaatggtacaaaataaatcattcaaagcacatcaaaaaaattattattcacagaatgatttaagttcatttaatcaaccagtgataaataattatggaccacctaaaggaaatcctaataagtcagatataaatgcttccaatctaacttcttcgaatgttacgatttatcaaagctatcaaactgatatgacgattaatggcgcttcaaatccacttgattcagccaatgcagttaaacgtcagcaagaaaattccatggtattaatggcgagaaatgcaaaaggaataatggtgtaa

SEQ ID NO: 70314 - DNA, 153 bp, Acinetobacter baumannii
atgcggccagtgattaaaggcatgtgcaaatatgaatctttaattaatgggaagctagatctcgctgatatagctctcatgaatgacgcgctcgatgtcgtagcagataacgaatatctgcttaaccaggagcgtgaaagaaaaaataaataa

SEQ ID NO: 70315 - DNA, 444 bp, Acinetobacter baumannii
gtgagtacatattcttttatggatgttcattgcactttagcgagtgacgatgcggttatcgatgttggttatggggctggggtagctgaagaaggtattacctttggtatggctggcgataaaaacaccatgaccataggtgcagatggtgaggggatgcattcattgcatgctgacaattctggccaagtcactgttcgacttttaaagacatctccaacgaatgctaagttaatgaacctatataacttgcaaaaagcagatacgcgtaaatggggaaaaaacactatcacgatgaataattcctctgcaggtgataatgctacagccaccaaatgcgcatttaaaaaggttcccgacttagccaatgctaaagatggcagcatgctggagtgggtattcgactcaatcaaagtcgatttgaagttaggtacatacgaataa

SEQ ID NO: 70316 - DNA, 387 bp, Acinetobacter baumannii
atgatcgatgagcaatcctttcgggaaacaatgccggcttttgctgatacagcgcaatatccgtcatttcagtttaatttctatttaaaccttgggaaaaaactacttcgtgaggaacgttgggaggatatgctcgattatggtttgaccttgttcattgctcattatcttacgctttacagacgcaccatgaatgctgcaagcattggaggtgatgctggcaagattatcggcaatgagacgtctaaagctgtagacagcgtttctaagtctatggatgtatcaggcgtccttattgctgaggctgggcactggaaccaaacaaccttcggtgttcagttttatcagttaatgatgatggctggcgcgggaggcatccagctatga

SEQ ID NO: 70317 - DNA, 411 bp, Acinetobacter baumannii
atgtcaaagttagtaaaaattcttttaggtaagcagctaacggttaaccttggtcgagatgaacaaggcgaagctaaaacagtagttttgcaagaaggtcttcaagaggtagaggaagagattgccaaacactggtttgtagctgctcatgcgcaagagatccctgaaagttcagcttattcaagtgaacttgaaaaagtgatcgagcaaaaggaccaagaaattgcagcaatgcaaattcagattgatgaagctggaaaacaattccttcagcatgatgcggaaatgaaggctaaggataaagagatcagtgatctaaaaattcagcttgataaagcccttcaaacgcaatcttcagatatgaagatgaaggaaccagctaaggctaaagacgtgccaaaggaagcctaa

SEQ ID NO: 70318 - DNA, 483 bp, Acinetobacter baumannii
atgggtaatgcatatctatatcgtatgccttcaggcattccgggtgatatttcacgtaaagcgcattccactgttgaagcgcatatccttaagggcagttttggggccttcggtatttttggaaagcgcacatctgatggtgttgttcctttggaaccaacagatacagcagccgatatttacggcctgatcgttcgttcatatccaactcaatcggcagttaatggaatgggtgcagtaactcctcagtccggcatcattaatgatgttatgcgccgtgggtacatgacggttaaatgcaatgcgggtacagctaaagcggcaggtaaagttcatgtgcgtattgctactggatctgatcttaagcctattggtggtattgaagcagtagctgacggtgcaaacactattgagctgaccaatgccatgtttatgcatgatgcagatgcacaaaacaacgtggaaatttcctacaacatttaa

SEQ ID NO: 70319 - DNA, 1332 bp, Acinetobacter baumannii
atgtttaaaaagaaacctaaatcaaaggccacgatagatagatctaatttctacactactggtcaaattggtcggacacgggaaactacccctgaaggttatttactttgtcgagaggtgccattagctcggattggtaaattgctttatagcgatggtgaggtgccagttaccgctgataactctggtctaataattattgaacgtggtgaggatgttttattcgatccacgtacgatcgctagtttcgaaggaaaatctgtcactgatgatcatcctaaggattgggtaacaccagagaattggaagcaacttacaaacggaactgcacacgatgttcgccgtggagaggctgaaaattctgattgtttggtggcggatctgctcattacagacaaagacatgattgatgctgtgatgaaaggaaaggttgaggtctctttaggatatgacgctgattacacagaaatcagcgtaggaaaagggcttcaaacaaatatttttggtaatcacattgctctggttgataaggggcgttgtgggtcgcgttgtaaaatcggagatagctttatggctaaaaagaaaattagttttgctgatcgaatccgcaatctagttaaaactaaggatgcagatgaggctgagaaattagccaaagcggtggaagatgaagcactagatatcaaaaccgaagatgaaggtgatgatgatggtgatgacggtggccagacaactgatgccgctatcaatcttcaaattctgaaaaccctcaaaacaatggatgctcgattggtggctttggagaagaagaaaaaaaccaaagattctgatgattctgaaaagaaaaccgaagatgaagatggtgaagaaggcgacggcgaaggtaagaaaaccgaagacgatattttagaagctgaacaagctcaaaaattatctgaacaaggtattcaaaaccatacaggcgattcccttcaggaagttttatcccgtgcagaagtgttagtacctggctttaaaatgccaactttcgacagtgctaacaatggacaagccgttttaaatacaaagcgtaatgttcttaaacaagcccatgctacagaagatggacaaaaagtcttagcgccgtttgttggtgcaaatccaaactttgacactatgccaattcatacggtcgatgctgcatttattggggcatccgagctaatcaagcaaaaaaacaactccgcgggcattcgttcaggcatttcaactaaggattttggtcgtgcaccaattacaccggctgaaattaacaaacgtaaccgtgaacattgggcaaacaaaggaaattaa

SEQ ID NO: 70320 - DNA, 234 bp, Acinetobacter baumannii
atgactaataagctaatcaaatactttgaagcaaaaatatttggcgattcgactaaattaacttttgagtttgatgaaatttcatattttgcaatcaataaatcaagacatataactgatcctgttgtaattgaatatcacgattgcatttttcacatttaccctttaagagctcttagtacactcgagagacaatttttagaaaagggatggagaagttactgtcctgtgtaa

SEQ ID NO: 70321 - DNA, 219 bp, Acinetobacter baumannii
atgaatatctgtgttggtggtgagctggatgggcaagtgatagagaaagaagggaagctacttaaagcctctgaaatcgatccatattttgaaactgagtactacaaacagatttataaccgtgacaatatcatttaccaattctggttacctgtaggatctgatctacatgatatgtctaaattagtattagatatattaagagcacctaaaaactag

SEQ ID NO: 70322 - DNA, 846 bp, Acinetobacter baumannii
atgtacgatgccgatgtatctgcctcccttattagtaaggtgacggatgctgtcattgaacaagtgacagaatggcaaaatagaacactcgatagtctttatcctgttgtctatttagattgcattgttgttaaggttcgtcagcattcaacagtaatcaataaatcagtttatttagcattaggcattaacctggatggccaaaaagaacttcttggcatgtggcttgctcaaacagaaggttccaaattctggctgtcagtcatgacagagcttaaaaatcgaggagtgcaagatattcttgtagcctgccttgcgaagcagcgcttctcaggactaaaaggctttcctgatgcgatagcctctgtctacgctcatactgatatccagctgtgtatcgtacatgttgtacgcaatagcctgagatttttgagctggaaggactacaaagctgtaacagcaggattgaaggcgatctatcaggcaagtacaaaggaaaatgctttaaagtccctagatatcttctgcgatcaatggtatcaccagtatccaaaaattggagaatcctggcgggcaaattgggaaaatatccgaacgatctttagctatcctgctgaaatacgtcatgcgatttatacaacaaatgcaattgaatcattgaatagcgtgatccgccattcaactaaaaagagaaagatcttctcttctgatgattcagtgaaaaaggtcatttatttagcaacttcaaatgctgctaaaaaatggaccatgccaattcaaaattggcgtttagcaatgaattggtttacgattcagttcgatgatcgattaaaagatcatttataa

SEQ ID NO: 70323 - DNA, 435 bp, Acinetobacter baumannii
ttggttaatgtcgttgttacagttactcccggtgcaaccgcatctactgtgccagttgatggtgctgacgggttgcccgctgggtcagttgcaacaactgtaactttgtctccatctttaagatcacctgggtttggtactgtccatttaccatccgggcctgcaactactgtcgctgttgtaccatccgggaagctcacggtaactgttgaaccagcttctgctgtacctgttacaggattagttgcattgattggatcaagtaccggtgcacttggtgctgtcgtatcgacagttaccacagcattgcctgtacccacatttcctgccgggtcagtcgctgtcacagtcacggtatgcggaccgtcagtcaacactggaagtgtattgtctgcaagggtccaggtgccatcaccattattggttgccgggtag

SEQ ID NO: 70324 - DNA, 423 bp, Acinetobacter baumannii
atggctctttctaaaattcgatattttaaggttataaaggagatagaaaattttggtattaactgtattacaaatgaaggtagaggatttgaaaattttttttgctataagacttttacgctagatgaaaataaattaattactctactttgtcaaagaaatcgagatattagccgagatgttatattagattggattaatacaaagactgaaatagatccaaaatttctttgtaagggacatgatattatctcaattttagcaagatcatttagaaagtattttaataatttgggagctcaagaagtaacttctgaaaatattgaggaggaattgttattagcatttccattcagtgattttaaagtacttaattatgttcaagaaatttttagccaattagatattagaactgctgtatag

SEQ ID NO: 70325 - DNA, 888 bp, Acinetobacter baumannii
ttgagatatcctgaaaatggggaaaagaacgattacctaagttttgaagaaagcattaaattattagacactcctccatacaaatttaatgatttgattattagtggttctttaaaaccatgttttccatggagtggatttcttgaagtaaaaagaaagataagtgtatacgaatataggaaattattttattcagactctagtggagatgattttgctaacaattttattgaagagcctgatgttttagttagagcttatgtaaactttaatggttatgtaagacccgtagagtcagctcactatctgaatgctattcttgttggagagtctaaaaaaattgcaatcgaagatatatatttaattgaaaatctaacattcgactctgtggttcaccttatgggtaatcatggtgaaccgcctaaaaaagtactaggtaaaaaagagcttttttgtagagatcaagcgtacaaaatttatgaggctgagaacaacaattacattgatataaaaagttatgtttttctaaaagatgatattcagcaacttattggaaaaaaccaaaatattgaagttgacgatatcaatgaaaaaattaaagcggacttactagcattaagaaaaaggcgaaatggtcaagtagaagatataaccacaacaactagaatttatacagaggttccaaagctcattattgaattaggttatcaacttaatgcgttgcctcaagtaaagcaaattaacggtagaaatggtcgtgacggtctaagagtacaagtgaagtatcatatggaacgaaatcataaagcactacataaggatttaatgcgtaatgagagtacctttaatcaagtatggactgatctaatgggggatattaagatttag

SEQ ID NO: 70326 - DNA, 357 bp, Acinetobacter baumannii
atgaaaccagaacagtttattcgtgagtttggcgaaaagaaggcgagagaggttgttgagggggcgcctaagtatgcaaatgtctatgatatcgacaataaaggatatgcagacacctcggaagacaattgggggttaagttgcaacttaattggattaagaagcctatgtggattagtgggttacttggatcgagtaacaaagttgggaggcttgcttaaagctaaagcccacttggattatttgatttcgttcggttctgagtttgcaggtgtgagcaaagaagagattaagaaattgcaagtcgctattaagtaccacgaatcaatatacggaggcggggatgaaactaactaa

SEQ ID NO: 70327 - DNA, 438 bp, Acinetobacter baumannii
atgaaattaaataaattgactttagcagcttttatgcttttcacattcactggttgcggtggagggggaggcatttatccacagccttcagataagtatccatttgaagcaaaaatgaaagcattattaggcgataatcttgaaattatagattctataaataaatatgaagcacaagtttcttattttgaatttactaaagactctaggaaattagataaaatagtcaggtatttagataaagatggatgggtgttaaaagggcaagggcagggagttgatacatattgtttaggtccaaataacaaaattaatatagtcaacctaacctttggtaagattcaagattataaaggcagggagttgaaaataactaattatgatgttaatacggttttgtatcgatactataagtggggagatgatttgtgtgaataa

SEQ ID NO: 70328 - DNA, 1686 bp, Acinetobacter baumannii
atgcctcaagccaaagatgcgaatttttatactcagattttggagaaaaacaaagatattcaggatttactagataaaattcagtttgatagccagcatggaaaaatttggttcgaagaaaaccgtatgctgctcatgcataccagcatcatgggctttctaagaaaagatttgtataacatgttgggttgggaacggactaagcgtttttttattcgtttaggttatcaagccggtgtgagggatgcagaagtcacttctaaattgcgtccgaatttaaatgaagctgaagcctttatggctggaccgcaaatgcatggtattcgtggcatggttcaagttgaagtcaatgaacttcaattaagtcatgatgagcatcaattttatgcagattttaattggcgcaattcttttgaagcggaagttcatttaagtgaattcggggcttcggaagaatcagtttgttggatgctattgggctatgcttgcggttataccagttttgttatgggacaaaccattatttatcaggaaacccattgtgtagcaaaaggtgatgattgctgtcgtattatcggcaagcctttaaaagaatgggaaaatgccgatgaacttattcaatttatgtcacctgatcctgtttcagatgaattaattgccttgcaagcagagctgaatgagttaaagaaaaatatatatacagatgtagaagccgattacaccatgtttaattctattggtgaatcggtggcttatcgtaaagtctgtgatctgttgaaaaaggcggctggcagtaaggttgctgtattactgcaaggtgaaacaggagtgggcaaggaagcttttgctagagggattcatgaaggtagttctcgtaaagggcaaccctttattgctgtaaactgtgcctgtattccaccagacctaattgaagctgaactttttggtgttgaaaaaggggcatttacaggggcaacacaaactcgaagtggaaagtttgaacgtgccgatcaaggaactattttcttagatgaagtgattgagctttcttcacgtgcgcaagctgccttgctgcgaatgttacaagaaggagaatatgaaagagttggagatcatcaaactagaaaagcggatgtacgtttggttgcagctaccaatgaggatctggaacaagctgtgaaagagggaagatttcgtgctgatttatattatcgcctgaatattttccctgtcattattccgccactacgtgagcgccgtgatgatatccctttattgattacacacttcttgtcgcgttttgagaatatgtatggaaagacgttaaaaggtttaagtgacaaagctaaaaattttgtcatgacctatgaatggcccggtaatattagggaacttgaaaacttattagaacgggcgaccttactgacggatcatcaggaggaaattaaactccatcatttgtttccgcaaattaagcaagatattgaacccaggtctgaaaaagtggatttggaagcagtcatacaagagggcttttgtttggaagatcatgagaaaaaactaatttttatcgcgatgcaaaaaacaaataataatatttctgaagcagcccgtgtattggggatcagccgacctgctttagactaccgtttaaaaaagcaagctattaatataggtaaaaagtag

SEQ ID NO: 70329 - DNA, 291 bp, Acinetobacter baumannii
atgactcaaacactacaacatgatcagctcaccaaatacattcgtgtaacaggcgaccgtcatgccaagtttgttgaatttgacttcgcaatccacgatccaacactttttgtcgaactcattctccctcagcaagcctttcaacatttttgcgaaattaatcatgttgtagaaatgaccggagcccagcaagcttggaatgacgcacaagaagataaatggcgttatggcgttgaacccaccattttaagccaagcccacgaatatttagatcaagaagatcaatcttaa

SEQ ID NO: 70330 - DNA, 1005 bp, Acinetobacter baumannii
atgactttagaaattaaaacatccaacctcgaacctattcgtcaaacctatgcctatatcgaacgtcgctttggtaaaaagccagcgacgcgttatcaagaagtcagttttgacgtacaaggtgcaaccaattttcattatcgcccattgtggaaaccagacaaaacgttaaatgatcacacccatacagcgttacaaatgcaagattggtatgtatttaaagatccgcgccaattttattatggtgcttatgtacagcatcgtgcacgtttacaagagaccgctgaaagcaattactcattctttgaaaaacgccatttaattgaaaatctcagtgatgaagtgaaacagaaaatcatcacttgcttattaccgtttcgttatatcgaacaaaccgccaatctacacatgatgtcaggcagtgcctatggctatggcactgtcattactcaagcttgtatttttgcggcaatggatcgtttgggcatggcgcaatatctctctcgtattggcttactcattgatggcaataccggtgaatcattacaacaagccaaagatagctggatgaatgatgcctcttggcaaccactgcgcaaactatgtgaacaaagcttaacggaacaagattggttcaagctatatatcctgcaaaacctaatcatcgacagcttaatgcaagctctggtttacggtgaactggatcaatggttagttgagcacggcgcacgtgatgtggcgatgctgactgaatttatgaaggactgtttaaccgatttaggcaaatggtcagaccctgttttaaaaacagctattgctgaatctgaagaaaataaagccttaattcaaggttggatagacacacttttacctcaagtgactgaagcctttagtgcatggtcaaatactgctcttggacatccatctatagccaatggcttagcggtcattgcagaacgcagtaaaaaagcaagtttaacccttgaattagaatcggttgcataa

SEQ ID NO: 70331 - DNA, 270 bp, Acinetobacter baumannii
atgagctcaaaagtttatttggcattacaagataacgacacctcacgctatatcattgaagcgattgagcaagataacccagaagctaccattcaataccttcctgccatgattcgtgtggaaaacctcggaaaattagtggttcgcgctgaaactgtctctgaaaaactaggacaagattgggatattcaagaactgcaactcaacatgatcaccttaggtggcaatgtggatgaagatgatgacatcttcacgttgcaatggaattaa

SEQ ID NO: 70332 - DNA, 1539 bp, Acinetobacter baumannii
atgaatagccaagcacaaaatgcgacaaaaacagcaactaaaaaactcaatgcgaaagaccgttaccgtatgctgacccgtgatctggattgggatttttcctatgcagatcgtaaagaggcttttccttacgaagagtttgaaggaattaaaattaccgattggtcaaaatgggaagacccattccgcttaaccatggattcatactggaaatatcagtcagaaaaagagaaaaaactgtatgccatttttgatgcattttctcaaaacaatggtcagatgaatgtcagtaatgaacgctacctcaatgccattaaactgtttttaaccgccgttacaccactggaatatcaggcgtatcaaggttatgcacatgtgggtcgccaatttggcgggatcggtgcacgtatcgcatcgcaaatgcaatcgattgatgaactgcgtcatgtccaaacgcaaattcatgccatgagccattacaacaagttctttgatggcttccaggactgggcgcacatgcatgaccgtgtttggtatctctccgtaccaaaatcattctttgaagatgcgcgttcagcaggcccattcgaattcttattggcgattagcttctcttttgaatatgttctgaccaatttattgtttgtgccattcatgtcaggtgcagcatataacggcgatatggcgaccgtgaccttcggttttagtgcgcagtcggatgaagcacgtcacatgaccttaggtttggaaattgtcaaattcctattggaacaacatgaagataacgtgccgattgttcaggaatggattgataaatggttctggcgtggtactcgtctgctgtctattgtcggcatgatgatggattacatgctgccaaacaaagtgatgtcttggaaagaagcatgggaaacctatttcgaagaagcgggcggcgcattgtttaaagacctcagccgttacggtattcgtatgccgaaatattccgacgtgattgtgaaagaaaaagagcatatttcacatcaagcatggtggattttctataacttcggtcatgctgctggtttccatacatggattccaaccgatgaagaaatggattggttatctgagaaatatcctgacaccttcgataaatattaccgtccgaaatgggaattggcgcgtaagttagaagctgaaggtaaacgcttctatagcaatggcttaccgcaactgtgccaaatctgtcaaattccaatgacctttactgaaatggatggcgacgcaaccatgttcagttaccgtgacagtatttataaaggcgagcgttaccatacctgctcagacggctgtcatgacatttttgaacgtgaacctgaaaaatatattcaagcgtggttgccagtgaaccaaattttacaaggcaactgtggtggtcctgatttagaaagcattttacgtgactattacaacttcaatgtcggcgcagacaatatggatattgaaggctctccagaccaagaacgctggagaaaatggaaaggtcacgttgcataa

SEQ ID NO: 70333 - DNA, 366 bp, Acinetobacter baumannii
atgccagtacaagcgattcaaaaaaactatgaatttgatgcacgtgatgcacaaaaaaattatggcgacaacatgttgctttatgtgggatgggatcatcacacgctgttttgtgccgcacatgcttttgtcgtttcaccacagcaaagtttacaagacctgattgatcagcaaattcaagcaggtttcaatcaacacccagactttgaacatatcgattggtcaaaagtacagttcaccctgaatcgtgaatgcttaacagatatcgatttttctaaaagtttggctgatttaaactttgatcataaatcgctactgcgttttgtgacacccagtttagatggctacaatggcacacatgtctaa

SEQ ID NO: 70334 - DNA, 1062 bp, Acinetobacter baumannii
atgagttatcaagtcacgattgaacctgtcggcatgaccattgaggtggaagaagatcaaaccattttagatgccgctttacgtcaaggggtttggctaccctttgcctgtggtcatggtacctgtggcacctgtaaagttcaggtcactgacggtttttatgatgtcggtgaagcgtctccttttgcgttgatggatatagaacgtgaagaaaataaagtccttgcttgctgctgtaagccagaatctgacatggtgattgaagccgatgttgatgaagacgaggatttcttaggttatttagtccaagactatcaagccaaagttttagagatcaaacagctttcacccaccattaaaggcgtacgtttgcagattgaccgtccaatggaatttcaggctgggcaatacatcaatcttcaattgccaaatattgaagggacacgtgcattttcaattgcgaatccgccgagtgaagaaggcattattgaattgcatattcgccaagtactaggcggtacagccaccacgtatgtacacgaaactttgcaagcgggtgatgaactccaagtttctgggccttatggacagttctttgtgcgtaaatccgatgaaaaagatgccatctttattgccggtggttctggtctatccagtccccaatccatgattttggaccttttagaacaaggtgatacacgtactatctatcttttccaaggcgcgcgtgatgtttctgaactctataaccgtgaagtgtttgagaccttagtcaaagactatccaaacttccgctatattcctgcactgaatgcgcccaaaacagaagatcaatggacaggattcacaggttttgtacatgaagcagtcgcagattattttgaaaataaatgcagtggccataaagcctatttatgtggtccaccaccgatgattgatgctgctatttcaacgctgatgcaaagccgtctctttgaaaaagatattcatactgagcgtttcttaagtgcagcggatggtgcctctaatcaagcacgttctgctttatttagacatatttaa

SEQ ID NO: 70335 - DNA, 924 bp, Acinetobacter baumannii
atgatgaaccgacaacaaattgatacgcttgtgaaaaaaatgaatgttgatacagcgactaaccctgtcgatacacgtatccagcaaattgttgtgcgtttagtaggtgaccttttccaagccattgaagacttagacatttctcaaactgaattgtggaaaggcttagaatacttcactgacgcaggtcaagctaacgaacttggtcttttggctgctggcttaggtcttgagcattatcttgatcttcgtgctgacgaagctgatgctaaagcaggtattactggtggaacaccccgtaccatcgaaggaccgctttatgttgcaggagcgcctgaatcagtcggctttacccgcatggatgatggttctgagtcagaccaagtcgatagcttagtgatagaaggtctcgtcacggatacgaatggcaatattattcccaatgcgaaagttgaaatttggcatgctaatggtttaggcaattattcattctttgataaatcacaatccgagttcaacctgcgccgtaccatttttaccgatgcagatggtaaatatacggctttaaccaccatgcccgtaggctatggctgtccgcctgcaggcaccacgcaagctgttctcaacctcttgggccgtcatggtaatcgcccttctcacgttcattattttgtctcggctccaggttatcgcaaactcactacccaatttaacattgagggtgatcaatacctttgggatgactttgcgtttgcaacacgtgatggattagttgcaacggcaaccgatgttgttgatccagcagaaatgtcaaaattcaatatagataaaccctttaaacacatcatatttaattttgaattggtcaaagaactcaatcaagcaccaccgacagagatcgatcgtcgtcgcgcaagcgtctaa

SEQ ID NO: 70336 - DNA, 1719 bp, Acinetobacter baumannii
atggttactcaaaagctcgctctagtagcgttatttttacccacgctactctgcaatttatccactcgggctgctcctgctaaacagccaaatgtcttggtcattgtggctgatgacttgggattttcggacatacaaccatttggtggcgaaatttctacaccaaatctaaaaaaattagccaaagaaggtgccgtactcagtaactttcatgcaggtccaacctgctcagtcacacgctctatgttattgacaggaaatgatagccatcaagctggtctgggcagcatggctgagtttttacagcccgaacagaaaggcaaaccggggtatgaaggccgtttaaataatcgagtgataaccttagctgagatattaaagcctcaaggctatgcttcttttgtcacaggtaagtggcatttgggtgcaacagaagagagcaacgcaaaagcacgtggttttgatcgctcatttacgctcatgcctggtggcgctgcacatatggatgcaagccaaatgttcccaggaaattataaagctcgatatttagaagatggtaaagatgtaaccttgcctaaagacttttattcgagtgatttctttaccagtaaaatgcttgcttacttagaaaatgaccgtaaaaaagatcagccattctttggatatttggcgttcaccgcgccacactggcctttgcaagctccagatcaatacttaaagaaatatgacggatattataaagaaggttatgaaaaagttcgtcaagcccgcttagagcgtatgatcaaattaggcattatgccaaagggaacaaaagttaataatccgctcatggatgtcttccctgcttgggataagttaaccgaggcgcagaaaaaagatcaaaccaaaaccatgcaaatctatgcagccatgattgacaacatggatcacaatatcggtcgtgtggttaactatttaaaacagactggtgaactagataatacgctaattttatttatgtctgacaatggtgcggagtctgctacaccagaatcattaggcacaactgaagataaaaatggtattcgtgaatgggtcgatgcgacatttgacaatagtcctcagaacatggggaaaaaagggtcatatgtgactttaggtccacaatgggcacaagttgcctctacgccattgccttatttcaaaagtattttgtcaaatggcggaattcacgtgcctgcaattattcgttatccaactcaaataaaggcaggtcaaattaattccgaaaccattcacgtcatcgactttgttcccactattttagaacttacaggtgctacacgaccagatacacgcaatggacaacctttattaaaaatggaaggacgttcttttcttcccctatttaaaggtaaagctttaccagaacgtactttaggttgggaatttaatacccgtcgcgccttatacaaaggtgattgggctgttcaatttcaagtccctccttatggtacaggagaatgggaactctacaatcgaaaattagatccgtcttatcgcattaatttagcatctaaaaatccaagtaagacccaagaacttgctcaagattgggctgagtatgctcaacgtgtaggggttgtggaggctccagttcgctacaaatacggtcaaatgaattgtttttatgatcaatgtattcagccagtttttttgaaaaatctaggcaagtaa

SEQ ID NO: 70337 - DNA, 984 bp, Acinetobacter baumannii
atgaagtttattcacgctactatcttattcggtttaatcggtttaagtgcatgtggtctcccctccacgccagaaattaagcagcaaaaaactgaactgaacttaggggataggaataaatgtaaacagtattcaggtttaccacaaaactggcaaaagaaacctgaagcgggcatggtcaaaattcagggtggaaccttcaatattgggaacaatcaaagctaccgagaagagaaagcactttacaaaagtgaaagaacagttacagatttttggatagatgcaactgaagtgactaatgctcaatttcaaagctttgttgatgccactgcctatgtaactgaagcagaaaaacagggagaagcagcagtatttactgaaccccaaaaaccagtcaaggagttagcttggtggtcattgatgaaaggagcgaattggaaacaaccttgggggccgaatagccatcgtaaaattgagcccaatcaacctgtacgaatgatcactttaaaagatgcaatggcatatgcagactggctagatcgagatcttgcgacagaagaacaatgggaatatgccgcaaaaggctttagccatgagcgagatgtaagcgcagatttaaaacatgtggatgccaatgtttggcaaggggaatttccttaccacaatgagaataaagatggttaccgagatgttgcacctgtgggatgttttgcagcaaacggctttggtctctacgatatgattggcaatgtctgggaatacaccaaaagtccatttactggaacgcatgatgatcacatgggaatgaatcaacttgagcatcatcaagataatcccgcttttaacttttataccatcaaaggtggctctttcctgtgcgcatcaaattactgtatgcgttaccgagccgctgctagacactcacaagaaatcgatttaggcattagccatgtcggttttaggacaattaaaaatattcaataa

SEQ ID NO: 70338 - DNA, 378 bp, Acinetobacter baumannii
atggctgtgccattgcttatagcaatggcagcagtggtgaactgcgcctatgcaaaagagatgagcattgatgtcacgttaaaaaacttatacgcagatcgggattttgatgacgctaccaaaccctcagtcgggagttggagtcaaggcattatcgcccgtgccaagggggagcatgaactaacacaagattttgctttaacgtttacaggttccgttcaatacgcgcaacgtttaagtgatgataagcatctcaatgatatgattttaccgtttgatcctgttacaaaggagcaggcttcaaattacaataaaattgcaggttcgattggagcgaagtataagcagcatcagttaagttgggggaacaatgggtag

SEQ ID NO: 70339 - DNA, 834 bp, Acinetobacter baumannii
ttgggggaacaatgggtagacacgcctctcgcaacaacagattacagtcgacaattgattacaatttatcaaggtttattatattcaggccagttgaatgagcaggtaaaactggatgtgggctatttagataaatactcgccacgaaatgaagaagagtttagaaaactttctgtcaataaaaaagaatctgatggcttaacttatattgatttaaagcataaagcttttgatcgtaaattacagactcaaatctttgtgagtgaattagaagatttatataatcaatattctatcggtctagactataaaaatagtattgaccaatttcggttgaatactaaatttaggtattattatacagaagaaacaggtgatgaactacttggttatattgataaccagtactttggcttgatgcaagaatttggttatgggccaaatactattggtttaggtctccaaaaaattcaagggaagagtaatttcccgatgttagatggtgctgttccagttttaagttatgtcaattggactcagggaacttttaataaagcaaatgaactttcctatcatttcacttttaatcatgatgccagttggttagttccaggtttaaacctattggcacgctatgttgatggacaaaactatgcaattaatggccaaaaaggatatgacgaaagtgagtttgattttattgcgaactatagaattactgagggtaaattaaaagggttaggttttcagtggctgaatttgaattataaaaatgatattcaaggtgattacacagagaatagattttttacgacatactcttttaaattttaa

SEQ ID NO: 70340 - DNA, 147 bp, Acinetobacter baumannii
atgggtttattgagttactcccccattaagttgaatgatttttttgtagatattgtttcagcattgcaaatgttaattcgccaaaatggcgttccaccaattgaggtggcgtcaattgaactcaaaacccaaaacattaattcttaa

SEQ ID NO: 70341 - DNA, 384 bp, Acinetobacter baumannii
gtgagtgagtttaaaacaaacgattacgtagttcttaccgataagggaactcaagactggttgtgtcaagttattgatcacaaattctctaaagacacctacagagtaaagattttggcaataggacaatgtggtccattgttcaaaaaagcaatgcggcatgcaactcctgaagaaatagcagcgggccaccgtattgactgcgaaaccttcaacatatcacgttttgatcgactggatgaattaagagttgcacttaaaaaccttgtccaaacatataaacacgatgctcatgatttaagccttataggtgatcaggataaggcgcgtgtatataacggcattgctaatcaattagatcatttattaaagggcggtgcttga

SEQ ID NO: 70342 - DNA, 222 bp, Acinetobacter baumannii
atgaaatttaaagcaaaagacaaagtagtttttgaagcagattacattcctaacaaccaagtgatgactattacgcgcggtacacatagatctcatgggatggatcaagtcagattgttattaaaaggtggtgaaggcttagcactgaataatgatttacgtcttgcaaccaaagaagaaatagaaactggttttcgtgcaaaaggagccagccgtgagtga

SEQ ID NO: 70343 - DNA, 654 bp, Acinetobacter baumannii
atgaaagaccgattttacttagcgtgctttcgcgacaacgtcggttcaaatgtaagttttcattgtatcgatggtaagggttactcaacaaatatagataaagctcatgtatacaccagagaagaagctcagaaggagtggaatactggtcgtacatatgatcgtccgatttcagcggaccatgtgaatgcaacagcagtttggaaagttgattgtcaatacattcctaatgcgacgatttgcaatgatttaaatgaaatttacattgcttatcaaacaaacaaatgggatggaaatgatgtctattggttgacgatgtattttcaatctttaacagattttgaacgcgcttacaaaatggattatgtagcagcaagagcattcttaaacagctcagattcaagtggttttattgttattccttttaggctggccgatgaagttaaacgccgtacgtttgattttaataaatataaccctcgcactatgacacaaggagcaggcttaaaaatgccagctcatcttaagaaagctaatcgtcgtgttgaaaatccaaagtctcgttttaactgcccaagttgcggaaagattgtatggcaatacaacccatatgaatttgatcactgtgatcattgcggccatatcggggattaa

SEQ ID NO: 70344 - DNA, 327 bp, Acinetobacter baumannii
atgtctaacttcaaaaaacaccctgacggctataagtctttcttaggtcttgaccgttcaacaagcctctactctgttcgtattggctggatcgtatacgcatcaaatgctaatggctcagttctttataaagttaaagacggagttaagacacctttagatgtggtcaagttccaatctgaatatccgaaagtttgggaaatactaactcaagagatcagctttcaacgcaaaaagaagctggctatcgatttgggtaactctcacatctcatctatagaccgcaaagcttataaaactaagcgcggcttcactggctcaagataa

SEQ ID NO: 70345 - DNA, 987 bp, Acinetobacter baumannii
atgacaaatttaattactgctcaagaagcatttgcagctcttcaaaaaggtaaaacagtactttgtcgtcctgctggtgacatgttggactttatagacttagatcaattccccgcttctgtatttggtaaaccgggttttgaattctgcattcaagctgaattgatggagttagcaggtattcaattcacaaaacccttagtgccacatgaagttgaggatgatcaagagatttttattgtcacaccaactcgagttttaagaactaaatttcatcctgaaaatagcgaaatctattatagcgttttgaatggttttgctcaggccaatgcagaaaatgcagtgcttcaactaaaagccttaggtgcaacatttggtcaagctatcgactttgttgaagttgaagatggttttaatgagaagcctaaaaaacagcgaggcaaaaaagagccacaagttaaaactgaacagacagtaatttcagaaaagacttctaaagttattgtcgaagcaaaacagccaacaattgttattacagaacaaactaatgtcactacttctgaggatgcactcgctccagtagctaatgaacctaaaacagatcctgaatatcaaaagacacttgatactcttctccagcgagtgcgtgagtccaaaacgcctgccgaagtaaatgccgtttatcgttacgcacgaacatggactgacgaacaaacaaagccccttctactcgctacacataaacggttagaagaattggaaaatataaagccaacagaaggtgaaccaccttcattaatggttcagatccagacggcaccagacctcactacgttggatgcactggaaatagatgtggctgcccgcgatccacaaattcaaccaagattgatggacttcattaaaaagcgccgctttgaattagaaaatccagcagtttctcaacaagaagctgaacctgattatttactggaggaaccattctaa

SEQ ID NO: 70346 - DNA, 423 bp, Acinetobacter baumannii
atggcttatacagcttcttgtctttgtaatggcattcaactccgtattaatgccgaattagaacccattatggtttgtcattgtaagcaatgccaaaaagctcaaggcgctgcttttgcggccatcactcaagtacaaaaaagtgacttaaatgtggtacagggtgaaaaccttttacaggcttattttgcatcgcataataaaaaaagagtattttgtaaaacttgtggctcacctgtctggagtgaacgtttagataaacccgaagtggtgcgtttaagaactgtctcttatacacatctgacgctgccgacgaagaggatagtggcttttgttgcttcaaaagtgaagtggtatcccatttgcgataatgcccgccaatacccaaatgcggtagaaaaccctttaaatatgaaggtttga

SEQ ID NO: 70347 - DNA, 606 bp, Acinetobacter baumannii
atgggtcatgttgattacgatagcacattgatcgtcggctcttttattgcggctggcgctatttgctatattgtgatttccatggagcaattaatatttaagcaagcctatcaaaagattgaaccgcttattttattatttaatggattattactcgctgcggctattagtattgtccatattgttggcatgcatgcttatcatttatttgaaactgccaacgctaatctttctttaattacgctttcttttggtattagtgctgtactttcttgtgtggcaatttggctcacttcccgttttacactaccattatttaggttggttttaagctcagtcattatgggcattggtatttcagcttcatattatgtaagtatgctgggctggaatattgatatttataagaaagattacacctcatttctcattttattttctgtcttaattgccatgagtggttcaggtctagctttcttgttggcctataaattaaaagagagcgagcgtaatcgagtaagtttaaaactcgcttttgcagtcatgatgactttaagcattatgggcatgcactatacggcactcattgcgcaatattaccgataa

SEQ ID NO: 70348 - DNA, 147 bp, Acinetobacter baumannii
gtgaaaaagataattttagcaacaatagtaggtgtttcgggtatgagtaactcttttgctgaatgtacctataactttgatgctagtgtacaagatttaaaaactttagaagcatcattgaattcacctacagggttgcaacgttaa

SEQ ID NO: 70349 - DNA, 321 bp, Acinetobacter baumannii
atggatttgttatttgaagatatgggcaaagctgatcaatttttagatatgggggcggatgctcaggttagttcttattcagacggcgcgtatgcagttgttcagttgggcgatacctcagaaagaaaattgatagagatctatggtttgcttttacatgaagcagttcatgtttggcagaaggtaaggaaactcatgggagaaaaagagcctagttcagaatttgaagcatattcaattcaagcgattgctcaagaccttttcgaaatgtacgaagaaagtgaggtaaagcatgggatggaagaggaaaaagccgactag

SEQ ID NO: 70350 - DNA, 510 bp, Acinetobacter baumannii
atgagattttatcatcaaacttctccagaaaatgctgtaaatgtgattagaaccaaaaattttattggtaacgccatgaaagatgatgatggtttgaatggctatgtacatgtaagtcagcttattaaaacaagattagaaggagtcggctctgaacttgttttacagtggttaggccctgttcatgtggttaatactgatgaattacctgtttataaaatgaagaaaaatgttctttattcgcaatacgaacaaactgaagagtatgagcaaccaagaagatggagagaattcataccctcaccaatgcatgaaaatttattaaaagtcgtaaatattaaattcttaaggggtaataaaattgatgatttaatcatttatccagattggtatcgatttataccttttaagaaaatcaaaacaaagtttgagcgcggatttaaattacgattcattaaagagttgagagatgaatatataaatcgtgaattatttttaaaaatcaattga

SEQ ID NO: 70351 - DNA, 309 bp, Acinetobacter baumannii
atgaaaaaactaaaatatcagtatcaacaatctgtaaaaaaaccacactctaatgggttttttctgaaccactttcctaatatgagaagtgtgtactataaaaaattcagtactaagcaagagaaaagcttttatttaatgcattttattgaatataaagattaccctcttaagcttcgtgtagcccgtggccctggtttagctgatgcatgggatgatcttccaacatatgtcaccaaagttgctaaaagttggaagcataattctaagagagcgcatcaatactacaaagaacatgagcaaaaataa

SEQ ID NO: 70352 - DNA, 816 bp, Acinetobacter baumannii
atggaattagaagaagttggtcactacgttaatttcatggctgatggtgccaattttgatccatgctctgaggaatcaccactagaacgtttgtatcaggctctacatgaggatgaagacatcgctaagaagtttgttagtatcacgaattcccatacagcatttattcaatccctagaagaaaatgaagattattggcagttttttgatgaaggctgcatgaaatggcaaagctgtatcacactaatggcatcgagtgaatattatcctgtaaggatcagagcagttgatgcaagtaaattgattgcacatcaacttaaacatgacagtaaccctaatgtccgagcagcctgtgtccgtcaatccactaaaattgctaatgaactcgtgcatgatgaacaccgttttgtccgtgcaatctgcgctttgcaaagcgaatctctgggcttgatgctaatgtatgatgctgatgatcttgtacgagaatactgtaccaagtgggaagcatgtgcaaaaaattatgtcgaagatacatgtgaggccgtcagatggcattctatctgtcgtcacccccatctcgcgaaatcctttattaatgatcgttcgcctgaaattagaaaattgtgctttcataaagacaagacgctggtagagcagctcaaagatgatgttgataatgaggtgcgaatgaagattttggtcgagtatcctgaaatggcacaatattatctgaatgatgagaacgaatgtatccgcaatctcgcggtagagaaattaaaagctcaggggatgactggttctacacttgcgcattaa

SEQ ID NO: 70353 - DNA, 264 bp, Acinetobacter baumannii
atggaattagaggctagaaaggctagtaattcctcaaatttattagtgttagatgatatatctgattcatttgactacaagaataaatttgcgattattgaatatatttctgatttaatagaattagacagttttagaattattatcctcacgcataattttgatttctatagaacagttgcctcaagattaaacttacatagatcagcaatttatatggcaaccaagaatgatcacaaagaaatttttttacaaaatggttaa

SEQ ID NO: 70354 - DNA, 582 bp, Acinetobacter baumannii
ttgattgaatacagcgaaatccagaatagtccagattttttgacattaactagttgtttgcacttaaaagatgatagtaacagcttaacctctagtgatattttcgaagttttctcaagaaaaatagcttttttgaatggtaaaaacatcacatttggcgatgaaaggatacttgatttaatttaccgtacagctagtaatatagctcaagatccaaacgttaatgaaatccttctccaaaataaaatttcattagcaattgctattagattaaaagcagaaaactacttaatttctaagttgccaaatctagacttacagaaaatcaaatcaaatcaaactagtggtttatgtagagaatatattaggctctatcctacatgtgagcatctaacattaattagtaagatcaatttaatgactccagagaatattcatatcaatgcttttatgtatgagcctctaatcgatatgtctttacaccacttaattaaattatatgaagaagtatgtcttttaaatcagcttaatccacttccattaggccaagctaatgcatctatagcggttcaaagtgaataa

SEQ ID NO: 70355 - DNA, 375 bp, Acinetobacter baumannii
atgtcagcatactttttaaaacaccaccaaagttttaacgacagctatggacatgccgaaggtgatcaggcactgagcctggtagcaggtctgtttcagcgcaacagcaggaactatgactttttcgcccgttatggtggtgaagagtttgtgctgatcttgccaggcacagacatcgtgtcggccaataaaacactggaaaaattaaggctggtagtggctaaccatgaatggccattacgacaattaacggtcagcatcggtttggccagcgctgatttatttaacgacaaaaagcagttgctcgaagccgccgatcagatgttatacaaagctaaagcccaaggccgcaatcaaaccagtgtgttctgttaa

SEQ ID NO: 70356 - DNA, 2550 bp, Acinetobacter baumannii
atgagagagagttatgatacgtatcatatttttagtcttatagggcagcacgctgaattagaacccattctaaatgcaatttctgggtggcttgaatcccatattccagatgccttagttacgatcatgctttattctgaacatgaccaaactttaaagcttatcagtggtaaacaacatttctcaaatcaatactgtaaagccgtcaataatttaaaaattggtcctcagcgcggtgcttgtggaacagctgcatttttacgtaagttggtcattagtcaggatctgatggaagatccgaattgggcagcttatcgtgcattagtaaaggcagagcagctttcaagttgctggtctatgcctattattaatgcaagaaatattttatatggaacttttgggacttattaccgaactcccaaaaaaccgacgaaacataatattcgtcttttagaacaggccgcctctttagttgcattagcgattgagcttgatgatgaacgccaacaaaaaatagccataaatgaaaaatatagttctttttacaattatcatccagatgtaattcttgaacttgatctgcaaggatacgttcttaataccaatattgcttgtcgtgaaattacgggtttttcacaagagcaaatacaggggaaacactattggacattaataccagatgaatatcatgaattagttgatgctgcatttaaatctgctctactggggaaatctcaacattatgaaattcccgtttacaatgtgatagagaaaattatatggcttgatattatcaatttaccaataattcaaaatcaaaaggttacaggtgtatttacgatagcacgtgacattagtgtaaatcggaaaaataaggagagcttacgtcttttaaagcgtggagttgatgcaagtccgagtgggatgtttatcacggatgcctctgaaaacatggtgatcagctttgttaatcctgcttttcttaaacaagttggttatacagaagaggaagtcataggtcgtaattataattttttacagggccgagatactaatctagagcagcttgctttgtttaagcaagcggtaaaggagcagaaagatgttcagataacgttaaaaaattattgtagggatgggagctggttctggaatagattaatgttggggccaattttggatcaagatggcaaatgtactcattttcttggaattcaggaagacattactcagcaacgtatccatgaagaatatattgaatatcaaaatactcacgatcaattaacaggcttactgaatcaaataaattttgaaaaagtcctagagcaaactttcgaaaaacaaaagcttctaactttactttatattgatcttgatgactttagttcgatgaatgatagtttaggttactacgttggtaataaagttattaaaaatatagcgagccgactaaaagattttttaaaacctgatgaggttttgagtaggtatgccgaagatgaatttgtattattgatcaaaggccaacatgatcataaaaaaataaccacaagagctgcaaacattcttgatttgatttcagagccgtttcaagtcgatgaccatacactccatctaagcgcaagtataggtatcgtcataaataacagttttatacaatgtgcttcagagcttttatatcggtctactttggctatgagagaagcaaagagacaaggccgtaatacttggcattgttatgaagaaagcaataaaatttcacccaatttagattatgctcatctgcgtttagaacttatggaagcagtaaaaaagaagcagtttacactattctatcaaccgttaatcaaaccattaacaggcgtggttcagggagtagaagcgctgattcgttggtatcatcccgaacggggttatatttttccagatttttttattcctttagctgaaagaacaggacaaattgtaaatattggacagtgggttttagaaacagcatgtttagatatcgctaaatggaataaggcgcatgatagtcagctcacagtttcagttaatatttctcctttgcagtttggacgtgctggatttcttgaggaactccaaaaagcgctaaaaataagtcaattaccagctgagctgcttaaaattgaaattaccgaaggcgttattattagtggtgcggacagggcaattgaaattctaaaatcaattcgtgctttaggagtgcatgtggtcattgatgacttcggcactggttattcgagccttagctatctacgactactaccgattactcaaatcaaactggatcgaagttttattgtgaatctgacaattagtgttcaagatgctgcaattgttcggtcgataatttttctagcccatcagctgaatttagaggtcgtagcggaaggtgttgaaacactagaacaagctagtctgctctatcaacaagattgtgatttatttcaaggctatttttatgcacggcctgccccaataagtgacttgaattcgaaatttttgccgttggaaagtttaagttaa

SEQ ID NO: 70357 - DNA, 207 bp, Acinetobacter baumannii
atggataatgtgatgattgagcgtttatggcgcagcgtgaagcatgaggaagtctatttgaaggcttacgatacggttaaacaagcgaaacaatcaattgctgaatatttggatttttataacatgatacatcctcattcaagtttgaataaggcaacaccgaatgaattttatgatcaacatttactaaaagtaatggcagcataa

SEQ ID NO: 70358 - DNA, 171 bp, Acinetobacter baumannii
gtgcatattctaaaagcggacatttttactttggagaaaccggacatttctattttggagttacattttttattgcgtataaccgccattatgttaaatagtgggatcattagtccgttattgggtttaaagctcgattcatttgtactatatcttgatgagttggattag

SEQ ID NO: 70359 - DNA, 615 bp, Acinetobacter baumannii
atgaaaaaattccttttaggagctgttgccgcatctgttttggccttttcaggcaatgctatggccaattttgtggcaggtcaggactatcaggtggttgcaaaaccagtcaaagtcgaaaaaccgggcagaattgaggtacgtgaattcttctggtacggctgtggtcactgtttcgcgcttgaaccacatatgcagggctggttgaaaaaattaccaaaagatgtacgttttgtacgtacgccggctgcaatgaatccactctgggagcaggcagcgcgtgcttattatgtgtctgaagcattgggtgtgcgtcaaaaagcacatttacaattattccatgatattcatgataagcagcgtccaattttagaacaggcgcaattggccaagttctatacccgctatggtattcctgaagcgaaatttaacagcacttataaatctttcccgatcacttcgaaaattgcccaagccaaaaatctggctgctcagtatcagttaagtggtgttccggcagtgaccgtgaatggtaaatatattgtgcagggtaatgatgccaaagtcattcaggtggtgaattacctgatcgagaaagagcgtaaagccaaataa

SEQ ID NO: 70360 - DNA, 675 bp, Acinetobacter baumannii
atgacttgggtaaacttgggtaatcctgttcctaaacagaaagttgataagtatattccttataagtgggatcttagtaataaatccatcaggttagatgagcctgagatttttacgccaattccatttacacaagttatgtttgaaaggaagtcacaaagatcttttaaactcgtttcaattgatcatttatcacatcttctatggcttactaatcgagttaaagattgtattgattcaactatgggctttcctataactttaaggccagttccttcggctggtgcaatacaccctattcatattcttataaactcaccatatactgatatttggtggagatatgaccctttttgtcatagcctttggcccattaataaggaaaataaatattttataaacgttagaagagactgtgaaaaaatattaaattgtaattcagccagtttaatactcttgattgcggaaccacaaaaaacttcatcaaaatataccgatggagccagtttagtttggcgtgatgctggagttctattaggaaatttagcattagtagctagttatttaaatatcaatttttgcccaattggagctctcttaccaacagaaattgatgaaaaaaaacaattagttactgtaggaatggcagtcttagatgcaattaaaattgactga

SEQ ID NO: 70361 - DNA, 237 bp, Acinetobacter baumannii
atgacaaagaaaattcatgacaaaactctttctcttcttaatggcagtgtaaggcatattagaactatgattgatcgggggagtgatagtaaatatattctagatgatttaagagagcttcaagtcaaagctgattttgctagagatttagcaataatttctgatgatgagcatcaagagtttaaagaacagtggtatcactaccgagaattgttggaaattattaatgagggttaa

SEQ ID NO: 70362 - DNA, 1275 bp, Acinetobacter baumannii
gtggcaatagatttgagcatagaaatcgcactgctgttagagcgctggcagggcattgtaaacatgatggctcaagtcgcggaagtgccttgcgtgctgattaatcgattagataaaaacgaaatttgtgttcaggcagttggcagtgtgtcgaaaccagctttttattgcgatgaacctattccattggcactaaacagttattgttcccaagtcattgccagtcaccagccattgctagttgaaaatgcaatcggtacccgatacgagaacaataacccgacatttgccgcaggctttagttattactacgggctgcctttgctttggcctagcggagaaactttcggtactttgtgtatgttggaccgggcaagcgcagaccgggcatcacaacactgttccttactcacactctttaagcaggctattgaatatgatttgcaattgctgcagcaacaacaagagcagctcaagcgtgagcaacaagcagacttaaaatttatccaacttttcaatgagatatccaataggataaaaccggtagcgactaataagttacttcaatccgagttatttgtactgttgactagccagtaccaatattggcatcaggagcttgagctacagcttaatcaaactgtcttagctcatgaaaactccattcatatcgcggcactggttcgaatttggtcaaatttgttggcaattgcccatgaaacagaatggttgagagctacagctgtcgctgaaccttatagctgtgaggctgaagcgtcactggttgatgcaatgccattattagaacaagcagtctataaaacagcgttgacgcttggtactgaactcgttttgaggagtcatttgcctaacccactgttactcagtgggagacctgagttatggtcgctgatagggctggctatcaccagctttttagtcattggcgccagcggcaccagtaaaacggtatttgtcagtagccgaataaaaggtaaacatagagttttggaatggtccctccatgtaaaaggccagacgatgccactgcattttacccgtgataatcaagcgctttatggttttgcttccgtatgtgccgagctcgctggtgctgtgttggaatctggtgagcagcaattaactgagagtattcatcaacagagtagttatctgaactcgaatcgtgatcacgtcgacgacattgaaagcaggaatgcttcaagaactcggtttatctgcttatggataccggtggtgggagacgatttataa

SEQ ID NO: 70363 - DNA, 315 bp, Acinetobacter baumannii
atgaccttatcaaatgaggggcgaccttctgttaaggtccctgttttatcaataattaatgtatcaatcttacgtaaattttctattgctgcagcatcacggaagagtacgccattggatgcaccacgacccgttgccaccatgattgacattggtgtggctaatcctaaagcacacggacaagcaataattaaaactgcgacagcattgattagtccgtatacccaactcggttctggtccaaatattccccacccaaaaaaggtaaggatagatataccgatcaccaccagtacaaaccagccagctacctga

SEQ ID NO: 70364 - DNA, 273 bp, Acinetobacter baumannii
gtgagtcatgaagaactactagagcaaattgaatcagcggctaactttgtgcgaggtatacagtttgatcaacgcttgctaaacgatgctcgagaagctttacgagaacgtgtgatggaactagatgattttgtggataattattccaatgaaaatgcatcaaaatggtgcataaaaaccagcaggcaggggggcggtcaaaagttcaaaaccttttgccctcggactcccccactgacgtataaaaaattttccatttcgcaaatatgttaa

SEQ ID NO: 70365 - DNA, 702 bp, Acinetobacter baumannii
atggatacagctgattttattgcatattcgatgagtgatctagaagatgctattgagaaacagattgtcacagagaaacaaattattagttatttcgttgagttctttaacagaaataaagaaattgatgccagcacaatatttaacgtagacaaattaagtcatgaacaacttaatttcttaaagtttaaaacgtgcattataaatactgccgcaaaagaagctgccacaaacttctgtgcaaatttaagcttattattagatgggacagataatatagagcttatagaagaaaatacagacatccataaaattctagatgaagtattcgattatgctaagaaaaatatctactgccatgagtcagctgaaaaaattgaactcgcagggcgaaatattatacaaggccttttaaatcactgcgaaattttgatgtgcttatctgaagataaattcaattgtttacttaaataccctgaaaaaagcatgctctcccctaaaaagttagggctcgactttgaattgcgtctattaagacgcttgccaaagaatcatattaagaaatatattctatcagtggaagcagacccatcaaatgaaatcatttatagagcacatttaatcgtcgattacatttcaggaatgaccgatgattttgccttagaaatgtatcagttattagaaggcattagaattcaatga

SEQ ID NO: 70366 - DNA, 624 bp, Acinetobacter baumannii
atgtctacgcgaaaaccccgtcaggcacgagccaaagtcactgtcgataccattattgaagcaggttttattgccgtagctttgcatggaccaagtggtaccaccacacgtcatattgcggaaattgcaggggtgagtgtggggtctctctatgagtattttaaaaataaagaagaaatttatgatgcgatgaatcactactttgtaagtgaaattctcgacatgattaaagagctaacccccacaattttagagttggagttagagcctgtcattgaaatgattttttatacgttcagtgatttattaaagaaaaataatgaccgttacttaactgttttacgctacgcaggtgagttgcaatacgacaaatatattccaaaaattgaacaggctttaatggaagtcatcatgaagtatatgatgcataatcctaaatatttaaaaattaataatttacctgtaattacttacatttgtattaatagcggtatttttaacgtagcaaggcatcttattttacctaacccatttattagttttgaagaaatggtgcaagggctaacaactatgatcatgagttatatcaacactgaaatggcacgctcggaagaccattcataa

SEQ ID NO: 70367 - DNA, 381 bp, Acinetobacter baumannii
atgaaaaaattaactttatttttagttttaatttgtactggtattgcagctcactccgaagttgattacaaattagctcaggatagttgtggcttgatggaaagtgtagcctttgctgctcaaacttatcgtcaaatggggtataagccttctgagaccctagataaattgatggaaacagcaaataagatagaagatactcaatacaaggatattgttagtcgtttagttttcgatgtagttgaaaatgcgtactctattcaactgtactcaaccaaggctttaaaagataaagctattactcaatttactgaaacaaactatttatcttgtataaatgtatttaagaaaagacttgaagaaaaagaaagcttagactag

SEQ ID NO: 70368 - DNA, 486 bp, Acinetobacter baumannii
atgactgagatggattatttcattaatacggatcctcttactggtttgatgaatcgtagagggatgcatttgtctatagatcagaaaatagctttgaaaatccccttttcaatattattaatagatatagatttcttcaagagagtaaatgatacatatggacatgctgaaggtgatttagtactgaaaaatattgcagaaatgatgcaaaagaactttcggaaagatgatgtttgttgtcgctatggtggtgaagaatttattgttattgtacctgatgttagccagcaagacgtttatgaaagtgctgaaagatttagaagagaagtggaagcgcaatcgatagaaaaggttggatcgattacagtctctataggtatcgcttcttggcctgaagcttctgaagatatttcagaagtatttattctggctgataagaatctttatgaggctaaaaacagtggacgaaactgtgtaagattataa

SEQ ID NO: 70369 - DNA, 207 bp, Acinetobacter baumannii
atgtcagcctatttgcaacagtgccttaatgatgcccctgcacttgcagaagcagatattggtttagcaataggtacaggtacagacgtagctattgaagctgctgatgtggttttgatgtctggcaacctgaaaggagtgcctggtatgagctatcagcaaatttggggtattaaggctgagatggttgggcactgttgcaaatag

SEQ ID NO: 70370 - DNA, 327 bp, Acinetobacter baumannii
atggataaaggtttttattttagatcaaaatttactaatcctgaagaagatttaaggctcgatttattatcttcaggtgagcaacaccaaatatcattattttatcaacttatatttttagctcaaaattctactttctttttaattgatgaacctgagatttctttacatgtcgattggcagagaggatttcttgaaggtcttcaaaaagtatcaaaaataagaaatcacagatttcttatagcaactcattctccacaaattattaatggtaatttggatttgtgtgaaccaatggatatcggtgaggataatgaggatgagtaa

SEQ ID NO: 70371 - DNA, 369 bp, Acinetobacter baumannii
ttggtcagtgcatcttctaccgttaccactggtggtgtgatgtccgctgcaacaatacctgtcgctggtaatgattcgttacccgctccgtctgttgcggtcgctgtaacttcatctccatcaaccaagttgcctgggtttggaacactccattcgcctgtcactggatcagcaatcgcttctgctgtcgtaccatccgggaaggttacagtcacagttgaacctggttctgctgtacctgtaattggatcattcgcattgattggatcaagtactggtgcattcggtgcaatcgtatcaaccgttaaggtacctgtcgctgttgagctgttacctgctgcatctgttgccgtcacagtaatggtgtaa

SEQ ID NO: 70372 - DNA, 612 bp, Acinetobacter baumannii; identical to SEQ ID NO: 62716

SEQ ID NO: 70373 - DNA, 960 bp, Acinetobacter baumannii; identical to SEQ ID NO: 62972

SEQ ID NO: 70374 - DNA, 666 bp, Acinetobacter baumannii; identical to SEQ ID NO: 61661

SEQ ID NO: 70375 - DNA, 867 bp, Acinetobacter baumannii; identical to SEQ ID NO: 62720

SEQ ID NO: 70376 - DNA, 936 bp, Acinetobacter baumannii; identical to SEQ ID NO: 62969

SEQ ID NO: 70377 - DNA, 639 bp, Acinetobacter baumannii; identical to SEQ ID NO: 62968

SEQ ID NO: 70378 - DNA, 1962 bp, Acinetobacter baumannii
atgactacccagttaactacaagtaatctgcaaggtagtccaacggggcctgaagtgactggtgttaacccaccagccaacttccctgatgagtccaccattgctcgacttgctaatgagtttttttcagcagtgccaagctcaagcagttcgacttcttcatcgggccttaacttggacttacctgtcggagcgccacctcacccaccgcaaccgggtgaaccattttctgcactcagtggtcgtgcgcccaatatcgcctttcagaaaagtctcaatccggaatatcctgagcatattccaaatttgccagactaccctgaacgccgaattgtagcgtctgcgcctgtagtgggtggagctaatttgccacgcccaccatttgaaccacacttaccacaagctgctcatagtgaacccaatgtgccacgcattgaacccagcttaccaacgggtgcaggtgaatcaccttattattttttaaatgatttttctgcccccaatgcaacagaaccatctgttaaaggtgttgaagataattattcggttgcacagtcatttcaattaccacatggtgaccagctcaagtcattactgacggaagatcgttttgcaacgaacacgcctacccaaagttcagcaagctctgcattttattttttagacttgcctcaaagtggacaaagttatagtcactatcaaccatcacaacctacttttgtggtaagcagtgcgcaaccactcgatgtgcatgccatccgtcgcgattttccaattttgcaagaacgcgtcaatggccgtccattagtctggtttgataacgccgcaactacacaaaaaccgcaacgtgtgattgatcggattgcttatttttatcagcatgaaaactcaaatattcaccgtgctgcacatgagttagcagctcgtgcaaccgatgcctatgaacatgcgcgaaatgtggttgctcgatttattggtgcaccctcttccaaagagattatctttgtacgaggcaccaccgaagggattaacctgattgcaaaaacatggggtgagcaaaatattggtgaaggcgatgaaatcatcgtttctcacttagaacaccatgccaatattgtgccttggtatcaactcactaaaaaaactggagcaaaattacgagtcattcctgttgatgacacgggccagattattttagaagagttaccgaaactgattaatgagcgcactaaactgctgtcgattactcaagtttcgaatgctttaggcacagtcacacctgttgctgaagtcattaaaattgcccatgccaaaggtgttcgtgttttagttgatggtgctcaatctgtttcgcacatccctactgatgtacaagctctcgatgcagacttttttgtgttttctggacataaagtgtttgggccaacaggtattggcgcggtctatgcaaaaccagagctgctagaaagcatgcctgtttgggaaggcggcggtaacatgattcaggatgtgaccttcgaacaagtagtttaccaacctgcaccaaacaagtttgaagctggaactggaaacattgccgatgctgttggtttaggcgctgcgcttgaatatgtcgaaagtctaggcattcataacattgctcgctatgaacatgatctactcgaatatggtcaaaatgcgctgagcagtgtgtcaggtttacgcttgatcggaaccgcacatcacaaagccagtgtaatgtcctttaccttacaaggctattcaaccgaacaagtcggtaaagctttaaatcaacatggtattgccgtacgttctggccatcactgtgctcagccgattttacgtcgctttggcgtcgaacagactgttcgtccatctttggctttttataatacgacagaagaaattgatttattggtgtcggtgttacatcaactgacgcgtaataggcgtaccagttaa

SEQ ID NO: 70379 - DNA, 933 bp, Acinetobacter baumannii
atggcgaaaaatacagacaaagcccaacttgcacttggggaccatgcggcccgtcaactggccaatgcaaccaagacagctccccagctttctacaattactccccgctggctgactcacttacttcaatggattcctgttgaagcaggtatttatcgcctaaaccgtgtcaataataccgatgatattcaagtagcttgcacacaacgtgatgaagcaactttacctcaaacttttgttgattatgacccagagccacgtgaatactttttaaatggtgtatctactgttttagatgtacatacacgcgttgccgacctttacagcagcccacatgaccaaattaaagaacagcttcgcttaaccattgaaaccattaaagaacgtcaagaaagtgagcttatcaataaccctgaatacggtttactagcaagtgtgacagatgaccaacgtatttcgactttaaatggcccacccactcctgatgatcttgatgatttgctacgtaaagtctggaaagaaccgggatttttcctagcacaccctgatgcgattgcagcatttggccgtgaatgtacacgccgtggtgtaccgcctccaacagttagtctgtttggttcgcagttcattacatggcgcggaattccacttattccatcaaataaaattcctgtagaagatggcaaaactaaaatcttgctgcttcgtgttggtgaaaagcgtcaagggattgttggtttgttccaaccgggtcttgcgggtgaacagtcaccggggctttcagtacgttttatgggaatcaaccgtaacgcgattgcgtcgtatctaatctcattatattgctcacttgcagtattaacagacgatgctttggcagtgttagatgatgtggaggtggacaaatatcatgactacccagttaactacaagtaa

SEQ ID NO: 70380 - DNA, 924 bp, Acinetobacter baumannii
gtgactcaatggaacattaatgcggttgtacaaggtttacaacaagcaaggcatgactggcgtcagcagcaacacaggaccaaagaatttgggggccgtgaacttccatctaaagaagctttaaaggccattttagatgacctgtgcgggattttatttccaatgcgtttaggccctgccgacttacgtcaggaaactgaagattcttatattgcctatactttaaatcgggtactaacagctttatatgctcaagtacaattggctttaaattatgaagcgaaacgacatttgagtcattcaagcccagtgcagcagccacaagaacttgctcaaactattgtgcaggattttgccaacactttgccctctatacggcgccttttagacggcgatgtgcgggcggcttatgaaggtgatccagcagcacatagtgtagatgaagtattactctgctatccgggcatatttgcgattatctatcaccgaattgcccatcagctctatgctcaagtgcctttattgtcacgcattatttcggagttggctcactctgcaacaggtattgatattcatccgggtgcgcaaatcggtaaaggatttttcattgatcatggtacgggtgtggtgattggtgagacttgcgtgattggagaacgcgttcgtatttatcaagcagtgactcttggagcgaaacgctttgaaaccaatgatgatggcgctttgaaaaaagactatacacgccatccaattgttgaagatgacgttgtgatctatgcaggtgcgactattttaggtcgtattaccattggccgaggatcaatcattgggggaaatgtctggctaacccatagtgttgctgcaggtagccagattttacagtcaccgaatgagtcttatcaaaaaaatcatattgccggttaa

SEQ ID NO: 70381 - DNA, 510 bp, Acinetobacter baumannii
atgaacgctaaattaaatactgaaactccgcaaagttttatctcaaatggttcaaatacgtccttttcagccgaagatatccttgctaaagcacagcaatatgcacaagaacacgaactaaattttagtggcagtttatcacctgttgacgcatggcaactcgtacaacaaggagaagctgttttagttgatgtgcgtaccaatgaagaacgcaaatttgtgggttatgtccctgaaagtatccatgtcgcttgggcaacaggcacgtcatttaatcgtaatccacgctttttaaaagaacttgaatcaaaagttggtaaagacaaaaccattcttttgttatgccgtagtggcaaccgttcagcacaagctgccgaagccgcatttaatgcaggttttgaacacatttataacgttcttgaaggctttgaaggtgatctaaatgaacagcaacagcgtaatcagaaaaatggctggcgcatccaccaacttccttggcaacaagactaa

SEQ ID NO: 70382 - DNA, 738 bp, Acinetobacter baumannii
atgaatatttcaataaaaacagctctggttactggcgcatcacgtggtattggccgtgctattgcagaacgcttagctcaagatgggttttatgtgattattaactatgttggcaataaagcgcatgcccaagccactgtagaacatattattgagcaaggtggtcaagcctcagctattcaagcggacgttgcaaatgaacatgaggtgagccgtttatttcaagaagctaaagcgattaacgggcaattagacgttgtggttcatagtgctggtattatgcctatggcaaaaattacacctgaaagcctgccagatttcgataaagtgattcataccaatttacgtggcgcgtttttaatattggcgcatgcggccgaaacagtgccagatggtggtcggattattgcgctttcaaccagtgtaattgccaaatcttttccggcatatggtccttatattgcttcaaaagcaggtgttgaaggtttggtacatgtgttagcaaatgagttacgtggacacaatatcactgtaaatgccgttgcgcccggcccgacaggcactgaccttttttacaatggaaaaactgaagagcaagtggcagctattgcaaaacttgctccattggaacgaatcgggacacctgacgaaattgctggcgtagttgccatgctggctggtccagatgggtgctgggtaaactctcaagtcatccgggtaaatggtggatttgcttaa

SEQ ID NO: 70383 - DNA, 921 bp, Acinetobacter baumannii
atggataaatttgataccttgcaactttttacccgcatcgtagagctgggtagttttagtcaggcagccgatcagctaaatatcccacgtgctactgcaagtaatgccattaaggagttagagagtaatttacagtgccgtttattagagcggacgactcgacatgtaagaccatcactagatggacaggcattttatgagcgttgtacacaaatattatcggaactcgatgatgccgaatcatctttacgcaatgtaattgctcagccccgtggtttattacgtgtcgatttatcaggcgcacatgcaactaaaattgttttacccaatatagatcaatttcacgagttataccccgacattgaactggtaatcagtacgggtgaccgcttagttgatctgattagggaagggatagactgtgtggtgagagcgggccgtttagatgattccactttaattgctagacatttggccgatatgccacaagtgatttgtgcaagtcctgactatttaaataaacatggaacgccacagcaaccagaagatttattatcacattattgtgtcaatttcttttcgacatcaggcggacggaattacccatttgaattgatggtgaatagcaaaaaacaagattattttttgaaaagttggatcgcggtaaatgatgctgaaaactatgtattatctgccttacaaggggctggcttaattcaagtaccgcgctaccatgtggcaaatgaattaaaaaatgggcgtctggttcaggttttatctgagtgggaaatcccgaagatgtcagtttctgcattatatccgcagcatcggcagctctcgccacgcgtacgagtttttgtcgcttggctgagtgagttatacacgggctattttgccaactttgaatacccgcaaaaatga

SEQ ID NO: 70384 - DNA, 861 bp, Acinetobacter baumannii
atgagtgattcaaactatattcctccacaagtttggcaatggactggagagaaaaccgatttaaaccaacctacctcaggtgctcgttacgaacatgcacttccagtagggaaacatccgctccagctctattctttagcaacgcctaatggtcaaaaagtcactattttattagaagagcttttagctctaggacaccaagatgctgaatatgatgcttggctgattaaaattggtgaaggacagcaatttggtagtggctttgtagaaattaatcccaactctaaaattccagcattggttgaccatagccaaaacccgccattaagagtatttgaatctggctcaattttgctttacttggctgaaaagtttaaagcattcattccgactgatattgctgcacgtactgaatgcctcaattggttattctggcaaatgggcagtgcaccttacttaggtggtggttttggacatttttatgcttatgcccctgttaaaattgaatatgcgattaaccgctttgcaatggaaacaaaacgcttacttgatgtattagatcagcatctggcaaaaaacgaatatttggctggttctgaatatagcatcgctgatattgcagcgttcccttggtatggcggtcttgttaaaaactgggtatataacggcgcggagtttttaggtgtcgatcaatataaaaatgttcaacgttgggcagatgcgattttagagcgccctgcggtacaacgtggccgtatggtcaatcgtacttttggtgatttagccacacagttgcatgaacgtcatgatgcgagcgattttgagaccaagactcaagataaattgcagaatcagtcttaa

SEQ ID NO: 70385 - DNA, 627 bp, Acinetobacter baumannii
atgaataacgagtattttaagctgtatacagattcacaatttctaagtccctatgcatttacagtttttgtaggactacatgaaaaacaaattccatttgaaatagcagccatcgacttaggtcagcaaggccagtttgaaacatctttcgtagaaaagtcattaacagctaaagtgcctgtacttgagcataacgattttgccttatcagaatcttctgccattttggaatatttagaagaactttatccagacacagctatttatccaaaagatattcaagctcgcgcaagagcaagacaaattcaagcatggctcagatcggacttagtggcactaagaactgagcgtccaaccgatgttatttttattcagcccaagtccactccactttcagaagaaggcaaaaaagcagccgagaaacttttctttgttgcagaaaaacttcttgcgtctgatgccgaatttctttttggttcatggagcattgtagatgctgaacttgccctgatgttgcaacgccttattcaaaatggtgatgctgtatcagagcgcctaaaaaattatgcattacagcaatggcaacgtccgtctgtacaaaaatggcttgccttgcgacataaataa

SEQ ID NO: 70386 - DNA, 906 bp, Acinetobacter baumannii
atgctttctctaaaatcattacagtgctttgttactctggttaaaactaaaagttttacccgtactgctgaagagttatatctgactcagcccaccattagtaaaatattacaacaactcgaagagcagcttcaggtacagcttttggttaaacccgatcatggacgaaaaagacaaattgaattaaccgaaattggagaacgtatctatcaacatgcggtcgagcttcttcaggcagagcaaaacatctttcttgaaatagaaaactatcaacaattaaaaacaggtactttaaaacttggcgttccacctttaggttcgcagctcctaacgactgccctatttgactttcatcgccaatggccagatattgaattagcttttatggaagtgggttcacgcggtattgaacaggctttactcaataatgagctagacgttggtgttttattgcaaccttttgatgaacaaacttttaatagcatcgagttatgtaactaccctttaatggtacttttacgtcgtgatgcaacttgggcaacccgcaaaaaaataaatctagaagagctacaacaccaatcatttttaatgtttcctgaaaatttctctttaaacagtattattctcgatgcttgtaagcagcatggtttttacccaaccattgcttgccgtaccagccaatggcatctcttggcagacatggtgttacaacgtatgggaattgcgcttcttcctcaatattatacagacatgcttgacccaactttatttgcagcagtgccactcgaaaaaccaaatattcagtggcacttagtgatggcttggaaaaagaatcttcctgtctcaccagcagtacaagcttggcttagcattgtccgtcaacattttcagcacattaaaccctaa

SEQ ID NO: 70387 - DNA, 432 bp, Acinetobacter baumannii
atgagtactgaatctgcttctggaacaccctcacaaccatcactgttcgtgttagttaaacaaattctcattttggctggattttggtggatcggatatctcttacaccaaaaactcggtgtgcctgtctcggcaggtattttaggtatgtttttattgcttttatgcctgttctttaaaattatcaaaatggatcaggtggcaatgggagcaactgtggttttaggtgagctattactgttttttgtgcctgtagtcgttgccgttgtccagtataaaaccctgtttatgaccgaaggatggcaaatcgtcttaagcattgcggttggaaccattttagtcatgttaagcacttcactgactattcattattacaatcgtttgaaggcttacttacaggctagaaaacgtcttcaacataagcatatctaa

SEQ ID NO: 70388 - DNA, 690 bp, Acinetobacter baumannii
atgaatatctggtcaattctttgtctcatctggactttggtcgcttatgttgtggcaaagcgaatctatcagaaacatccaaaactttggttatcacccgcaattagtgtgcctgtacttaccatcattttgatgacgatttttggaatttcatatcaaacttatgctgaagatacgcagtggattgttaatttattaggtcctgcaacggtagctttcgctataccgatttatcgttatcgggaaacgattcgtaaaaacctcggagttcttacgattgcgattattgtgggcatgagtgtaggcgtgatgactgcctataaaatggcgcagtggttccactttagccctgaagtcaccaacagtttgatggcacgttctatttcaacaccttttgccatgattttagctgaagatattcatggttcggcggcattggtttccctatttactgttattaccggtttggtcggtatgatttgtggcgatgcaattttggcaattactaaaatccgttctaatgtggcaaatggtgccgccttgggtaacgcagcgcatggttttggtacagttagagcacagcagcgcaatagtgaagaaggggtgattgccagtttaaccatggttattgctggtattttaatggtactcattggaccatttgcgattcatctatggttgctgttgtaa

SEQ ID NO: 70389 - DNA, 1491 bp, Acinetobacter baumannii
atggcaagaatggcaaaagttgtggaacttccgtctattgcaaagattgataaaagcaaaggaaagataagtgctcaactgactcaagctttacgtgaagctgtacaaagtggtgatttacaacccggcgatccattgccttcttctcgtgaactggctttaaccctaggtgtcgctcgcggaaccattattgaagcttatgatcagcttttagctgaaggtgtgtttgactctcaaccacgaactggcacttatgtgtctcatgctttggttaaaacacctgtaatacaacattcatcaaaagaaaataaacctaactcgatatctttgaccaaatcggcacgttcatatgccaaagtgcttgatgaatttaaaccacttccccatgttccttttgcggtatctgtccccgttggacgtactcaaccaagtgatatttggcgtaaatttggtaataaatttagatcacggggagcaggtgctccatcaggttatggcgaacctcaaggggtattatcactaagaattgctatagcagactatgtacgacggtcacgttctgtccactgtgaacctgaacaaattgtgattacacccggcattcaacaatcactttatatttgcagccaaattttatttgaggcgaaagatgaagtttgggttgaagatcctgcttatcgcggtacaacagccatttttgagcatactgtacaaaacattcgaatggtgcgtgttcctgttgatgaagaaggcattcaggttgaaaccggaattaaactttctaaacatgcgcgtgctgcttttgtaacaccctctcaccaatatccacttggcatgccgatgagtctagcaagacgtacagctttattagcttgggcaaaacaacaaaatgcatggatcattgaagatgattatgacagtgaacttcgttacaacggtcagcccttcccatctttgcaaggcatggcacctgaccaagtcatttatcttgggactttcagcaaagtcttatttccatcgcttaggcttggctatgcagtgttgcctaaagaactggtagctcctttttgtgggcttagagtcttaattgatagacacccgcctgctgccgaccagcacgttttggctgcttttattcaagagggttatttagagcggcatatacgacgtactcgaaatgtctatgcagaagttcgagaatacattattggcttgattgaaaaatacatacctcaagaactggcttggttacagccaggcgatcaaggcatgcatatggtgttatggcttgctcaacatattaatgatattgacgttgcaagctcggcagtcgatgcaggtattgccatcaaagcaatttcaccgacattttcaaaagagcggcgacgttcgggtttaattgtcggcttaggcgattttgaacccgaactaatgcaacaagctatcaaaaaattatcaaagattattcaacagcacgccaagtcaatgtag

SEQ ID NO: 70390 - DNA, 636 bp, Acinetobacter baumannii
atgtatatccctgatgattttgcagaaaaccgtttggatgtattgcattctcttattacagaacatccatttggggtgctttttacgcatggaagtaatggcttagatgcaaatcatcttccattcgagttgcaaacaaatgaagggaaatttggcatgctacatgcccatgtgtcacgaaataattctgtttggcaggatattaaaaatggagatgaggtattggtcgtttttcaagcaggcgatgcttatatttcaccaaactggtatccatctaaacatgaacagcgcagacaagtacccacatggaactatagggttgtgcatgcttatggcaaagtgacgattcgagatgatgagcgttatgttcgtggtgtggtggctcgcttaacccgcacccatgaagcttctcaacctgaaccatggaaaatgtcagatgcaccaaaagactatcttgaaccgatgttaaaagccattgtaggtattgagattgaaattaccaagctgcaaggaaaatcaaaacttgggcaaaacaaagaacgccgagacattttaggcgtggcagatggcctatcgaaatctggtcatcaaactatagcgaatgccatgtacagtgtggctgatttaaataaataa

SEQ ID NO: 70391 - DNA, 594 bp, Acinetobacter baumannii
atgtctttgactacacctgttgagttattgggtgaacacgttattttaaagccgctagatgtaactcaagctgaagtgctcaaagaggccgtttgtgatggggagctttacaatctttggtatacccgtgtgccaagacctgaacagatgactgctgaaattgaaagacgtcttgatttgcaaaaatccggctctatgttgcctttttatattgaagaccgaaaaacggggcgagcgctgggcatgacaactctcatgcatattgaagaagcacatcgccgtgtagaaattggttcgacgtggtatcgaaagtctgcacaacgtacgcctgtaaatactgaatgtaaaaagctattgttggctcatgcatttgagactttaaactgtattgcggttgagttacgcacatcttctttaaatgttcaaagtcaagccgcgattgtacgcttgggtgcaaagctagacggtgtgctaagaagccatcaaattgtgaaagatgatattttgcgggacactcatgtttacagtattttaaaacatgagtggcctgcggtccgtcaaaatctagaatggctattgagcaaaccgcgttaa

SEQ ID NO: 70392 - DNA, 1188 bp, Acinetobacter baumannii
atgcttcaaaacaccatgcaccgccaagtattaattttggcgagttcccaatcacttttccaaaccgtttctgtcatggtcatgaccatcggtggcttggctggggcaaatattgcaaataccccaacacttgcaacgctgcctatcgcctctatgtttttgggtacggctttaatgatgttccctgcatcaatgctcatggcacgtgtaggacgacgtaacggttttctatttggcgcttttttaggtgtgctcggtggcattattgcatcaatcggcattttttatagttcactcatgcttctggctttgggtacgctatgtgtcggggcctatcaatcctttgctcagttttaccgttttgctgccagtgaagtggcaaatgatgcgttccgctcacgcgctatttcttgggtaatggcaggtggaattgttgcagcactgattggcccaactttagcacgcttcggcggacctttattccagcatttagaatatatcggttcatttttaattattagtatcatctcacttgtggcaatgggcattttatctaacctacatattgccgatatagttgagcagaaatccaactttactgctggtcgtccgtggcaacagattgtctttcaacctacctatttagttgctttatttggcgcaataacaggttatggcatcatgattttaggtatgactgccacaccaattgctatgcgacattcacaccatgaacttgggtcaattacgacagtcattcagctacatgtgcttggtatgtttctgccttcattctttactggacatttaatcgctcgatttggtgtgcttaaaatcatgtttgcaggtcttttattatttgcctgctatatcggatttgctctctcaggtattcagttcacatcttttgctatttctttaattttattaggtgtgggatggaactttttatttattggcagtacttctttactcacaggaacttattctgtggctgaaaaagccaaagcccaagctattaacgatatgaccgtttttgttgtcagtttgatttgttcgtttagtgcaggtgctttactggatttatttggctggaaagcaatgaatatggctttaataccatggctggtgattgccgcagcttctctcttctggctaagccaaaaaagagaaaagcagtttgtttaa

SEQ ID NO: 70393 - DNA, 1680 bp, Acinetobacter baumannii
atggaaggatcagttcagaataaagaacggttatggacaaagcggcgtcatgccaaacaactaaaactagagatggcaaaccaatataccgatggtgtggtaatcccaactcaggacattattaaagttttagaaaccttaattacaccgggtgacaaagttgtactcgaagggaataaccaaaagcaggctgattttttatcgcgctctttggctcaaaccaatccggatattttgcatgatttgcatatgatcatgccaagcgtagggcgttcagaacatcttgatctgtttgaaaaaggcattgcgcgtaagctcgatttttcttttgctggcccacaaagtttgcgtattagtcagttaattgaagatggtttactagagattggtgcgattcatacctatatcgaactatattcgcgtttggtagtcgacctcattccaaatgtggtgctctcagcgggctttatggcagaccgtcaaggcaatatctatacaggcccaagtaccgaagattctccagcacttattgaacctgctgcttttagtgacggtatcgtgattgttcaggtcaatgaactggtcgatgacgtctcagagttaccccgtgtcgatattcctgcttcttgggttgattatgtggtggtggcggatcagccattttatatcgaaccgttatttactcgtgacccgaaacacattaagccagtgcatgtgcttatggccatgatggcaattcgcggaatttatgaaaagcataatgtgcaatcgttaaaccatggtattggttttaacactgcggcaattgaactgattttaccgacctatggtgagtctttaggtttaaaaggaaaaatctgccgaaactggacactaaatccgcatccaaccttaattccagcgattgaaacaggttgggttgaaagcgtgcattgttttggtaccgaactcggtatggaaaaatatgttgctgctcgtcccgatgttttctttacaggtcgtgatggcgctttacgttccaaccgcatgatgtgtcagctcgcaggtcagtacgccgttgatctatttattggtgcaactttgcaagttgatggcatggggcattcttcgaccgttaccaaagggcgtttagctggttttggtggagcgccaaacatgggacatgatccgcgtggacgtcgtcatgatacgccagcatggttagatatgcgtttgcaaggtgctaatgaaacagatacctatttggcacgtggtaaaaaactcgttgtacaaatggtggaaacctttcaagaggggggcaagccaacttttgtagatcgtctcgatgcgattgatgttgctaaaacggcaggtttgcctttagccccgatcatgatttatggcgatgatgtgactcatttactgaccgaagaaggcattgcttatctatataaagcaagcagccaagaagagcgccaagccatgattgctgcggtggcaggtgtgaccagtattggtttaactcaagacccaaaaacaacagcacgtttaagaagtgaaggtctggtggtattccctgaagatttaggtattcgccgtaccgatgccacacgtgaacttttagcagcgaaaaatattgccgacttggtgacatggtcagatggcttatatcaaccacctgcaaaattcaggagttggtaa

SEQ ID NO: 70394 - DNA, 885 bp, Acinetobacter baumannii
atgatggcacaagttcaatatcaaacgctcagcgatagtcagcttttggcagatatggcagtcgaagcgttaattgatgaagttaatctgacaccgaaaccagctttggtcgatcgccgtggcagtggtgcacacaatgacctgactttggagttaatggagcgctctgcgaaaagtttagggcctatgtttgatgcgatggcgcaagctgcaaagcatcatggaaaagtctgtttagctttgcgtgaagacattggagaaatcggtcgccaaggtgaaaagaccatgatgttggcgacaaatggtgtcaatacacatcgcggtgcaatttgggccttgggtttaatggttaccgcagcagcattagcgcgcagtaatcagcaatatttatcggctgttgagctatgccagttagcaggccagattgctcagcttgaagatcgctttattccaaagcaggctttgagtcatggtcagcaagtacaaaagaaattaggcatcttaggtgccaaagaacaggcacaacaaggctttccaactattgtgaattttgggttaaagcaactttatcaaagtcgtagtaaacccatgaaagaagagttcgcccgcttagatgccttacttgccatgatgacagatttgaccgatacctgtgtgctttatcgatctggaacatctggtttaaagcatatgcaacaaggtgctcagcaagtattggatttgggtggcagttcaagcttagaaggtcgacgtgctttgcatcttttagagattgatctgcttcggatgaaggcgtctgctggtggtgccgcagatttgttggcagcaaccttgtttatagatcgtgttgagcagtcatctgtgaaaaataaaaagggattttga

SEQ ID NO: 70395 - DNA, 300 bp, Acinetobacter baumannii
atggaaacacttcattttgaatttgtggccacagagccacctgtaaaaaaagcactggtaggatgtgtaggctctggcgatttagaaattttgatggaacccggtgaaaagggaaagacctctattcaggtagtgacttcggtagatggcagtgcagcacgttggcacaatctttttgaacggatttttactgctcaaataccgccagcggtcaatattgatattcatgactttggtgcaactcccggtgtcgttcgcttacgtctggaacaagcattggaggagattgctcatgactga

SEQ ID NO: 70396 - DNA, 852 bp, Acinetobacter baumannii
atgactgatattcaaagcttgttaaataaacaagattttattgagctgagtgcgagagagcgtgctaaagcattattagatgaagggacttttcgagagttattggacccgtttgcccgtgttatgtcgccttggttggttcagcaaaatattgtgccgcaagccgatgatggtgtagtgattgcaaagggaactattcaagaacagccagtagttttaatttctattgaaggcttatttcaaggtggaagtttaggtgaggtaggtggtgccaaaattgcaggagccttagaacttgcggttgaagacaatctgaaaggcattccaacagctgcaattttattgttggaaacgggtggcgttcgcttacaagaagcaaatctgggtttggctgcaattgctgaaattcaggctgcaattgtgaacttacggcagtatcaacccgtaattgctgtggtcgcaggcagtgtagggtgcttcggcggtatgtcaattgcagctggactatgtagctatattgtaatgacacaagaaggacgtttaggtttaaatggcccacaagtgatagaacaagaagctggtgtacaagaatataacgccaaagatcgtccatttatatggagtattacgggtggtaatcagcgcttcactagtggtttggtagatgcttatgtagacgatgatcgccagaaaattcgtcagcaagtcattgattatttaactcaaggtgtgcctcagcagcatcgtagttcaaattactcattctatttagaaaagctacaacaagttgatactgctgagcagattaccccagcacaagttcaagctttgtatcaaggagagcaaacatga

SEQ ID NO: 70397 - DNA, 828 bp, Acinetobacter baumannii
atgaatatcgccgttgatacattaaaagcatctactcgtggtgcacattggtttaaagcacttacgcagggttttaagacagttgaaggttttccagcttcgatttgggtggctgatggtcagattgatcagcaagtggtgcgcgtgattgccgttgttcaagacagcaataatctgttcccacgggcaaaacaaggagaagttggattattagaaggctggagtttggcaaaagtagtcgatgatgtgatccaagccgatgcacaggctgaaactaaacgcgctattttatgtctggttgatgtgccaagtcaggcctatgggcgtcgtgaagaattactgggcattcatcaagctttagcgggtgcagtagatagctatgctagagccagattggcaggtcatccaattgtgagtttattggttggtaagtcgatgtctggtgctttcttggcgcatggataccaagccaatcgtattattgccttaaaagattcaggtgttatggtgcatgcaatgggtaaggaatctgctgcacgcgttaccttacggtcggttgatgagttagagcaattggcctcaagcattccaccaatggcttatgacattgaaagttatgccacgcttggtttgttatctgaactgttatctgttgaaaaccctgaacaaccgacaaacgatgatcttttgttagcgaaacaggcaattgctcaagcgtttaaagaaattaatgctgagcaatcgagaggactggaacaaagactgcatggccaaaaccgtcaaatgtctaaaaaggtccgtgaattattgcgtgagcaatggttatga

SEQ ID NO: 70398 - DNA, 603 bp, Acinetobacter baumannii
atgaaacttaagctcgaagcccatgatttgttgtggggtatgacggtcgattgcttggctgatgatgctccgcattgggtgagagaggtattgcaacgtggtgatcctgttgtggttcgacgggcaattactcctgtagatcaggtggctgtgggtgtaagaggacaacttcgctatcaacgatatgcagctcaaatgccaagatctttaattagcagacagcttaagccagaagcgctgactcgcgtagatacgcaacagtttgagcacttggcagaacgtttacagagcatttccagcattatgaaaaacttttcagaatgttggggatatacaggaagtttcggctttgaactagcaacgggaattgaaacagtaaccgagcaaagtgacatagatttgttgattcgagctgaacagccttttgccaaaaagcaggcggttgagctactcgaaaattttcagcaagcagggctgaatgtggatatacagcttcaacttccacaaggcggtttggcattaaaagaatgggcaaggaatagcagaaaagttctattaaaacgtcctgatggtgctgttttattagaaaacccatggaattag

SEQ ID NO: 70399 - DNA, 939 bp, Acinetobacter baumannii
atggcttcaatttgggtatatccgggacaaggtgtgcaacgaagcaatatgctgcacgacttagctcaaacagctctagctaaagaataccttgagcgtgcatcggatgcactcaaagaagatgtcctgatgttagatagtccggctgcattgcaatcgacacgttcagtacagctttgcttactgatttcaggtgtggtgagttcagccttattaacagcggaaaacttaacaccagattatgtagcaggtttatcaattggtgcatggtcggctgcggttgtagcgggagttttagcctttgaggatgccgttcgtttggttgcctacagaggtgaactcatgcaaaacgcttaccccactggatatggcatgacagctctgattggtacagaccgtgcaactgttgaaacatgggtcaaacagatttatgaaataaagccagaggtgtttgtcgcaaatattaatgcacataaccagatcgttatttcaggaagttttgaagccatgaaccaagttgctgttttagcaaagcaacaaggcgtggtggcaaaaaaattagatgtatcggtgccatcgcactgtgaattattaagtcagcaagcaaagcaacttgcagcgtctatggagggaatgactttaaagcagcctaaaatacgttatttaagtggtacaacggctcgtacgcttagcaggccagaacagattggtgatgacttggcttttaatatgagtcgaactgtagattgggaaagtaccatccaagctgcatgggagcgaggtgtgaggttacagatcgaagctttgccgggaacggtgcttactacacttgcacgtcgaacatttaaagaaggaacagtattgtcatttcagggaacacgtttagacagcattcaattggcaatgcaaaaagaacaggcaaatagtttttctttttga

SEQ ID NO: 70400 - DNA, 420 bp, Acinetobacter baumannii
atgattatatatggagttggtttactcgcactttgcaccttggttggtgtaattgctggtgatctattaggcgttttattgggtgtaaagtccaatgttggtggcgtgggtatcgccatgattttactcatttgtatacggttatggatggaaaaacgtggaatgatgacagttgaaactgaaaaaggagtttcattctggggcaccatgtatatcccggttgttgttgctatggcagcccaacaaaatgtagtggcagcattatcgagtggccatatggcactctttgcggctgtagtctcagttgcagtttgtacgctcactattgctggtctaagtcgatataacaaagccagccctttacctaaagaagaagaggacacagccttaaaccgaatcggaggtaaagttcatggttga

SEQ ID NO: 70401 - DNA, 765 bp, Acinetobacter baumannii; identical to SEQ ID NO: 45689

SEQ ID NO: 70402 - DNA, 918 bp, Acinetobacter baumannii
atggaaatagatgaagaactgactcttaaaaaaatacagatttttttggcctttatgcgctgtggcaacttgtctaaaaccgcggcagaaatgcaactgagtaatgtcagtgttcataaagcactacactctttagaaagcgctttacgttgtcctctttttaaaaatgaaggccgtaacctcattcctttaaaaagtgcttatgtatttgaagaacgggcgcaaaaaatcgtacaagacatttttatcaccgtaaataaaaccagagaagccgctggctttgcagccaaggttttacatttagggtctctttattctttgacggtaaatacaattccaaatgtgattagcggtctcaaactcagacgtagtgagcttgatattcaactgttgctgagttcaaatcaggatttagtgaaaaagctcaaagcaactgagctggatgcaatcattgtagctttaaatgaaaccactcaagatgatgactttgaaattttgccgatgttttcagacgatatctttctggcagtcaataaagattcaaaatatgctgagtttaaagatattgatttaagccttttaaaagaagaaacttttttaactttaaccaagggttttgcaactcataacgacagcgacatcatttttaaaaaagccggtttttcacctaaagttgctttgcaggtcaatgatatttttaccttaattagtatggttagctcaggtgtaggtttcgcactattacctggccgtatttctgcggtttatgaaagttcggtaaaacttattcctctaaaacagcaataccacatgcaacaagaaattggtctggtctttttaaaaagtaaagaacgcgacccaaacttacttgctctgattgctgaatgtcgtatgtttgcatctaactttaaaagatag

SEQ ID NO: 70403 - DNA, 1419 bp, Acinetobacter baumannii
atgtataaatcagaacaactcgcccatagcattcgccaacttattgaaagcggcactctaaatgcacatgagaaattaccttcattaagagatcaggtccaacgttctggttttagtttaatgactgtgatgaatgcttatcaggagcttgaatcacaaggtctgatctattcaaaggaaaagtctggctattttgttgccgagcaaattgcactaaagccactggaacaatattcgatcgtttcacttaattctaaaattgaaattaattctttagtttttaaatatcttaaatcgattcaacatgagtctgttgtgccttttggttcagcttttcctgatagtcaacttttagctgcttccaaacttattcaaattatggggcaacttgcacggcaaaggcaaagctatgaccagacagcaagcctacctcccggtaatttagcgttaagaaaactaattgctcagcgctactgtatgcaaggcatacagaccgatccagatgacattgtcattacatctggaggattagatgcactcaatctttctttacaagcagtagccaaaccgggtgactatattctattgcaacaaaccgtgttttacggtgcttggcaggctgctgaacgtttagggcttaaggtcattaccattcccgaacatccacaacatggttttgacctagaggcttttgagcaggttattcatacatatccaattaaagtatgttggctcatgttaaatagccataatccgattgggtttacggtcagtgatgagattaaatataaaattgccaaactgcttcatgaacaccaaatttacttaattgaagatgatgtctatgaagagctttattatggcgggcaaaaaccactttcgatgaagtactttgaccaacaaaatctggtactgcactgctcttcattttctaaaactttaggggcaggttttcgggtaggttgggtctatgcgggtaaattttcggaccatatccaacacttgcagctcatgagtactatttcagtgaatgcactcatccaaaatgccttggttgagttcttgtctcatcatcattatgaaaagcatttgcgcacacttagactttcacttgaacgttataaaaagcagttttaccactatttgaagcaacatctgcccgcgatctgcgagatttattattacccaagcggttattttctatgggttaaattgcctcataaactcgatagcatgcaaatttatgaagaactcatccaacaagatattggtgttgcgccaagcccactctttagtgtcttacccgcacagcaacattatttaagaatcaattgttcttttgagtggaacgaaaaaattcaagctgctttagatcaagtcatcaaaactattcaacaaagggtcgaagcaagcctgtaa

SEQ ID NO: 70404 - DNA, 135 bp, Acinetobacter baumannii; identical to SEQ ID NO: 44793

SEQ ID NO: 70405 - DNA, 1005 bp, Acinetobacter baumannii
atgattgatctttctttaatatgggtcggtattatcggtttaggtgttttaatttacgtggtcatggatggctttgacttaggaatcgggattatgttcccattcattaagaatagccaagaacgtgacgtgatgatgaataccgtcgctcctgtctgggatggtaatgaaacctggatggtacttgggggtgctggtctgtatgcagccttcccgctggtctattcaacggttttatctgcgctctacttgcctattattttcatggtgattgccttgattttccgtggggttgcttttgaattccgttttaaagctcatcggaccaaacatctttgggacttagcttttatttggggttcggttttaacgagcttcctccaagggattattttaggggcctatattcaagggattaaaaccgaaaacggtatttttgccggtggtccttttgactggcttactgcattctccattttcacaggtattggtgtagttgccatgtatgccactttaggctgtggttggctcattttaaaaactgaaaaaggcttgcagcaacgtatgtatgagcttatgccaaagctgattatcgcactgctcattatctttggtgccgtcagcttatatacgccgttaacacaccccgaaattgcagatcgttggttctctttaccaaatctgttctattttagtccagtgcctattttggtcttattgtttgttggcctgattttatcggcatgtaaaaaacagcaagaccacaaaccatttatatataccttggcgttagtcttccttgcctttactggttttgtgattagtttgtggccaaatatcattccaccatcagttacgatttggcaagcggcagcgcctcattctagtcaaatgtttgctttagtgggtgcgcttattttgattccaatcattattacttacaccattgtgtcttactgggtattccgtgacaaagttcgtgtaggtgatgaaggttatcattaa

SEQ ID NO: 70406 - DNA, 1446 bp, Acinetobacter baumannii
atgagcctcggtctaaccgctttagaattagcacgaatacaatttgcttttacagtatccttccatattatttttccggccacttctattggacttgcctgttttttggcagttttggaatggaaatggttaagaacgcaaaaccctatctataaagatctatttaaatactggattaagatctttgccgttgcgtttggtatgggagttgtttccggtgtcgtgatgagttaccagtttggtaccaactggagtgagttttcacgagtagcaggaagcattactggtcctttacttacctatgaagtcttgagtgccttcttcttagaagcgggtttcttaggaatcatgctgtttggttggggccgtgttggtcctagagcccatttctttgcaacgcttatggttgccatcggaacatgtatttccatgttctggattctatcttccaatagctggatgcaaacgccgcaaggttttgccatcgaaaatggcattattgtgccaaaagactggctagctattgtcttcaacccgtccttcccttaccgctttgcacatatgggtgctgctgccttcttggtttcatctttattggtagtgggaacatctgcatggcacttggtaaagggccgtcgtgatgaattggtgaaaaaatcattctcgatgggtctttggatggtgcttgtgacttcttgtttacaagtggtgattggcgataaccacggtttaaatactcgtgagcatcaacctgccaaacttgctgctatggaaggccactgggaaaccaatcataacgagcctatgccactactgttatttgccattccggatatgaaagaagaacgaaatcactttgaagtgggcgttccatatttgggtagcttaattttgactcacagtttagatgggcaagtgactggcttaaaagaattcgcacctgaagaccgtccaaactcgaccattattttctggagtttccgtgtcatggtgggtcttggcgtccttatggtcaccttatcactcattgctctttggttacgtaaaagaggaaaactctatgaaacatcatggtttcataaatttgctgtagtgatggggcctgcaggttatgtggcaatgctggctgggtggattactaccgaagtaggccgtcaaccttgggtggtatatggcattatgcgaaccaaagatggtttatcgcatactgtttcggcagatcaggtgggtctaagtctctttatttttgtggtggtgtataccatcgtttttggtagtggaatttactacaccttaaaactcattaataaaggccctgtatttatcgacacgccaaatatggaagcaggcggcgtaggacactttaaaacaccgatgcgtccacttagtgcagttgatgaaaatattgacagcaaacaaaactctggggagaaccgtcatgattga

SEQ ID NO: 70407 - DNA, 819 bp, Acinetobacter baumannii; identical to SEQ ID NO: 63036

SEQ ID NO: 70408 - DNA, 1296 bp, Acinetobacter baumannii
atgacaaatttaaattttgagcatcatctcggttcattaactcacgctgcactgagtcaggtttcaatcatttcgcgggtatggggtgaaggaccttctgaacggtatgatgaattggcaagtaacttcagaccgacttttgcccgtattaaagaaggggctttaatccgtgagcagcagcatattttgccgtatgagcaacttcagtggctcaaagatattggttttacacggttacgacttcctaaagctcatggtggttttgatgcaactattcctgaactatttgcattgctcattgaacttgcagaggccgactcaaacttaccgcaagctttgcgtgtgcattttggttttactgaagatgtcttggtaagtaaagataaggcattccagcagcgttggattagccgaattgcaaatggcgaaacagtgggtagtgcatggtctgaaggcgggaaagagtcaattgatcaattcgaaacgcacttatatcgagatagtgacggaaaaattcgcgttaaaggcaaaaaatactacaccacagggagcctatatgcagactgggtggatgttggggtaacagatttaaaaggagagtctggctcagttgttgttcgccgtgaagatgaaggcgttgaaattgtcgatgactggaatggttttggtcagcagcttactgcaagtggtacggcatatttccacgatgtattggtcgatgaagctgaaattttacctgacgatgaccgttttaaatattcggcggcttactatcaactggtccaactggcaatcattacaggtctagggcgtgctgcaacctatgatgtttctcaagctgttgcgaaacgtacccgaaactacacgcatgcaaatgcccaatttgtaaaacaggatccgcaaattttacaagtagtaggacaaattcgtggcgcggcttatagtgcaggagcgattgttgaaaaagttgcacaaagcttacagcgtgcttacttggctgcatttcaaaataatgagcagcttgaagaagaacaaaatgcacttgccgagcttgaaagtgcgcagtctcaaacggtcattaccgatctaattttaaatgcttccacgattttatttgacgctttaggtgcttctgcaacagacaaagatttaggtctagatcgatattggcgtaatgtaagaactttatcttcacataacccaagagtatttaaaaatcgaattgtaggtgattttagtgtgaacggaacattaccaccttatcaatggcgaattggtgaagttgctaaacaataa

SEQ ID NO: 70409 - DNA, 1392 bp, Acinetobacter baumannii
atgactaagagaattagttttaacgcttttgaaatgaattgtatagcccatcaatctcctggattatggcgacatcctcaagaccgatctgttgaatataaagatttagaatattggacagatttagcgcaaattcttgagcgtggtttttttgacggtatttttattgcagatgtgcttggtatttatgacgtttatcatcaaagtgctgaacatgctttaacaggtgcagtacaagttccagtcaatgatccgctacagattgtgccagcgatggcagccgtcacaaagcacttgggttttggtgtcacgacttctatttcctttgaacatccttatccttttgctagacgtattagcacgctagaccatttaaccaaagggcgagttggttggaatatcgtgacgtcttatttggaaagcggttcgaaaaacttgggcctaaaaactcaggttaaccatgacaatcgttatgatattgctgatgaatacttagaagtcctttacaagctttgggaaggctcttgggaagaaggttcggtacttcgtgaccgtgaaagcggtatctttgctgaccataaaaaagtgcatccaattcagcatgaaggtaaatactttactgtaccgggcatccatatttgtgagccatcaccgcagcgaacaccagtactttaccaagcaggcgcatcttcacgcgggcagaagtttgccagtcaaaatgctgagtgtgtattcatcgcagcgccgtctaaaattgccactaaaaaagtggtacaaggcattcgccaaaaattggtccaagaaggccgcgacccgtactcagttaaaatttatgcacttttgtcgattgtcactgatgaaaccgatgcaaaagcacaggctaagtttaaagaatatcaaagctatggaagctatgatggcgctttaacattgctttctggctggtctggtgttgatttttcacaataccagccaacggacaaagttgaatatattcaaactaacgcgattcaatctttattagattcttatgtaaatgcggacccagaacgtgtttggaccattgaagaaattgcaaattggaatagtttaggtggtaatggacctgttcttgtaggttcggcagaaaccgtttcggatgctctacagcaatgggttgaagataccgatgtcgatggttttaacttagcctacattttggcgcatcaaacctttgccgatgtagttgagtttattgtgccagagttgcaaaaacgtggggtatatcaaacctcatatgcacaaggaacattaagagaaaaactatttggtgctgggccatatttgcctgaaaatcaccgaggtgcaaaatatcgtaatctaaaagagttaaaacttgctgaggcgagttaa

SEQ ID NO: 70410 - DNA, 1467 bp, Acinetobacter baumannii
gtgagcacacaagaactcgatcataaccaccgttatgaaattaaatctcccgatgatgtttcacaattaatttccaaatttgcagggaagggtaaatcgaataaagttatttggttggcactgattggagtatttattgatgcctatgatctaacaacgctctctttcggtattgagcaagtcatctcagagttttctttaagccctgtcatgactggtgtggtggcttcagcaattgtctgcggaaccattgtgggtaacctgattggtggttggctgacagataaaatcggccgttatcgggtcttcatggcggacatggtgctgtttgttattgctgcaattgtcgcgggctttgcaccaaatgtttgggttttgattttagcaagattcattatgggaattagtgttggtattgatttacccgttgcaatgtcatacttatctgagttttccaaatttaatggtagtagcaataaggcagcgcgtctagccgcatggtgcccaatgtggtatgccgcttcttcggtgtgttttggcctagttttggcgctttattttcttttaccaccagagcatagcaactggttatggcgagcatctttaattttcggagcagtgccagcgttactcattatttttattcgcggtaaatatttaactgagtcaccaatctggcttgcaaaccaaggcgatttaaaaggagccgctcaagttctacaagaatcctatgcaattcatgcagtcgctacagttgaaaaagtaaaaagaactgctgaaaagaaaaagcgcgagggttttgcagttttatttaataaaacctatttgccaagaacgattgtggcaattgtgattcacatttcggtggcatttcagtacacgaccattgctttctttttaccttctattttaacgcgtttctttcataccgatgtcttgacgaccattactaccacactcggactcaatttactgtttgcatttacgggcggcctgttaggcgtatttgttgctagcagatttaaatctcgtcatgtgttgcttacaggttttttacttcagtttattgccctgattgctttggcattcattggtgagccgggtaatagctttttactctataccgcaattggcatgctcgggctttggctttttgcggaaggctttgggcctggggcacaaatgatggtttatcctactatggcttatccagcttcgattcgtggcgttggagtcggctttaaccgtgcggtaacaggtgttgctcaagccattgctttgtttgttttaccgatctggatggcggggtataaaaccgatgtttacctgattatttctatctttgcctttattcctttaattgtgattggactactgattaagtttgagcctaccgcccaagatgtcgatgtggttgatgaagataaaacagaacttcctctcaataattcaccagtaatcgactag

SEQ ID NO: 70411 - DNA, 1185 bp, Acinetobacter baumannii; identical to SEQ ID NO: 50923

SEQ ID NO: 70412 - DNA, 1041 bp, Acinetobacter baumannii
ttgaaagatcatgaaattatgagcacgaagaccaaaccgttgatcatcacggcaattgtagtagtcgcaattgttgcatttatcgtatggcaaaataaaaaagacaataatacaagtgcttcagttcgtgacaataagcctgtcgtgattgcttatcaaactggggttgacccaagcaaagtggcgcaggccaatggagactatgaaaaacatagtcaacgtactattcaatggaaaaaatttgatgcgggttcagatgttgtcaatgctctggcttcaggtgatgtggtacttggtaatattggttcaagcccacttgctgccgcggcaagccgtaatttaccgattgaagtattcttaattacttcaaaacttggtgcatctgaagcactcgtggtgagtaataaatcaggcattaaaactcctcaagatttaattggcaaaaccattgctgtaccgtttgtttcgacaacccattacagccttttgtctgcacttaaacattggaacattccagaagacaaagtaaaaattattaacttgcgtccacctgaaatttcagctgcttgggaacgtggtgatattgatgctgcctatgtgtgggaacctgctttaagtaaagccaaagcatctggtacggttttaaccgactcaaaacaagtcggtgaatggggtgctccaacttatgacttatgggttgtacgtaaagactttgcagagaaaaatcctgactttttgaaagcttttgtccaaaccacacttgagcaactcgaaaaatataaccaagacccagccgcttacgttaaagatgctgataacgtgcaaaaaattgcgcagctcacaggttctgatgcaaaagatatcccgcttttattaagtggaaatatttaccttgaccacgctcagcaaaaacaaacattagatggtgaatttgcgcaaaatatttttgatacagcgaaattcttaaaaggtcagggcaaagtcgatcaacttaaagccgattataaaggcaatgtgaattcttcatttttgcagccttaa

SEQ ID NO: 70413 - DNA, 795 bp, Acinetobacter baumannii
atgagtgtactagaagccaaacatattcatctgacttttcctaaacagcaaaagccagttttacaagacattaacctaaccattgaagaaggttctttaaccgtgattttaggtgagtcgggttgtggcaaaacaactttgcttaatatcttggcagggtttcaaaagccgagttcaggtgatgtgcttgtaaatcatgaagtcgtaactggaccagatgtaactcgtgctgttgtatttcaagatcacgccttacttccttggttgaatgttgcagataatgttggcttcgctttgcagttaaaaggtttaaagcgcgcggatatcgaagcacaagtgaacgcaattttaaaaattgtgggtttaagtcacgttgaaaaagcgaatatctgggaactttccggtggtatgaaacaacgtgttggtattgccagagctttgatcagtcacgcgccgtttattttattagatgaaccttttgccgcattagatgcttttacgcgtgaaaacatgcagcagttagtgctcgatttatggattcaacaaaataaaagcttctttttgattactcatgacattgaagaagcattattgctcagcaatcagttagttctgatgacggcgcatccaggcaaaattgtagaaactctacacctcgattttgcccaacggtaccgtcagggtgagtctattcgctcaattaaatcggattctcaatttattcagctcagagaacagctatttgaaagtttaagggcacaaaaacaaagcggtaaggaggcgttacctacatga

SEQ ID NO: 70414 - DNA, 870 bp, Acinetobacter baumannii
atgaacactaaagataacgtctatgaatatgacaaagcagagcttaaacctgagttaaatgtgcaaacagaaaatgcttcatttctatcatcattttttgagaagcatcgtactttggtggtcagcataatcagtgtgggaagtgtagttgcactctggttcctcattactgctttgcatgttgtacctgaactgtttttaccgagtccacaggcagtctggcaaaaatttatatcggtcagccaagaaggctttatgaaagcaactttgtggcaacatttggcagccagcatttctcgtgtatttttagctttgattgctgccgtggtgattggtgttccgctgggtttgtggatggggctgaacaaatgggttcgtgctgttctagatcctttggttgaattattacgtccaattccaccgttagcttatttgccattacttgttatttggttcggtattggtgaaaccacaaaagtacttttgattttcttctcgattttggcgccagtcattattagtagtgcgcatggtgtgttaagccatcagcttaatcgtgaacgtgcggcattgtcattaggggcaagccagtcacaagtcttttggcatgtcattttaccaacggctttgcctcatattattaccggtattcgtattggtcttggggtgggctggtcaacattagttgcagctgagttggttgcagcggaccgtggtattggttttatggtgcaatcagcagcacagttcttaattaccgatacggtgattctgggcattattgtgattgcgattgtcgcagttagttttgagctgtttttacgttggttacaaaaacagttttctccttggtatggtcagcagttgtag

SEQ ID NO: 70415 - DNA, 882 bp, Acinetobacter baumannii
atgaatacagtagtagcaaacttaaatatagaagtgatcaagcctaccattggcgcaattattcacaatattgatttgaatgcgttaaatgaacagacaacgcaacaaatccagcaggctttgcttgatcatcaggtcattttttttcgaaagcaacaattagcaccacaagcacaagcagacttggcacgtagttttggtacattgcatgtgcacccgatttatccttcaattgaagatgtacctgaggtgatggtgctcgacagttggaaacaagatttgcgtgacaatgaactttggcacacagatgtgacttttagtaaaactccacctttaggttgtgtgttgcaagctattaaaattccacctgtaggtggtgacacgttgtggtcgagcaacacagcagcttttaaaggacttccgcttgagttacagcgaaaactacgtggcttaactgcaacccacgatattcgtaagtcttttccgcttgagcgttttgcccataacgaagaagaacgtgaaaagcttttgcaaacctttaagcgtaacccaccagtggttcatccagtggtgcgtactcatccggttacaggcgagcctttgttgtttgtaagtgagggctttaccactcgcattaatgagttacccgaacaagaaagtgagcaattacttaatttcttgtttgaacatgcgacccaagagcaatttcatttacgctggaaatggcaagacggtgacgtcgcgatttgggataaccgttgcacacaacataaagcattatttgattacggagatgctcatcgaattatgcaccgtgcaactattaacggtgatgtgccattttataaagaagaacaacagccagagttagcagaggcttaa

SEQ ID NO: 70416 - DNA, 735 bp, Acinetobacter baumannii
atgaaaattaaaattattaatcctaataccacccaaagcatgactgacaaaattgctgcatcagcaaagatagtcgcaaattctgatactcaaattattgctgtaagtcctcaaatgggccctgcaacaattgaaagttattatgatgaagccctaagtgccgtaggtgtgctagaggaaattcgccaaggtgaacttctagatgtagatgcttatgttattgcctgttttggtgatcctgcgctttatgccgcccgtgaaatcagttcggcacctgtgattgggattgccgaagcagctatgcgaactgcaagttatgtaagtactggttttagtgtagtcacgacattacaacgcacagtgaatatgagctggcatctggctcatcgctacggggctacgccattttgcaaaaatgttcgagcttgtgacattgcagttgaagagttggagcttcctgactcagatgcttatcgaaccatacgagatgagtgcaaaaaagccctagcggaagacaaaagcgatgcaattgttttgggctgtgcaggtatgagcgatttatgcataaagctacaaaacgagttgggcgtaattgtgatagacggcgttgcagcagcagttaaacaagctgaaatgttagttcagttaaatttaaaaaccagcaaagttggtgattgggcctcacctcctgtaaaaaattacacaggcatattgtcaggatttggaatgagctaa

SEQ ID NO: 70417 - DNA, 1470 bp, Acinetobacter baumannii
atgaataataccgaagcaataattaaatcttcttatgatgcaaaactgacaaatcaagacttagctcctttaaaaaagcaaacttggggcgcttataatatttttgccttctggatgtcggatgttcatagcgtcggcggttatgtcatggctggaagcctttttgcactcgggctcaatagctggcaggtacttctatctttactcatcggcattgcaattgttcagttttttacaaatctaattgccaagtctagccaacaaacaggcacgccctatcctgtgatttgccgcgcaaccttcggtgtgcttggtgcaaatattcctgccgttatccgtggtcttattgctgtcgcatggtatggcattcaaacctatttggcctcaagtgcattcttattggtcattttaaagttctttccagactggtcagcctatgctgatgtttcaacttacggctttcttgggctttcctatttaggatgggttggcttcatgctgctttggttactacaagcgattgttttttggtctggtatggacagcattcgtaagtttattgactgggcaggcccagctgtctatgttgtgatgtttgcgatggcagtatggctcatctggaaagctggctggcagaatattgatttaaatttaagtggggttcaatacgacggttttgcagttgtaccagtcatgattggtgctattgcgcttgttgtctcatatttttcagggccgatgctgaactttggtgacttctctcgttatggtaaaagctttaacgcgattaaaatggggaactttcttggcttaccaattaacttcttaggcttttctttacttactgtggtgtgtattgcggcaacgcttccagtatatggaaaacttattacagaccctgtcgagatggtcggtaaacttgataatacttttgtggtgattttaggtagtttgaccttaatgattgccactatcggaattaatattgttgctaactttgtttcacctgcatttgatttttccaacgtttcaccgagcaaaattagctggcgtatgggtggaatgattgcagcagtaggttcaattttcattaccccatggaatttgtttaataaccctcaagtgatccattacaccattgatattttaggtgcatttatcggtccactttttggtgtattgctcgccgatttttacctcgttaaaaaacaaaaaatcgtggtagatgatttatatactttagatactcaaggctcgtattggtacaaaaatggttataaccactctgccttttatgcgttaattccagcttcattaattcctattctctgcgtacttttaccacaactgtctgggctggctaatttcacatggtttattgggatgggattcggttttgtcatttaccgatttcttaaccaaccgcttgcccatgctaaatcggcaatgactaaggtaaaagtacaatga

SEQ ID NO: 70418 - DNA, 738 bp, Acinetobacter baumannii
atgtcatcgaatgcaccaaaaaaagccgtagaaatgagcaatgatgaaattgatgaccatatatataacgctattgtagatgctattttaaataggcaacttgcccctggcgcacgtttagttgaagcacctttatgtgaagcatttggtgtaacgcgaggagtgttaagacgtgttttcgtcaaacttgcacatgataaggttattgaaattcagcccaatcgtggggcactcatcgcaaaacatagcacaaatgaaacaaaagaagtctttgaagcacgcagcatgctggaaatcgccactgtaaaaaaactagcacaaaaatctcatcgcctagatttgagtgagcttcgaagcttagtagatcaagagtctcatgagcgtttagctggaaattgggcagagtggattaagctatcaggtcaatttcatttaaagctgattgaagctaatcaaaattcgatcatgaccagttatttgcagacgcttattgcaaggacttcattattaattggcttatatgaaattccaaaacataataattgttcggcagatgaacaccgtgcgattttagatgccattgaacaaggtgatgaaaaacgagctactcaattgatggaagaacatttagaacactacgcaaccacatttattgaagaaaacagtacagtatctgcagagcaaaatttattaaatttatttaaaaataagaaaattgaaacacctcaaactaattaa

SEQ ID NO: 70419 - DNA, 891 bp, Acinetobacter baumannii; identical to SEQ ID NO: 51327

SEQ ID NO: 70420 - DNA, 687 bp, Acinetobacter baumannii
gtgaataaatcacttttagaacaactatcaccaaccaattgtcaggttatttttattgatcaccagccgcaaatggcttttggggtacagtcaatagatcgccaagtattaaagaataatactgtagggttagcaaaagcagctaaaacattcaatattcctgtcacgattacgacagttgaaactgaaagcttctctggtcatacctacccagaacttttagatgtatttccagatgctcctttactagaacgtacttcaatgaattcatgggatgatcaaaaagtacgtgattcgcttgcaagaaataatcgtaaaaaagtgattgtttcaggtttgtggactgaagtgtgcaataacacctttgcttttggcgccatgcttgaaggcgattatgagatttatatggtcgcagatgcttcaggcggtacatcgaaagaagcacatgactacgccatgcaacgcatgattcaggcaggtgttgttccggtaacttggcaacaagtattactcgaatggcagcgtgactgggcacaccgtgatacatacgatgcagttatggcgattgtacgtgagcattctggtgcttacggtatgggtgtggactatgcctatacgatggtacataaggcgcctgagcgtacaacatcaaaacatgaagtacttgcaccaattcctgcaaaataa

SEQ ID NO: 70421 - DNA, 1875 bp, Acinetobacter baumannii
atgaccgacataaacctcatacttaaaaacggtaaaatcacaacactagatcctcagaaccccgaagtacaagcaatagcgattgcagatggtaaagtcgtccgcacgggtacaactgatgaggttatgaaactcgcaactccaacaagtaaagttgtagacttaaatggtcgacgcgttataccgggtctaaatgacagtcatctgcatattattcgtggtggtctaaattacaatatggaactgcgctgggaaggtgtgccatccgttgccgatgcgttacgcttactcaaagagcaagcagataatacgctagctccacaatgggttcgtgtagtaggcggttggactgaattccagtttgctgaaaagcgtttaccgactttagaagaaattaataaagctgcaccagatactcctgtattcgttttacatttatacgccagtgccatgttgaaccgagctgcccttgatgtattaggttttaataaagacacgccagacccgccaggtggcaagattgtacgaaatgaaaaaggtgagccaacaggactgttgctcgcaacgccatcggctatgattttatattcgactttaggtaaagcgccgaaattgccagttgaagatcaagtcaattcaactcgtcatttcatgcgtgaattgaaccgattaggtattacttcagcaattgatgcaggtggtggcggtcaaaactatcctgaagattatgatgtgattaagcaattgcacgatcaaaatcaaatgacggttcgaattgcttataacctatttgctcagaaggcaggccaagagcttgatgattatcgccgctggaccgaaatgacatttccgggcgatggtgatgagctatttagaatgaatggagcaggcgagaacctgacttggtcagcgggggactttgaagacttctatgagccacgtcccgatttaccagaaaaaatggaaggtgaactcgaagccatcgtagagcacttggctgaaaagaaatggccattccgtattcatgcaacctatgatgaaagtattagtcggttactcaatgtatttgagcgcgtcaattcaaaacagccatttgcgacacgatttattattgaccatgccgaaactgtatctgagcgtaatatcgaacgtattggtgcgttgggtggtggtatcgcgattcagcatcgtatggcatatcaaggtgagattttcgtaaaacgctatggtgccgaagctgctcaagcaacgccaccagtcaagaaaatgttagaactcggtgtacctgtgggtgcgggaacggatgcgactcgtgttgcatcttataacccttgggtgtgtttgtattggctgactacaggtaaaacagttggtggtttaccgctgtatgatgaaaaaaatttattagatcgtcaaacggccctcaaactctggactaaaggttcggcttggttctcaggtgaaaaagatgtcaaaggttcactcacagcaggggaacttgctgatctggtggtattgtctgatgactacttcaaagttgaagcagaagatatccagtggattgagtctgtactcactgttttaggtggaaaagtggtgtacgcaggggcagagtttaagcaagacgatccgccgttaccgccagcatctccaacatggtcgccagtaaaacgcttcggtggtcagtggcgcttatctgaaaaccgtaatgcaccatcgaatcaatcattacagtcacaaagtgcattgtgtgcatgtgctagtagctgtggaatgcatggacacagccacgcttggatgcttgatgttcctgtaaatgataaggacaaaaaatctttctggggcgcacttgggtgctcgtgttttgcattttaa

SEQ ID NO: 70422 - DNA, 162 bp, Acinetobacter baumannii
atgaaaatgtacttgttatctttggctgtagggttgcttgttggtgtcttatattatgttttaaatgttaagtcaccagctccacctcttgttgcattagtcggtttattaggcatggtaataggagagcaactgcttccttttatcaaatcctatttttaa

SEQ ID NO: 70423 - DNA, 429 bp, Acinetobacter baumannii
atgactgagctagtgaagatttaccataaccctgcttgcgggacctcgcgcaatacattggcgcttattcgtcatgcaggaattgaacctatcgttattgaatatttgcaaacaccgccaagtaaagatgaattgattcaactcattaaggattcgaacctaagtgtacgtgaagcaattcgtaaaaatgttgatccctataaagatttagagatagaacaagaccattggaccgatgaacagttaattgattttatggtgcaatatccaattttaattaatcgcccatttgtagttacacaaaaaggtactcgactttgccgcccttctgagattgtactggacattttagattcacaaaacttaggctattttgcaaaagaagatggtgaaatcattattgatgagcaaggccgtcgtataaagtaa

SEQ ID NO: 70424 - DNA, 630 bp, Acinetobacter baumannii
atgaaggatcttattattataggtgctggtgggcacgggaaagaaacagcttggttggctaaacgttgcggtagatcaataagaggttttttagataatactccagagaaacaaggaagttatatctcagatattcctgttttagggacattagatcaatgcacccaatttgaggattgtgaatttatagttgcaattggttctccgcgagcaagaaagaaaattgttgaaagtttttttcataaaacaaatcttccttttgctacgctaatcgatcctaccgcaattgttggagaaaatattcgcatccaagaaggagtaatgatttgcgctggaagtattttaactattgatatccaaattgggaatcactgtattataaatacaaatgtggttttgtctcatggagtaacaataggagattacgttacagtagcacctaatgcttcaatatctggtgacgtacacttagagtccttagttgagattggagctaatgcttcagtcaaagaaaagactttaattcagagtggggctatgattggtatgggctctgttgtgactaaaaatgttttagcaaaccaagttttagttggaaaccctgctaaatttttaaaatctctatattaa

SEQ ID NO: 70425 - DNA, 768 bp, Acinetobacter baumannii; identical to SEQ ID NO: 65892

SEQ ID NO: 70426 - DNA, 324 bp, Acinetobacter baumannii
atggacagtaaatggattgaagcgcaacgacgtgaaatggaaaagctaatttcaccagaatcaattaagacgagtgatttagctcctcaaaattattttcaagaaatggtcaaagaggctaatgaacaagaattaagaaaacttgagaggctgggccgaaccaaaaaacgttctttagtggatttgagaggagccatcgaaaaactagctcataagtataaacaggatgcccatgcttcaagcctttttggtgatcaggataaagcgcgagtttataacggcattgccaatcaattagaccttttgctgaaaggtggtgcttga

SEQ ID NO: 70427 - DNA, 915 bp, Acinetobacter baumannii
atgaatgagttggctcttttcgcaggcgctggtggcggagtactcgcatcttatctcttgggatggcaaacagtgtgcgcagttgaacgtgatgcctacgcagcacaagttctggcgcaacgacagaatgatggaattctcgaagctttcccaatttggtctgacattacatcttttgacggaaaaccatggaaaggagttgttgacgttatatctggcggctttccgtgccaagacatctcatccgcaggaaaaggggcaggtatcgaaggcgaacgttccgggctttggtcagaaatggcacgaattatcggtgaagtacgacctagttacgtgttcgtggaaaactcaccaatgcttgtttccagaggacttacaagagtcatcagtgaccttacccaaatggggtatgacgcgcaatgggcacgtttttcagcatctaactttggagcgccccatatccgtgaccgaatctggattgttgcctacgcccaaggcctcggatgcgaagagaatggattgtccatcagagcgcaacaggaaaagcccgtgtctggaatcaacagtgaagatgtggccaaccccaaaagcatccgattggaacaagcgtggaaatgtaagtcctcatccgagaaatggtttaccgggtgcggtcatgaactttccgacaccaactgcgagcgatgcaaacaagtggagcaacgagtctttagccgaacgcaaagcaaaagggcgtcagatccgtctcaatacagcagtttcaccagagggtggcagtggtgggcgactgaacccgaattgggtcgagtggctgatggggtggccaatcgggtggaccgacttaaaaccattggaaacggacaagtttcaatcgtggctagaagcgcatttgagtatttaggtggagagctatga

SEQ ID NO: 70428 - DNA, 714 bp, Acinetobacter baumannii
ttgaaactgtatcgagcatttcatgagataaatcgtaagcaaaaaccagatctgcatggcgagcaacgttataagctacatgaccaccaccgcaattgcggtggtggtcatgtagcttataacgttgctcgccatgcagatctggtttttgcttacgatttatctcatgaaatgctcgatacagtttcaaaagctgccaatgctcgaaaaataaaaaatatttttgtacagcaaggtattgctgaagatatgccttttactgatgaacagtttgatgtaattattagtcgatattctgcccatcattggcagcatgtaccaacagcaatgaaagaaataaatcgtgtattaaagccaaatggcactgttatttttgttgatattattagctcaagtttccctattttagatacatttttacagactatagaagtgattcgagaccctagtcatgtaagaaattacagtattaaagactgggttcactttattgaagatgctgggtttgaattaacaactttagagaaacaaaccctcaaactagattttgatagttgggtacagcgcatgaagacacctgaagatcaaataaaaacgcttaagtatctccaagaaaatgcagcagatgttgttaaaaagtattttaatattcaaaaagacggaagttttgaaagtaaggtcggatactttgtatttaaaaaactatccttctaa

SEQ ID NO: 70429 - DNA, 465 bp, Acinetobacter baumannii
atgccttttactgatgaacagtttgatgtaattattagtcgatattctgcccatcattggcagcatgtaccaacagcaatgaaagaaataaatcgtgtattaaagccaaatggcactgttatttttgttgatattattagctcaagtttccctattttagatacatttttacagactatagaagtgattcgagaccctagtcatgtaagaaattacagtattaaagactgggttcactttattgaagatgctgggtttgaattaacaactttagagaaacaaaccctcaaactagattttgatagttgggtacagcgcatgaagacacctgaagatcaaataaaaacgcttaagtatctccaagaaaatgcagcagatgttgttaaaaagtattttaatattcaaaaagacggaagttttgaaagtaaggtcggatactttgtatttaaaaaactatccttctaa

SEQ ID NO: 70430 - DNA, 1086 bp, Acinetobacter baumannii; identical to SEQ ID NO: 61568

SEQ ID NO: 70431 - DNA, 1188 bp, Acinetobacter baumannii; identical to SEQ ID NO: 50936

SEQ ID NO: 70432 - DNA, 441 bp, Acinetobacter baumannii
atgaaatttgatgctttaaaatcgttggttgaaagtacagactgggtaaatgttccaggggaagctgagtatattgcagcagatgatatttcattaagatttaaatattctcaatggattgatgtcgatcctaaattaatgcaagagaatatgaagactgtgttaaatcaactaaaagataagtgcaatgtgcattcaataaatgcaaataaagtaattttcgaatatgagagtagacaagtttattcactctatttatttaatttcatttgtactgaacgagatgaagcaaatactccagtaaatgttctatttgcaaagtcagacttattacgcccagaagaacctgttacagatcctttttatttgagtttaattaaatatcttaataatgcgcatgaattagattatctcaaatatgcaactggtcaaatattttaa

SEQ ID NO: 70433 - DNA, 285 bp, Acinetobacter baumannii
atggtggttgagcatgcccatggcctccgtcagcgccgagggcccaatgccaaaagctctctccacaaggcgcacctcgcccctgatgccgggctgcaggcaccaggggcgagcctgtcctttgcgcagggctcgcatgacttcgaatcccttgatcgtggcataggccgtggggatcgatttgaaaccgcgcaccggcttgatcagtatcttgagctttccgtgatcggcctcgatcacgttattgagggctctgttgcaaagattggcggcagtcagaggtag

SEQ ID NO: 70434 - DNA, 822 bp, Acinetobacter baumannii; identical to SEQ ID NO: 59049

SEQ ID NO: 70435 - DNA, 342 bp, Acinetobacter baumannii
atgacgcttaaagatcacattaaacaacttgtcggcgaagaagaatttaataacgtcctatcggaggtaaaagaaaacatttcggtagaaacaaagaactttagaaacactaagtacatttcaaatggctgcttgattatcgggttcctttgtttgtttttcccgccattttggataggggtagcaatttttcttgtcattggcatggctacacatatgataaaagccggtgttcaaaagaaattggatatattcaacgaggtgtggtttttcttgacggaagagcttgagaattccgaggaaaatattgatcgctacaaatgtttgattgatcaattgtaa

SEQ ID NO: 70436 - DNA, 195 bp, Acinetobacter baumannii; identical to SEQ ID NO: 45594

SEQ ID NO: 70437 - DNA, 1122 bp, Acinetobacter baumannii; identical to SEQ ID NO: 50761

SEQ ID NO: 70438 - DNA, 204 bp, Acinetobacter baumannii
atgaaaaagtttttaggcaattctatcttcaaagcagttggttggacctatgatgcagatcctaccattcttgagaaaaaacaagttattatcggttttgaacatacttctaaccttgatgcgatcgtttcaaatattagatttaaaaattcatacactaataaaaaaagaacttttcaaaggtccaatgaagcctattcttga

SEQ ID NO: 70439 - DNA, 144 bp, Acinetobacter baumannii
atgaataaacatttattagcaaaaatcactcttttaggtgctgcacaactatttacgtttcatacggcatttgcagatatacctctgacacctgctcagttcgcaaaagcgaaaacagaaaattttgttatgggggccagataa

SEQ ID NO: 70440 - DNA, 699 bp, Acinetobacter baumannii
  misc_feature (629)..(638): n is a, c, g, or t
atgaattttttgaatttgcaggtcacacaggcagagctcctatccggccttatttccgtttcccaaacagttgcacagattgtgctcgtcatgaccgtggcgtggctcgtgtccgcagtgctttcgcgggccatcacacgcatcagcaaaagaacccgcacttccaagagatctgcagatgaggtcaaacgcattgaaacatcttttcgtctgatccgtttcgtcagtcggctggtcgtgtgggccttggccgtgaccatttccctctcaatccttggcatttctgtggcaccgatcctgacgactgcgggggtaagcggcatcgcagtggggtttgctgcgcagagcctgataaaagactatttttcgggtttggtcttgttgctggaagggcaactccgcatcggggatatcgtggatattggcggtgtggcaggccaagtcgaagagatgacgttgcgctatgtgcgcctgcgtcaactcaatggtgacgtggtctatgtgcccaacggagccatcaccaatctgacaaataagacaacggactattcgatggccgtaatcgatgtcggtgtcgcctatcgcgaaaaccttcaggaggcattgaacgttatggagagtgtcgcccnnnnnnnnnncaacctggtcaacgagaatattagccgagccagaggtctttggggtcgaaacgttgggtga

SEQ ID NO: 70441 - DNA, 681 bp, Acinetobacter baumannii
gtgctaaaatgttgttgcaaaacaaacagttgcacatcaaacaggtcttctcatgagctaccatatcacaacgcagagtgtggttttccaagacttgtttcccaagccgactggaaggctttcctgtggcgcggcatcgttgccgtcattcttgccgccctggcatggctgatgcccgctgaagcggtcctaacactgaccattgtgtttggtgcctactcctttgcggatggcgtactggggctttggtcgggctataaaaacatgcgtcagggtgaaagctggggctggttgatcttcagcggcctccttggcatcgcaaccgggcttatcgtcctggtcagcccgttcgtcgcgacactcgtgttaaccgtgtttctctggacgatggttgcattctggtcgatcacatccggcgtgatggagatcgtcgcggcctttcggctccgtaaggaaatcgagggggaatggttgctcgtcctcagcggtgtcatttccatcttgcttggcgctgccgtcacatgggtcttgttcacgacacccgcaggcagtattatggccctcggttggttgttgggcgtctatgccgcaatcttcggtgtaaccatgatcctgttggcattgaagcttcgaaacgcgagaacggcggccaggcacgtcacaggacctggctgcctttaa

SEQ ID NO: 70442 - DNA, 375 bp, Acinetobacter baumannii
atggcaaaagaacataaacacgaaattcagtttgaaaagaagagaccagttcgaaccaaagttgtgaaagttactttgttcgattcagagttcaaacttttagaagataaaaatccttataactcggtagcaaagttattgagagagtcagctttaaaagctgttaaacaagaagatgtacatacgagtacatattcaaaacttgatcgagatttcattcttgaattaagtcgaatcggtacgaacatcaatcaaatttcaaaagccataaatacaaatattgcgagagaagaaccgtttgaagctgtgaagttactccacctcttgataggtattgatgaaaccttgaaaaagcttaaggagtcagtccaatga

SEQ ID NO: 70443 - DNA, 1926 bp, Acinetobacter baumannii
atgattgtggagttttttaaaagaggacggggcaaatctagtggcccaataggttattttcttggaaaaaattttgacagagaacatgcaaaattattatctggggatttagatgaagttgcagaactgatcgacagctcgccttacgtaaaaaaatatacggcagggtgcttatcattttttgaagatgatctatcagatgcaaagaaaaaaaacataatggctgcatttgaaaaaacactgttcccaggtcttaaacctgatcaataccgagttgtttggattgaacaccgagataaagaaaatacggaaaccggagataagcgtttagagcttaattttttaattccgaatgtagaaattagcacagggaaacggttacagcctttctttgctaaagccgatttgaatcgagtcgatgattttaaaacgattgttaattacaaatatcaactttttgaccctgatgatcctattaatcggcgatcaataaaaattgcaaaggacttaccgcaggacaaaaaagattttattagtgcgatgaatacagaagttgctttggcaattactgacgggctagtcagtgatcgtgaaagtcttaaggaatggatgactcgcattggtttagaaatcacccgtattacgaagaatcaaatatcagtaaaaaatccgaataatccaaagggcaaaccaatccctctaaaaggtgagttttatgagcagaacttccgacattctgaacaaagcgaagatcttaagagagcagcatcagaagaatatagacgagaagctgaaagcagatatgcaaacagcattgaaagatacggaaagctttgtgaatcaaagagtcgatatcatctcgaacgatttggaatcagaggtagaacaggttcagaaaaacttacaagacagcttgcagggcaagaaaacgaacatacaagcgaatataaatataatgggggagaacttgagcaaggatatcaaagccatgcagaagagcttacaggcgcaaataaagagcatgaatgcggacttgcagacattaagcggattgagccaagcaacagcagagcaagcgaagctgaaaaaagcccttttttcctcgaatatagttttgattttaatagcatgtatctcgcttatcagcagcatttgtttcggttacgtcagcaagagcaaatacaacgacataaacgagatgcagaacaaagtcgagtatctgaaatcgcaaggtggaagcatgaatattcagaagtgtgggggcgagaaggattggcgttggtgcgttcaaatagacccgacagtgaagaagctttacaacaacaacttcgcagtagtgcaggaaaccaattaaatgaatctcgaagcacaattattgcagattatcgaacagcatcaacagcagctcaaagaacaacagaagcagttagagcaagccttacagcttattcaggcacagaacagaacaatagaagaattagagaaatacaacaacgaactggtgacgcactgcaatcatctgatagagcaaggcaacgagctgggcaacatcatcaagcaactacagaatccgactttatcagccgatttattgcaaaacttggagaacagcttaaaacagcgattacagagccatttagagcagttagtgactggcttgagcatcgaggatttagcaaagacgataatagagcacatcttgccgcagatggtggaggacgagatcaaaagccaattgaatcccctgaccgagccattgatcgaaaaactgagttcagtagagcaatatcaacagaatttagagggattaatccagcaaatatcttctcggctctagataaacttgatcagcgcagagagttgcaacgagcgcaagaacaggcaaagaaaaatgaccgtggctatgattccccaagcccattttaa

SEQ ID NO: 70444 - DNA, 963 bp, Acinetobacter baumannii
atgaataaaatacagccacaattggagttatttccaagttttattggtaatttaccaacaaaaccctactgcacgaatgacttggctacaggtttaaaaatccgtcctaaaaattcggctatttcattcaaatatatacagccgaatagccctttctatcagcattactttgttcttgatctcgattatgaatcagccatgagtgaaattttatattcacttgacggtatacctatgccgaattttgttgctgaaactcccaatagtggacgattacacgcattttttgagctaaaaacaccgatttatacaacagatgcaagtagacagaagccaatcatgctcgcaaatgccgtttatttgcgtttacagcaacttttcggttctgatgttggttactcagggttaatcagtaaaaacccaatacacgagcaatggcgcacgtacagccttagaaaaaaaccttatacgctgactgaattatcttcaaaacttgatattgattggcaagaagcaaaaaaaccgcctaaacagcatgaagccataggacttgggcgtaattgttatatttttcacactgcaagattttgggcgtataaagcggtcagagaatacagaggaaaagcatataataattggctacaggcagttatagaccactgtttaaagcttaacgagggcattacagaaccaatgcagtacaacgagatcagaggtattgcaaagagtattagccgatattgttggaaaaaagacgcatatcactatcaagaatttatagatcgtcaaagtcgtaaaggtagattaggtggcgttaagggtggattgattaggtctgctaaatatgaagaactacgtatcaaagcaaatgaaatgtttaaaaagaatatttcaaaatctcaaatagctattaatttaaatgtaagtagacgtactgtaatcaggtggttagatgataaataa

SEQ ID NO: 70445 - DNA, 789 bp, Acinetobacter baumannii
atgtccgaaaccttgcaacttgaacagttaacagaatctttacagcagcttttgggtgaatccctctttgccatttatctgtatggttcagctgttgatggcgggctaggtccagaaagtgatctggatgttttggttgtggtgaatcaagcactgacactccatcaaagacagcaactggcagaaaccttattaaaaatttcgtatccaattggggctgcacagcgtgcacttgaagtcaccatcgtacttaaagagcaaattctctcaggcagttatccactcagctacgaactacaatttggggagtggttacgggaggagttaaaccaaggtgctttgctccgcgcacatacagaccctgatctgagtattttgctgaagaaagcacaaatgcatcatcgtagtttgttggggccaagtttgacacagtggtcaacggcaattcctgaacagcacctctggcaggcaatggcagacacctatccctctattgtggcacattgggatgaggatgccgatgaacgtaatcagattttggccttatgccgtatttattttagcttgataacgaatgagattgtgcctaaagaccaagccgcacactgggtgatagctcagttaccgtcgctgcatcaacccattttgcagcgcatgatccaagaatataaaggtgagatacgcaaacaaaactggcaacaacagcatcaggctttaggccctgttgttgacttccttagttcaaaaattgatgaacaatttaataagaagagtagcctaatcaagtaa

SEQ ID NO: 70446 - DNA, 1815 bp, Acinetobacter baumannii
atgatcgttgatttttttagacatggcacaggtttatccaaaggttgtctagattatttacttggtgaagatcgagtgcgagaacatgcacaggttttaagtggtgatgtggagctgacagcacaactcattgatagcagcccttttgccaagaaatataccagcggttgtttatccttttacgagcatgatttatctgaccaggataaacagcagatcatgcagaattttgagcagtgtctttttcctggccttgatcaagatcagtataaagttctatgggtacagcaccaagataaggtgaaccaagttactggagagactcggcttgagctgaattttgtgattcctaatgtggaactttcgacaggcaaacggctacagccattttatgcaccggtagatctcgatcgagtagatctgtttaagcagattaccaatgcggaacatagactgtatgaccctgatgacccgaacaatcagcagcttttaatcaataagaagaacctcccaaaggacgttcgggactttaaagcgcaattacatcaacgtatctatcgagccgttgccaatggtgaaattgccgatcggcaaaaattggttgaatggcttgagtccaatgacgtcaaagtcacccgacagacccaaaaatcaatatcaattgaaaatccatatgagggcgcaacacgtcctatccgtttgaatggagaggtttatgagcaaggctttagagctactggcgaatatcgacaagaagtacaacagcgaattgcaacgtaccgaggaacaacttctgagcggtatcgagcaaacgtcacagattatcaaagacaacttaagcacaagagccaatatcacagcgaccgctatccaacagtcagacgagaaattagcgcagaacctacagaacagctcacagcagatcgaaaagcagctcgaccagtaccaagccttgctacagtccaaattgagccgtttaaagcaaatgaacgagcagatacagacagaagaacagcaagttcagaacaaaagcctactgaaacagcttactactttgaatatggcactgattttgggcgctgttattttgattattctcattattgcgctcagttttatggggaaaagcaagtacagcgagattcagacgctcaatatgacgatcaacgagaaacaaatgcgagtggatcacctgaaccgatcggggggcagtttgacgttcagcacatgcagacagcaaaacagcaaagcccaacgcttatgtattcagatcaacaagaatgcaggcgaatggcagaacggttacatgattccgatggggtattaaacgatgaccgaattagaaacacagttattgaaaatcatcgaagaacaacagcagcaattacagcaacaacaagcgcaattgcagcagcaacagcagagtttagacgtgatgcaaaagaaaattatccaagccttatcagcacaatcaaaggcaatggagagcgtacagaaaggcttagtgcaaacacaaaagtcattatcgacaacacagacgcaatttcacgaattagagagaagtacggcaacgtataccgagcagatcaatggcaaagtcagagagatgagccaaattacaacgaactacgaggacgtactggagaaaatctcaaccgtacagcagtcagtctcgtcagaagtagccaaagcgcagcagaatttgctcgaaacgtccgaactattgaagcgaatatcatccagatgaaggaacggaaaatggaaatggaacagccccaacctaagcaagatcgagggatgagttgggggatgtag

SEQ ID NO: 70447 - DNA, 402 bp, Acinetobacter baumannii
atggaaatagattcagtaactaaacagaaagcggttcgggaacggacgtttaaagtcagactttcagaatcagagtaccaattgcttgatgctaataatccttttggttcaatcgcaaagttgctacgtcaatcggcagtagagaaagcaacacagattcataattcaaaagcagatgatgaccaaaaaattaaagcaaaaaacgttgttgaatcttcatataccaagacagaacgttctttaattttagagttaggtcgcataggtaataacgtcaatcagattgccaaggctattaatacggatattgcagggacaggtacttttgacaaagtgaagttacttcatttgttgatttccatagatcagcaacttcgggagttacgtccagatgatcgttga

SEQ ID NO: 70448 - DNA, 276 bp, Acinetobacter baumannii; identical to SEQ ID NO: 25796

SEQ ID NO: 70449 - DNA, 453 bp, Acinetobacter baumannii
atggctaaaggctttgtctatctgtgtgcaattatagattggcatagtcgtaaagtactggctcatcgagtatcgatcagtatggaaacagacttttgcatagatgcgttgcaagaagcaattgtgaaatatggttgtccagaggtgtttaatacagaccaaggcagtcaattcacaagcgaggcatttttgaatgagttaaaattgcgaaatatccgtatcagtatggatgggaaaggacgatggatggataatgtgatgattgagcgtttatggcgcagcgtgaagcatgaggaagtctatttgaaggcttacgatacggttaaacaagcgaaacaatcaattgctgaatatttgggtttttataacataatacgtcctcattcaagtttgaataaggcaacaccgaatgaattttatgatcaacatttactaaaagtaatggcagcataa

SEQ ID NO: 70450 - DNA, 186 bp, Acinetobacter baumannii
atgacagaatctcaacttgatacgtttagcagtaaactttcagaactccctgaagtgcaaaagatggcacatgcaggcgaagatatgaaaccatttattgctcgtattcgttcgatgctcaaagactctgaaaaacaaaaaacgttgcttccccatctagcaaaattaggatttaaatcgaaatga

SEQ ID NO: 70451 - DNA, 192 bp, Acinetobacter baumannii
atgatgtttgagaaaaaaatcactcagtttgaaagggaagttttgctacaagaaaaaattgagcagctcgaaaacgagcttaaagaattttctgatcttcaaaaaaaagcatatagcgaacggcttcaaaaaagtatcgtgggtttagaaaatagaatctatcgaatcaagaaaatgctttatacaacctga

SEQ ID NO: 70452 - DNA, 1134 bp, Acinetobacter baumannii
atgtcatttgctattttgcgtattcagaaactcaaatcatttgccgatgttggaggcagtctttcgcataattatcgcaatcgagaaacgttaaatgccgatgatgctcgtacacatttgaatgaacatgccttggataccaacgaaaaatgtatgaccgctattcgtgatcgtattcctgaaaaaagacgtaaagatgcggttttgtgtattgaacatttgattacagcgagtccggagtgggatggctggggaactgaaaaagaaaccgcattttttgagcagtcgaaaaaatggcttgaaaataaatatggtaaaaataatgtcgtcagcaccaccattcaccgtgatgaaacaacccctcaccttgtcgcctacgttgttccagtggacgaagaaacggggcgattgaatgctaaaaaatatatcggtggatctcgacatacactttcacaaatgcagactgattttgcagttgaagtaaaagatttaggactagatcgagggatccaagggagcaaggcaaaacatacgtctattcaagaatattatgaaaaattgaacaattacgagaatgaaccaggcattgaaaaaggactcacctatgaagtgcctgaacctgagttttttgaatctaaaaatgcctacggtgagagagtcgcaaacgctatgattgatcagatatttgatcaaattgcgccacgatttgaccgagcgaatgcactggctagtcaaacggaaaaattaaaaaaagaactgtctgataccaaaaaaacactcgatgaggttcagcaacgagcaaagccatatttagacataatcaacgaatataatcatccaaatcttgagaaagaatttaataagcaagttgctaaattaaaagataattttgattcagcacttgaacatcatagattcctaaaaagacaggaagaacaagaaagatttaaccaacaacgtgaacttcgcaatcaattacacttagagcacgaacaaaaaaaacaactggctgagcaagaaaagcaggaaaaagaacgtttggcacttttaagacgtcaagaattagaaaaacagcgaaaaaatgagcctaaaaaacctgataacgccaatgataacgactactcaccctcataa

SEQ ID NO: 70453 - DNA, 1245 bp, Acinetobacter baumannii
atgtcatttgctattttacgtcttcaaaaactgaaatcttttgctgatgtcggcggtagtctttcgcataattatcgcaatcgagaaacgttaaatgctgatgatgctcgtacacatttgaatgagcatgacttagatacgaacgaaaaatgcatgtcagcgatccgggaccgaatccccgaaaaaagacgtaaagatgctgttttgtgtattgagcatttaattacagcgagtccggagtgggccggctggggcacagaaaaagaaactgaattttttgaaaaatcgaaaaaatggttagaagagaaatacggtaaaaataatgtcatcagcactacgattcatagagatgaaacgactccgcatttagttgcgtatgtcgtacctattgatgaagaaagcggtagattaaatgcgaaaaaatatatcggtggatctcgtctgacactctcaaaaatgcagactgattttgcagttcaggtaaaggatttagggcttgaacgaggaattgagggaagtaaggcaaaacatacgtctattcgtgagtactacaacgatgtaaacaactatgaacctgaacccaatattgtacttcaaacacctgaacccaatggaatgtttgagagtaaaacacaatatgctgaaagaattattgaatctgtgattgaacaaatcgaaccaaaattaaaagaattaaatttattagcaaatcaaactagatcagcaaaaaaagatgcacaaaatgcacttaaaacagcctcagaggctcgtaaagcactttcagatttacaagaacatgtaaaaccctatctggacgcactggacggcctggaccaaacatggaaagaatattttgataaaactttgcgagcagctaaagaacaagtgctagaaaaaaggaagcaattgcaagttgaaaaagaaaatgaagaactatcactaaaactaaaaaaagaagaaagaatatttcaaatggaatggaacaatacatttgctggtttcaataaagaacaaatcaagaattatgaatatcaacttgagtgtcttgaacaagattatcctgttgaattttatagacaaattcaaattaaatcattgcaaaaaaatcttattttgaatccaaattacaagagatacagtaaaaatgagttccatcaagaaccagaacaaaaagtacaaccgacacaaaaaaatgatcaagaaaaacgatctggcaatgattacgattcaccaccaccattttaa

SEQ ID NO: 70454 - DNA, 189 bp, Acinetobacter baumannii
atgattgaaaaagagataacaaaatttgagaaagagattttgctacaagacaaaatctctcagctcgaaaatgaactaaaagaattttctgatcttcaaaaaaaagcatatagcgatcgtctgcagaaaagcatcatcggattagaaaatagaatccggcgaataaagaaagcgctttatacaacttga

SEQ ID NO: 70455 - DNA, 915 bp, Acinetobacter baumannii
gtgaaagacaatgcgttaatgaatgccagttataacttagaaacgtctgaacagcgtttaatattgcttgcaattatgaatgctagagaaacagggcaaggaattaccgcagacagcaagttagaaatacatgctagtgattacgcaaaacactttaatgtgtctacagatgctgcatacaaagtattaaaagatgctgtaaataatctgtttgaacgtaagtttagctatgtttcggaatataaaaagactggcaaaacaggcattgtgcgctcacgttgggttagtcgtgttttctatgttgatacgttagcgattttagaaatcacttttgcccctgacgttgtaccacttgttactcggcttgaggaacactttacaagttatcaacttaaacaggtatcacagcttacaggtaagtatgcaattcgattatacgaactactaattgcatggcgtgaagtgggtaaaactccacaaattgaactatcagaattcagaaatagagttggtgttgaggataatgaatatcaacgtatggagctgtttaaaaggcgtgtcttagaaccgtctatcaagcagatcaatgaacataccgatatcactgtgacctatgaacaacataaaaaaggtcgagctatttcaggcttttcattcaaatttaagcagaagcaacaagcaaagaaaatcgaatctaaacgagatcctaatacacccgatttctttatcaagatgactgactcacaacgccatttatttgctaataaaatgtctgaaatgcccgaaatggggaaatactcacaaggtacagaaagctaccaacaatttgctattcgcatcgccgacatgcttttacaacctgaaaaattcagagagctttatccaattttagaaaaagccggattcaaagaatga

SEQ ID NO: 70456 - DNA, 270 bp, Acinetobacter baumannii
atggattttaagattccgattgggcagacttttgtcggacgcgtctttgcccaatctcaactgatcatttgcgatgacctcgctcagtcggatgagctagattgtaaaatactttccgagcatggcatgggcacctgtatggatgcgcccatgattcacaatggcgtgtgtattggcaccttaaatgtggcagatcaacgtaaacatcactacactttgcagcgcgattcttttacagagtctcgccacttggttagctttgaacattaa

SEQ ID NO: 70457 - DNA, 897 bp, Acinetobacter baumannii
  misc_feature (255)..(264): n is a, c, g, or t
gtgtcagcactaaccgacgtatcagcaaatgcactccaacaggctcaacaacgtattcacgatgatttattgacggcacttgatgctttttcaattccggaaccgttacagagtgccgtgcatcatgcggtcatgttaggtggcaaacgtgtgcgtcctgcgctgtgctatgccacggcacatttaaatccaaacaataatgccgctgccgtgcgccgtgccgctgtggctgtggaactgattcattgttactcnnnnnnnnnnatggacaatgatcttttgcgtcgtggtcagccgacctgtcacgtggcttatggtgaagatactgctttgcttgcgggagatatcttgcagtccatggcgtttgaaattttaggtagtcgactgtttgatgctggcccagtggttgatcagggtattgtactgaagcagatgcaaattttagcgacagcgagctctaaaatggtgtgtggacaagtcctcgacctacaagccgaaggtaaacgcgtcgatcaggctgcacttgaaaatatccaccgaaataaaacgggtgcattgatttctgctgcggtgatgatggccgcggtgactgtatttgacggttgcgatcaagcgattccaaagttacgcgaatatgcacaggcaattggtttggcttttcaggtgcaagacgatattttagatatcatttcaaatacagatgtactgggtaaaaccgcagggaaggatgagcaagtcgaaaaatcgacttatccagccttgatggggctaggcgctgcacaagagtatgccaaaactttgcatgatcaagcctttgctgctttggcttatttccaaactgatgcggcagcagaactgtatcagatttcacagtttttattggctcgccaaagctaa

SEQ ID NO: 70458 - DNA, 1353 bp, Acinetobacter baumannii
atgcaaacgaattccatcgaaacacatcacagtacaactttgcagtatgtgcattggtttcgacattctgcgccttatatcaatgctcaccgtaataaaacctttgtgattatgttcgatggtgaagccgttcagcatgataactttcaacatattattcacgacattgccctgctgcattcactcgggattcgcctgatcttggtgcatggcgcgcgtccgcaaatcaaccacaacttaaaacaaagccaactacaaacgccatttcatcaacatcgccgcgtgaccacgcgagaatcactaagttgcgtgatgaatgcggtaggctcaattcgtttgcaaattgaagccttactgtctatgggactggccaattcaccgatgtatggcgcacgtattgatgtagtttcagggaattttgttacagccaagccctatggcattcgcgatggggtcgattttcagttaaccggcgaagttcgtacggtcgataccgatgccattcaacgccatttggataatcacaatattgtgctgctcgggccaactggatattccaccacaggcgaagttttcaacctactggcagaggaagtggcgacccgcacagcgattcatcttaaagcggataaactgattttcttgggcaaacaacatggtctgctcagtgaacatggtcagttgcaacgcgaaatttcgccacacaagctcgatgcacaaattgagaagtaccaagattcgaatccagacattgccgtgcttttacgcggtgctaaaaaggcctccacacatggcgtccatcgtgtccatctgatttcctatgcttatgatggtgccttggttgaggagctcttcacgcgtgatggttcgggcaccatgattaccgatgcccattatgaagaagttcgtatggccaacattcaagatgtcggcggactgattaacctattacgcccacttgaagaagaaggcattttggtttatcgctcacgtgaacgtctcgaaaacgaaattggccaatttgcggtgattgaacgtgatggcatgatcttggcctgcgccgcactctacccactgccagcagcagagggtgaaatccgcagcgctgaaattgcctgtgtcgcagtcgacccgagctatcgcaaatcaaatcgcggcagccaaattttgcattatctcgaaggtaaagcccgcagtataggcattcaacagttgtttgtactgaccacacgtactgcacattggttcttagaacatggctttgaaacggctaatgtcgatgaacttcccaatgcacgccaagccttatacaactatcagcgcaactcgctcgtctttaaaaagccactttaa

SEQ ID NO: 70459 - DNA, 366 bp, Acinetobacter baumannii
  misc_feature (260)..(269): n is a, c, g, or t
atgaaaaaaattctgactgcaatcacactctctttaggcgcgctcatggccacatctgcaatggcagcaccacaatactatgaccgctcgcatgatcatgactcgcgttgggatcatcgcgatgaccgccgttgggacaatgacaaccgctaccaaaacaaacgtgttaacccaagccgagactggcgctcaggtcaaactttgccacgcggctatgactcatcgcgttatcatgttagtgaccgcgaagcacgtcgccnnnnnnnnnnacccaacactggacgctaccaacagtggtataaggtcaatggtgactatgttttagtcaatgaacgcaataaccgtatcctacgtattatcggttaa

SEQ ID NO: 70460 - DNA, 363 bp, Acinetobacter baumannii
atgaaaaagattttgacagtattggcaatctctttcagtgctttgatggcaagcagtctcagtactgctgcccctcactatggcaatgagccacgcggacgtgactttcgcgattcaggtaatgacgatcagcaagatcgtcgacgtatgcgcgaagagcgcggtgtcaaacgtttacaacagcataaatggcaacaaggttatgtcatgccacagcattaccgtggtaacggctataaagtcgaatataaagaccataatcttccaaagccaaacagaaaccagcagtggtacaaaatcaacaatgactacatcttagtcgacgcagacagcaacaatattctgcgcattatggggctttaa

SEQ ID NO: 70461 - DNA, 420 bp, Acinetobacter baumannii
  misc_feature (339)..(348): n is a, c, g, or t
atgagagcttctactgttacaattaaaactgaacaagatctagaaaaattaagagtttctgggcgtttggctgcacaagttttagaaatgataggggagtatgtcaagccaggcgtaacaactgaatatttagacaatatttgtaatgattacatcgtaaatactttaaaagttataccggctaatgtgggttatcatggattcacaaaaacaatatgtacttcagtcaatgaggtggtatgtcacggtatcccttctcaaaataaaattttaaaagatggcgatattattaatattgatgtagcaattattaaagacggctattttggtgatacgagnnnnnnnnnnggtttctctttcattatttccaaccttggattgactaagctaattgccgtatgtactatgtcggtaacgtaa

SEQ ID NO: 70462 - DNA, 675 bp, Acinetobacter baumannii
gtggccgaacttgatgtggtaggcgtacgttctgaggcggaaaagaatcaggtgatgggacatgtttcaccagccattactcataattatttcacctcagatttagaagaaattcgtgatcgtaccttagagctggcttgggtcgatcgcgtggtggtttcgcgggcatggccgaatgcgattcgcgttcgcgttatgccacggcatgcaattgcacgttgggggacggggcgtctcttaagtgacagtggtgacgtatttagcgaagtgacgccgaaaaataatcagaatttgcctttattacacggcccaatcagtcagtctaaaatgatgatgcgccgctataatgaaattaatcaattattccagccagtaaaccttcgtttaaaagaactatatttaacggagcgtatgacttggtttatgcagttcgattcaggtttacgtgttatcgtagatcaggatcaaaccatgagtaagctgcaacgtttgagttatttggctcaaagtgatttgaagccagtttgggccaaagtatctgccattgatttgcgttatcggaatggcttggccatccaatggaagaatgctgccgcaccaaagatagcaaatggtcattttgttgtaacgattgatgacacaagcattgcaggtggagcagcagcaaagccataa

SEQ ID NO: 70463 - DNA, 879 bp, Acinetobacter baumannii
  misc_feature (813)..(845): n is a, c, g, or t
ttggttcgttcgggtgtaaatgcagaagcttttgacccgcaagagcgtagtgtgaccgaattggtcgcttatgaccgtgcgtttattgtgttgcatggtcgcggtggggaagacggtcaaatccaaggggtcttagagtggctcaacatcccgtataccggaacaggcgtacagggttctgctattggtatggataaagttaaaaccaagcaagtttggcagggttcagacttaccgacagcaccctatcgcatcattagccaagagtcagatttagctgaagtggtggcgaatttgggccttccactgattatcaagccggtacacgaaggttcaagtgtcggcatgagtaaagtcgaaaaagcagaagatttggcagcggcaattgccaaagcgacccaacacgatgctgtggtgatggctgaaaaatggattacgggacgtgaattcacgatttcatttttaaatggtcaaccgctacctgtgattcgtctacaacctcctgcagatgtggctttttatgattatgaagcgaaatatcaacgtaatgatgtggaatacggaattccgtgtggcttaagtgctgaagaagagcaaaagttacaagcgctttgcctccgtgcattccaagcggtaggtgcaagtggttggggccgtattgatgcgatgcaagatgagcaaggcaatttctggttactcgaagtgaatacagtacctgggatgaccagtcactctttggtaccgaaagcagcaaatgcagtgggttatagctttgatgcgctttgtgtccaaattttagagcaaacactgacnnnnnnnnnnnnnnnnnnnnnnnnnnnnnnnnnaagtcatgacggatgcacgtgtggccgaacttga

SEQ ID NO: 70464 - DNA, 1335 bp, Acinetobacter baumannii
atggtgtttcagcaggatcttctcgacctcaacagtctgtttaacttctcggatctgaatacatttactcataatatccccattgagtgggttgaatctgcacttaaattgagcagttcggctactatccgcaggcgacgcttgcccgcagatcaggttctctggctggttctcggaatggcgatttttcgtgatgagcctgtccatgaagtggcaagaagactaaatatttgcgctcaaggactggcctctcttgacctgttggcacgcagcggggtaactgaagcacgtaagcgtttgggtgcagatcctgtggagtggctgtttcgccagacaggtcagcactggggacatgagcgttacccagatgatcaatggcaggggcttcaggtctttgctgtcgacggtgcactcttgcgaacccaagatacaaatgatcttcgtgagcattttggctcagggaatacttccacgcagcgccagacgccatttccgatgctacggctcgtcgcactgatgaatgtgcgctcgcatatattagtcgatgcgcagatcagtccctatcgccggggggagattcctctggcgtcgaagtttctcagccagattcccgatcattcgatcaccttgtttgacaagggtttttggagtgcggacttattgctttcactctcgatgcagggtcaaggtcgtcactggttgattccggaacgcaaaaatctgaaaagtgaggtgatcgagacgtatgcagaagatgacgtgcgggtacggatgaaagtatcaccccaagcaagaaagaacaacccgatgctccccgaatactgggaagtcaggcaagtcagttatgctgtggataagggacgaataaagacggttctgacctcgctgccggccgatcagtatcctgcaaaggatatcgctagactctatcaagaacgctgggaaatcgaattaggttttcgggatatcaaaagctcgatgcagcataatgccatcacgcttcgcagcaagacagtagagctggtttatcaagagctgtggggtctattgctgacctacaatattatccggcgagaagcggcatttgcagcggtagcctttgggcgttcaccttcggatatccgtttcaagcctgtatgccagtacatagccgttcagctgatcgtgatggcgaatgccaacccattatcaagaactggcaggcggctatcggagctgagatcagggataggtagcctgtttctggaaaggcgttcgagggcaacaacaccccgaacggttaagatgtcaaaaacccgttatccagtagatcgaaatgctgctcctcttaagtga

SEQ ID NO: 70465 - DNA, 411 bp, Acinetobacter baumannii
atgcctgaaatgagcaaatactctgagggtacagaatcttatgaagattttgcgaaacgtatagcagacatgcttttagagcctgaaaaatttaaaaagttttatccgcttttagaaaaacttggctttggttctaagaaaattcaacctacagtcaaacaggttgatcaagtcaaaacctacaatatcgaagatcacaagtttattgcattcgacccaagggggagcgttcatctttcgagctgtgctttcaacattgcacgggacaaaaggtataagcacatgaaaaaagatagcgaaaaaatgacagactttgaaaacaggttaaaaacgatgcttctcgatgaaaaacaacaatcgcaattttttgagattttgagaggtgaaaaatcaaggtttgaacttaactaa

SEQ ID NO: 70466 - DNA, 180 bp, Acinetobacter baumannii
atgaaattgagtgatgtcgaaaaaaataatcgtttgtcagaggtgtttttaaagaaatcagatcgagaatattacgatttagaaatcactgaagatcatcaaaaactttatgatcagtacgtttcatgtgatttaaacaagcaagattttgaagaacaactaaacaaattgatcaagtaa

SEQ ID NO: 70467 - DNA, 771 bp, Acinetobacter baumannii
  misc_feature (69)..(78): n is a, c, g, or t
atgctcgcacagtcgttgttccgtcaggccaagaagcattttgaccggctgcatgctcaggaccaaatnnnnnnnnnnacccgaatgcctctactgtcgaaacttgaggctgtcgcaaggcgtgagctggcttatctgcgggccgtcggcgatttaccgcgcgattatccgacgctgcgcgacgtggtggatgaagcgattgtccaagctgaggtggaatggcaatccgtgccggaagaaaaagcggcttacttcggtcttctgaaacatctgttcgccgtcctggatcacgaagtggcaaacagccggcaatttggcgaattcgtttctctggacgcgccggtcgaaccggatgcccaggacgtcgccgaggccatggtggaagaggaagtcttcgaattttatcagcccgatgacacactcaggcttgccgatatcatcgctgacagtcagcatcccgatgccgcaacgatcgcggaacaggaggagctagttgatcggtcgagcgagttcgctttcgcattcgacctgctgaaggacatgccgcgtttgtggcggcgcatttttctgcttatccgtgtggacgggctggatgccagcagcgtctctgagatcctgctggccgaagcgttcatcgctgctcatttggaagaggccggagtaagcaaagacgggaacgattggctccaaggcgttgattggtcggcattgtctgtgacccgaagcgcggcagcctcactgtggtccaaggaggcgaaccatgaagaatga

SEQ ID NO: 70468 - DNA, 654 bp, Acinetobacter baumannii
  misc_feature (531)..(540): n is a, c, g, or t
atggatgcggtgcgtgagtttggctcgatgttgattgagcacaatatgagtcaactgaatgccacgacctacattcgtatgatgtcacataccagtgcagtcaatatgacggtgtattttggcctaaaaggtttaacgttgccgacctccagtgcttgtacttcaggttccatggccattggtcaagcctatgaagcgattaaatatggcaaacaaaccgtaatgatcgcaggcggagcagaagagctcagtgctgccggttctgccgtgtttgatgtgctgttggcgaccagtgtgcaaaatgatcgacctgagacaacgccacgcccgtttgatgcaggccgggatggtttggtggtgggtgagggcgcaggctgtttgattttagaagaatatgaacatgctcaagcgcgcggggccaccatttatgccgagatcgttggctatggcagtaataccgatggtcagcatgtaacccgacctgattctgaaatgatgggctgttgtatgcggttggcattgaaagatgcnnnnnnnnnnctgccgcggatattgattatgtcaatgcgcatggcacttcgaccgatcagggggatattgcagaatcacaagcaaccgcgcgcatcttggggaaaaagccgatcagctcattaa

SEQ ID NO: 70469 - DNA, 726 bp, Acinetobacter baumannii
gtgaacagaagagttttagtcacgggttcgagtcgtggaataggtaaagcgattgctttggagttggcaaaggcaggctttgatgtcacggtccatgctcgttcaagacagtctgaggccgaagcggtggctcatgaaattcaagcgcttggacaggccagccatgtactgatgttcgatgtgaatgagcgtgaaaagattgccgctattttagagcaagatatggcacagcatggcgctttttacggtgtggtgttgaatgcaggactgacccgtgatggtgcttttccagcactgaccgatgaagactgggatgaagtggtttcaacctctctgaacggtttttacaatgtgctgaaacccttgatgatgccgatgatccgcttgaaaaagggtggacgtattgtgaccttgtcttcagtgtcaggaatcatgggtaaccgtggtcaagtgaactatagtgctgccaaagcaggcttgattggtgcgaccaaagcattggcactggaattggccaaacgtaaaattacggtgaactgtgtggctccgggcttgattgaaaccgaaatggtcacggaagaagttaaagaacacgccttgaaaatgatcccgatgcagcgcatgggacaggtagaagaagtcgcaaaagcggtgaagtttttatgtagtgatgatgccagttatatcacccgccaagtgatttcagtcaatggaggcctaatttaa

SEQ ID NO: 70470 - DNA, 513 bp, Acinetobacter baumannii
atgaatgccttggctgccgttattgcaggctatggactgctgtccaactctgctgcggtggtgattggcgcgatgttggttgccatgatgctggggccgatttcaggcattgccttggctttaattgataaccgatggctgctgtttaaaaccgcgttgtcgaccttgttacttggcgttgcaatgatttatagcattgggatcattttagggctggtgaactatgacctacctatgaccaatgaaattttatcgcgcacgcagccaaccattttggatttgatgatcgctttagcagggggggccgcaggtgcttttgcctcagtatcccctcgcctatctgtggccgtggtgggtgtcgccgttgcgacggccttagttccgcccttggtggccagcgggattttattcgcgcatatggaatggaatggattgcaggctttagacggggttccaccgaagaagtgcagagtaatgtcaaagagtttctcaaacgtaatgctgttagcctaa

SEQ ID NO: 70471 - DNA, 363 bp, Acinetobacter baumannii
atgttcttggcatttttagggatttatctctcctttaacttttattctatgctccatgctcgcctgtatgagagcggcaatgaaaatatcatcagtacggcgttaaatcacgataataatattattgataccatccaatacgataaaaaagagggtttcactttagtccgtgtctctatccatggagatattccgcctagcccagtgcaaattgcagcactcaatcaaaagctattgccagacttgaacgataacccaagcattgttcaagtccgctttattccgattgatattattcaggctgaagacagccccaacgtcaaactcgaacaagatgaagcgcagaagctttcagtacaataa

SEQ ID NO: 70472 - DNA, 270 bp, Acinetobacter baumannii
atgcaagatgaacagttgaaacaagagctgaaaagtctatttcagttgttccaacagacacctgaagaactacaatttatggggcgcagcttggttagtcgtttagtgattttggcacaagcagtcctgctaaaacggcatgcaccaaactatgtggctgatggctttattcaaagccgttatagtccatttcatggtcgtgttgtcgggatgcttgagatgaaacaacccgacgtagaacgactgctgcatagagcatttgcagcttaa

SEQ ID NO: 70473 - DNA, 651 bp, Acinetobacter baumannii
  misc_feature (625)..(634): n is a, c, g, or t
atgtgtgatgcgcatttggtggtggcaaagacagaacaagatggtttggcgtgtttctttgtgccacgttggttggagaatggaacgaagaacccgatccatatccaacggctaaaagacaaagtgggcaaccgaagtaactccagttccgaagtcgaatttaaagaggcgtggggcattatgattggggaagctgggcgcggtattcccaccattatagaaatggcgaattacacccgtttaacctgttctgtgggcagtactgccatgtttagacaagccttagtgcaatgtattgcctatacccgtcagcgtaaagcctttggtaagcatttggctgaacaaccgttgatgcgcgccgtattggcagatttagctttagaaacggaagcggcgatgcaactcagttttcatttggcacactgctatgaaacggatgatgcgctgtctgtggcatggaaacgcattatgaccccagcgtcgaagttctggatatgtaaacgtgcagttgagctgacaggggaaatgatggaaatctttggtggtaatggctatgtcgacaacggcatcatggcgcgtatttttaaagaagcgccagtcaataccatttgggaaggctcaggcnnnnnnnnnntatcagccgtgatgtag

SEQ ID NO: 70474 - DNA, 1473 bp, Acinetobacter baumannii
  misc_feature (397)..(406): n is a, c, g, or t
ttgctggaaaatacttataccaaactgagctatctgcaggtctatcagcaggatgcctggcgtgaactgaacgccgtcttgactgtggatgatatggcgcaactcggattgtctctggatggcggacagagcaatcccaaagccctacaggaagtggagcagtacattgcactacgggccaccggtagcgaacgtattctggtctcagatgtgatagatcgttttgtcaaacgcccttatggctggccagatgccgagattttattgctggtgggtcagctggcggcaatggggcggatttcactgcagttaaatggtggcagcttacagttaaaagatgcctttgagactttacaggacagccgccgtcgccgtgatgtatcgatcattaaaaagnnnnnnnnnnagcgccagactgatgatcaggtattgaaacaggcacgccaactgacccaagacctattctcggccatggggccagcgactgagaaagagctgtttgaattctatttgcagcattttaagacttggttagccaactttaagtcgtataagagtaaaactgatgtcggacagttcccgggcaagaaagtgattgaaaattcgattctgactttggagcgcttgctggcgaatagcgacagcttcgatttctttaaagcggtggttgagaacaaggacgactatctggatctggaagaagactaccgtgatattcatgaattctttagtaaccagatgccgagctggcagcaactgcagcaagccttacgtcattttgagaaaaacaaacaggcgctgggcagtgatgatgtggcaaaaaaagccctctccgaattacatcgtattgccacccttgaatcgccctatggcctgttaaataaagtggctgatttggttcgcacagtggaaagtgtcaatcaacgcttactaactgaaaaacgcagtcaggcgctagagcagctggatgacaagatcaaacagctggaagctgaaatcaagaacagcggcattgctacagctgagctgagtaacaagctactgcgtccgctgcaattgctcaaagcggatattgaagtggaaactagcctgtccaccatctatatgctgcaaacccaaaccagcgtcgagcgttttgatgaagccttgtatgagctggaacgagaagttcagactgaaattcagcgtcaggccaaagcggcacaactggctcagagcaaagcagagagtgtagcgagctcagcaaccacctccagcccagctacatcagcacctgctgcgagtccggtacagcctgtgacagccgtagtgccaccgaaacctgttgtcgaagtcgatgtcgccagcatttacagcaaaagctcaagtagtgtctatctggaaacggaagaatcggtggatcagtttgtagacgcactcaaagctgaactgaaaaaaatcgtgagtgataaaaagcgtgtgcgtatccgctaa

SEQ ID NO: 70475 - DNA, 351 bp, Acinetobacter baumannii
atggctggtgatggcatcaatgatgcaccagccttggctaaagctgatgtcggtatcgctatgggaacggggactgatgttgcaatgaatagtgcccaagttacgctggtcaagggagatttacgagggattgctgttgcccgttcactttcggaagctactgtcggcaacatgaaacagaacctcatgtttgctttcctttacaatgctttgggtatccctatcgcggctggcgtactatatccatttaccggttggttgttgtcaccgatgattgccgccttggctatgagtttgagttcagcttcagtcatcaccaatgcccttcgcctgcgaaataaaaagttatga

SEQ ID NO: 70476 - DNA, 354 bp, Acinetobacter baumannii
  misc_feature (333)..(342): n is a, c, g, or t
gtgcctgtggatggtgtaatcactgaaggaagtagttcagtggatgaatcgatgctgacaggtgaacctttacctatcactaaacgcatcggcgataaagtcattggagctaccctgaataccaatggttcattgatcatgcgttcagagaaaattggttcaagtaccatgttatcccagatcgtacagatggtggcgcaagctcaacgatcgagagcaccaatgcaacgtatggctgatcaggtagcaggttggttcgtcatggctgtagtgaccattgccttgcttaccttctttggatggggactattcggcccagaagagtcgagctgnnnnnnnnnntttatgcattaa

SEQ ID NO: 70477 - DNA, 660 bp, Acinetobacter baumannii
atgaccagtctggataatgttttggaagatgtacgtcgcattaccgaacgtgtagacaccccgttactggtcgatatcgacacgggttggggtggggcatttaacattgcccgtactgtgaaacaaatgattgctgcaggcgcagccgcagtgcacatcgaagaccaagtagcacaaaaacgctgtggccaccgcccaaaagccgcagttgatgccaaaaccgatgcaaactttgtggtgatggctcgtaccgatgccctacaaaaagaaggcctacaagcggtgattgaccgtgcctgtgcttgtgtagaagccggtgctgatgcgatctttgctgaagcaatgacggatatcactatgtacaaaaccgtctgcgatgcagtcggtgttccagtactggcgaacattaccgaatttggcgataccccatactacaccaaagaacaactggcagaacaaggcatctcgatggtgctgtacccactgtcaccgacccgtgccatgcaaaaggcagcactggaagtcatgcatgccattcgcaatgacggtacccaagtcaacgtcctcgacaaaatgcaacagcgcaaagaactctacgaatttctcgattaccacacctttgaaaacacattagacaagctgtttaaacaggagaattaa

SEQ ID NO: 70478 - DNA, 882 bp, Acinetobacter baumannii
  misc_feature (865)..(874): n is a, c, g, or t
atgcttcctgtgcaccgtggtagcttctttggcccaatttatcaattctttgccatgcttgcatcactgatgatgccactgttctttgtaacgggttggatgctgtatctcaaacgccgtaaacaaaagaaactcactcagcaagcccgtggtggagcgttgaatgttccagttgatccacatgcgaaaccatggctcattgcctatgcaactcaaacgggtgtttctgaacaaattgcttggcgtactgcaaccagcttacaagaagcaagacaacctgtaagcgttaaagctgtgcagcacttaacacaggatgacttaaaagctgctgaacaagtgctttttgttgcaagtacttatggcacgggtgaagcacctgacttagccagtagttttgaaaagaaatttttaaatacaactttggatttgtcacaacttcactatgccgtgttggctttaggctctcaagaatatcctgactcctattgtagttttggacatcgcattgatagttggttaaaagccaatggcgcacatgctttgtttgaaacgattgaagtcaacaacgcagataacaatgatattcaacgttggaacagtgctcttgcctctgcaaccaaacttgagcttcaagccatgaatattgacaaaacctttgatcaatggactttggcacaacgtgaagtactcaatccaaacagtgtcggagcacatgcttataatattgagctaaaaaccaacttcgatgcaacatggcaagcgggtgatattgctgaagttcaaccaggtaacagcaccgcacgtatccaagccttcatgcaaaagcatcatattgcagcacagagcatcgttgagtctttagccnnnnnnnnnntcgattga

SEQ ID NO: 70479 - DNA, 591 bp, Acinetobacter baumannii
atgaattttatgaaaaaaactgctgtcgttgttgcccttgtgagcacgttaacgctatcgggctgtggttataataccttacaggtcaaagatgaggcagttacagctgcttggtcggaagtacaaaaccaatatcagcgccgtgcagatttggtgccgaacttggtgaatgtagtgaaggggtatgctaagcatgaagagcaagtcctaactgaggtcacacaggctcgtgccaatgtggcaggtttaaaagtcgataaagaagtattagaagaccctgcattattccaaaaatatcaagaagctcaggcgcaaatgacaggtgcattgtcgcgtttaattgcggtctcagaaaactatccagacttaaaagccaatgagcaattccgtgatttacaggttcaactcgaaggtaccgaaaaccgtattgcggtagcgcgtaatcgctacattagtacagtacaagactttaactcctatgcacgtcagttcccacaagtcatgactgcgaaggtgattgggatggacaccaaaccgaactttagtgcggagcaaagtgcgcaaaaagcaccaacggtatcatttaactag

SEQ ID NO: 70480 - DNA, 132 bp, Acinetobacter baumannii
atggaatctaaaattgccacggctggacgctcatgggcaagcatttcacatattcgctcgacacaggtttctgccatgactttgagtttatctgtaggtagatcaagccgatttgcacgtaaagccacttga

SEQ ID NO: 70481 - DNA, 648 bp, Acinetobacter baumannii
atgcctgcacttgaactgattttccgtgatgcctttactggtgaagcggtagcaggtggcgcaattggtgctgtcattcgttacggtgtcgctcgtggcgtcttctcaaatgaagctggtatgggttcggcgccgatcgccgcagctgctgcaaaaaccgaccaccctgcgcgtcaaggcttagtctcaatgacaggtacgtttatcgataccattatcgtctgtagtatcacagggatcgttttggtcatgggctttattatggcgggcaatagttttggtggcgaaacaggcgcggtattaaccacccatacttttaaccaattactgccgggtgtcggaggctggatcgtaacttttggtattgtgttcttcgcttattccaccattttaggttggtgctattacggcgaaaaatgctgtacttatttactcggtgaaaagtatgttctgctgtaccgtctcatttacatcgcgtcagtctttattggttgcgtagcatcacttgatttagtctggctatttgccgacacctttaatggtttaatggcggttccaaacttaattgccttgttattgctgtcgacggtgattgtgaaagagtcacgtgattttgtcgaaaagcgtaaatcaggtgagttgtactaa

SEQ ID NO: 70482 - DNA, 372 bp, Acinetobacter baumannii
atgtccttacaccttattgctgcaaaagctgcacttgccctacctgaagtgacgtgtagtcagccctttggtgaaggctgtgatgtctataaagtcatggataaaatgtttttgctcaattcatctttaagtgggacagctttaagtaacttaaaagtcacgcctgaccacggcgcgatgttacgtgatatttatccgtatattcatgcaggttggcatatgaataaaaaacattggatttcaatttatgaggatgaagacttagatcctgatttagccattgatctagtacacagctcttatgagctcgtggtatccaagctgaataaactacaaagacagcgaatcgctgcgcttaaagccatcacctaa

SEQ ID NO: 70483 - DNA, 786 bp, Acinetobacter baumannii
  misc_feature (763)..(772): n is a, c, g, or t
ttgggacattttgagtggatcaaccagtaccaacctgatttactcgacgaatttacccaaaaatgcatcgcatggcattaccctgagtgtttagaggcagagcaacctgttttggcatttgcaacccaagtgattcaacggacagcagtaatgattgccaaatggcaactggtcggcttcgcacatggggtgatgaataccgataatttaaacattacaggctcaaccctcgattttggcccttatggctttatggaacgcttccgcccgaattggattaacaatcactctgactatcaaggccgctatacctatcagcagcagccgagcattggacactggaacttatggacatggttgaacaacctgattccgctttgtccgcaagactatgacaaagaacaatggaagcaggaccttgcagattgcttagagcactatgaacccacgttcttggagcactacaaactgggtttaagtcagaaaatgggcttacctcattttcacactgagagttttgactgtgccatgactttcttacggattctacaaaccgaacagctcgactacacacaaagctttacgcgtttgcagaatcaacaatatgaaatgattaaagatgactgccttgaccgtcgtcagtttgaaattttcctcgctcagtatgaacaaattcgtgcaaatcaagacacggcagaactcgatgcagccatgcaacaagccaatccagtttatatcctacgcaatcacatggcacaaaaannnnnnnnnngaacgcttatttga

SEQ ID NO: 70484 - DNA, 543 bp, Acinetobacter baumannii
  misc_feature (175)..(184): n is a, c, g, or t
atgaccactcaacgctgcggatggtgctcctcagacccactttacatcgactaccatgatcatgagtggggtaaaccactacatgatgaaaagcaattatttgcgatgctctgcctcgaaggtcaacaagcggggctgtcatggattactgtcctgaaaaagcgtgaacattatnnnnnnnnnnctattgaacaaattgcggctttgagtgatatagacttagccgaaaaagtccaagatatcggcttaattcgccatatcgggaagctgaccgccattcgtgacaatgcgattgcatggcaagccctgaaacaacaaggcatcaaccccgttgagtggctctggaactttgtcgaacaacacgcaatcaacaatgatgtcccagactaccgcacagcacctgcacagacacctcaaagccaaaatatgtctaaaaccctaaaaaaacagggctttaaatttgtcggacccaccacctgctatgcctttatgcaagcggtcggtatggtcaatgaccatgaaaatagctgtcattttaaataa

SEQ ID NO: 70485 - DNA, 246 bp, Acinetobacter baumannii
atgtcagaagcgttgatcaaccgtctggtcgaatttgctgaatcaggcaatcaacaaaaaatcatcttggctggacaaaaccaccaaggttggatcatggaaattactgaagatgcgcttttaatcagcactggatttgctgaaaaaacaggaaaagatgtttggattaacttttccgacctcgaacaagcccaattgttttattgggacaatcaacacgaccaatgggccccttttaccctataa

SEQ ID NO: 70486 - DNA, 486 bp, Acinetobacter baumannii
atgagcattttaaaaaaacttgtgacacagccaattgtcgcgaaatactttctcaatcattttgccccctttaaaggtgcagggattcaaattgaaaaatttgaccttaaacactaccacattcgcgtcaaaatgcccctcactcgacaaaaccgaaacattgtcggcgtacattttggtgggagcttatattcaatggtcgacccgttttatatgaccttactgatgtaccacttaggcaataagtatattgtctgggacaaagcagcctctatccaatttctcagcccaggacgcagtacagtctatgcagactttcaccttgatgcccaagaaatcgcgaccgtaaaacaactggccgacaactatgcccccgtacatcgtatttataccttaaatatttatgatgaagctggcattcgaattgcagaagtggaaaagactttatatatccgtcgtaaaaaacctaaaccggcacagctataa

SEQ ID NO: 70487 - DNA, 357 bp, Acinetobacter baumannii
atgaaaaagtatatgagcattattgcagtggcatctttttcgacgatgctgttggcaggttgtgaaaatatgagcgcttctgagcaacgtattgggacagcggctttaggcggtgcagtaggtggtgctgcggggaatagcctcggtggcggtgtaggtgcagccgttggtggtggtgctggtgcggctgtgggcagtaaagctcaaggtggatcaaaccgtaatgcaacctacagtggtgttggcggtgcgattggttcagcagtgggtaaaagtgtgtttggtggtaataccggcgcagccattggtggtgccatcggcggtggtgcaggcgctgcaattgaagaacgtaaataa

SEQ ID NO: 70488 - DNA, 318 bp, Acinetobacter baumannii
atgcctcgtgtgatcaagtcggatggcaaaagtgaaccttttgatgaagcaaaattgcgtcgttccttgatgcatgctttacaaaaacgtcccgtgacacaagagcaaattgaaaccgtcttaagcgatattcagctgcaaatccgccgtttaggtgagcgtgatgtgaaatcacgcaccattggtgaaattgtcatgcaatctttattttcgttggatcatgttgcgtatgtgcgttttgcatcggtctatcaagactttcaagatgtcgatgcctttcgtcaccaaattgaacaaatgcaacaacgtgaacattaa

SEQ ID NO: 70489 - DNA, 399 bp, Acinetobacter baumannii
gtgattacaccagcagcagggtttgtgactgtcggcggtgcactggcgatgggtttaatcggtggtgtggtatgcttctggggtatcagtgcattgaaacgtgctttaaaagccgatgactctttagatgcgtttggtttacatggtgtcggtggtattgtcggtgcaatcttaacagcattctttgccagcgatttcatcatgggcgacaaagcaccaagtgatgtaatgcatcaactttgggttcaagttgaaggggtattggcaacgattgcatactcagcagtattaaccttcatcatcttgaaagtgattgatctggtgattggaattcgcgttgaatctgatgatgaacgtatgggcctagacttgagccaacatggtgaacgtgtggactaa

SEQ ID NO: 70490 - DNA, 378 bp, Acinetobacter baumannii
atgatgcaagacaatgtaactaagtatcgccgctctatcgcgatttcttatgtcttcatgtttttggctttgtttactgtgattagcggcgcattttcctactggtatgcccgaaaagtcacgcaaattgatcatgccgaagtgtggctacaagcgcaagcactttgggtcatgcgcaatattgtgatttatagtattttggctttatttgcagcactgtggtttattcctcttattttcttcacttgggacagcgcattatgggtgactgcatgcacggttgcaggtgtggtttttagctgtattgcatttctcttccttctaaatgcatggtttaaaggcctgtctaaatttttgaaaaataaagcagttttctaa

SEQ ID NO: 70491 - DNA, 402 bp, Acinetobacter baumannii
  misc_feature (260)..(269): n is a, c, g, or t
atgacagtagcagccgtaccaaaggcaattcccatcaccccattacccatatgcaccatacaagacaaggttctatcctgtagcagtttttcacgcattgcttcatatgacgataagaacatccagctttgcatggtcaccatgctattaaaaccgctgtccttacaccaatcgaaaccacgttcaataaacatggcaaacaggtctgacttgctgtctgggaattgctttttggcaaaatctttcagtgctgcattcannnnnnnnnnaaataaacggcggtcatcctcacgtgctttcatcaacagtgcaaaactcgccaactgtgcagcacgggtatcaatatcaatgccgtacaggttgttttccagaatcaaacgtggaatatcacgactccggtaa

SEQ ID NO: 70492 - DNA, 780 bp, Acinetobacter baumannii
atgcaaaaatcaaaaagagtcattagttttattatcgggtcattactgttcgcagacggcttgtattttgttttacaactacgctttaattttggcaccctcttgcccttattgattggactaggtctaatcatttatgcactggcttatcctaaacttattgcctatattcaaagcaatacaatcagacaatcaatatggcgttgggcttgggcgattttctttgtttgggtttttagcttagtcattttcttcgtctttttaggcttttcaaatcaacaaaatacccctcatgtcgctgcacccgctattgtagttcttggcagtggtctgaagcatggcaaaccgagtccaacattggccaaccgtttagatcaagcggcaaactatgccaagctacatcccaacagcattatggtcgtcagtggtggcctatcttttcagcaaaaaaatagtgaagctgaagcaatgcgacaatatctgattgatgtacaccatatcccagcacagcgtatttacaccgaagatcaaagcaccagcactgagttaaatctgatcaatagtaaaaagattttagccaagcagcatatttccctacagcaaccgattgctattgtgaccagcgattttcatatcccccgtagccgtgctatagccatacgtcagggttatcaaacgcctatcatgatcagcgctcagacacctcttgccactcgctataatgcatggttacgtgagtattttgcatattggagtggttggctactcaatgaatactaa

SEQ ID NO: 70493 - DNA, 258 bp, Acinetobacter baumannii
ttggtaaaagataattgggcgggctacgaaatccagagtattggtctcagcgatttagtcgaaaaagtgattccattcttacgttcagaaaaaactacggtctctatgaacttaagccccgaagggcaaaatgtcttggttgcaccagaaaaattgttattagatatcaaaaactatttatatcaattttcgatgcagaagcctgaattatttaaacaattacaattaccgtcgccacggacaatccgtcttcattaa

SEQ ID NO: 70494 - DNA, 858 bp, Acinetobacter baumannii
atgatgacccctcaaaaacaaggctatgtatttattgccatcaccatgtgtatttgggggggatttaccttaacggcgcggctcagtgccaattggggtattggtgcgtgggatattaccgccttacgttttctcttggcgttttgcatcttaatgccaatcttgatctataaaaaagataccgcctttttgtggaagaaagagccttttattttggcgatgattggtggggtgtgttactgcatcaccgcttatagcgcttttcattatgtgcctgcggcacatgctgcgatctttctcaatggctgcattccgctttgcacagctgttgcagcttatctgctatttcgacaaccgtttgaccggcatacttggctcagtctcagtattatgttgctcgcactgacggccatgagtgggctgatgtatcaagaaacaggtattgctttattgagacaatggaaactgtcggcatggcactccatggcaggtgttgcgatttgggctgcgattatttttgtgccgatttatgttttattcctacccaaaaccatagcgcatgtgcaacctgtgcaattgattgctcaggtggtatttcatggtgtgttcgtagtcatcgtggcgacactcacttatgtggaagccattaagcgtttgggggcatttaaaacaggcagtattgtgacgttggcgccttttattgctgcgattattgcggttcctttgctcaatgaacctttgagtgttgcgattttatgtggtcttgtaggaatggggataggggccttgcagccatggcgttggatacggcaggacagtttgaaagcccaactcgcacaacaaaaaaagcagtcataa

SEQ ID NO: 70495 - DNA, 273 bp, Acinetobacter baumannii
ttggtttcaccactactttttgaaaccaatcagcatgaactgacgcaacatacgcttctgatcgatgcttcaattgatatccaggttcttcgtgcttcgcagcgcgaccatcaaaccattgagcaaattcaaaccatcattgaaacgcaaatgtcccgtgaacaaaaacaagcgttagctgatgatattgtggtaaatgatggacacttggaacacttatacgcacagctcagaccattgcatttaaagtatttggcccattcagaagtctaa

SEQ ID NO: 70496 - DNA, 195 bp, Acinetobacter baumannii
atgcaaagacattggtcggctgtatttataacattactgtttatttcaacatcacaaagcgtactggcacaaagtttagacccagcttatctgacattcggtggtggtctcattctcctgctaatcctaacgttttatgtgattaaacaaatcagtatttctattcgtattcatcgcaataagcccgttaaatag

SEQ ID NO: 70497 - DNA, 615 bp, Acinetobacter baumannii
atgagtaaatatgtaagcattagcgttgcagctaaaacattaggtgtttccattcaaacattaaggcgttgggatgaagaaggcactttggttgcagatcgaacccctaaaaatcatagacgatatgatctgagtaagatcacgcctgagcaaatacacaagcccgatagtcaacttcaaaggaaaaccattgcatacgcaagggtatcgagtcatgaccaaaaagaagatttaattcgacagcaacaagttcttgaaatgtactgtgcaaatcaaggttggacgtttgaattaatctccgatcttggttcgggtatgaactatagaaaaaaaggcttaaataagctgctagaagcaatcatgaatgatgaaatcggacgtttggttttaacgcataaagatcgcttattgcggtttggtgctgagttggtttttgccttatgtgaagctaaaagcgtggagatcgtcattcttaataagggtgaaaatttgtcttttgaggaagaacttgctcaagatgttttggaaatcattacagtgttttcggcaagattatatggtagtcgtagtaagaaaaaccaaaagttaatacaggcagtcaaagacgcactatga

SEQ ID NO: 70498 - DNA, 405 bp, Acinetobacter baumannii
atgaaaaaacagttcattcaaacttctctaatgttcgctgcaatgttgggtatatccaccaatctctgtgctgaaaacttaagcgcagcggatattcagcgacacaaagccaccaaccattacaaagcttaccttcccgcaaaatatacggtgtttgaggtcgtacaaggggacttaaacaaagatggtttaaaagatgtggttttaatcgtcaaaggtacagatccgaaacaatgggtcaccgatgaataccgtggaaaactagatcgtaaccgccgtggtgtgattgtgctgttgaatgcaaaagggcgctaccaaaaatttaaagaagcatggagcaaagtgaatgttgctccgatgtatttgagcaaaattcaggacatcgacgatctgagttttgaatag

SEQ ID NO: 70499 - DNA, 393 bp, Acinetobacter baumannii
atggaacatgaacgagaacaaagagttaaacgtacacaaggtgattatagctttgcctttaaaatgatggttgtacatgaagtagaaaaagggcaaattacttataaacaagctcaggcaaaatatggtattcaaggaagatcaactgtgcttacatggttacgtaagtacggacaacaagattggacttctaaagctatgccgccttcttctaaacgccaattaacaccccaacaacgaatccgccaattagaaaagcagttagccgcagaaaagcttaaaactgaatttattcaggatgtgatttatcacattgataaagaatgtgggactgatcttggaaaaaagtataccgagcacgtttcaaagattggcaaagccaaagaggactaa

SEQ ID NO: 70500 - DNA, 438 bp, Acinetobacter baumannii
gtgttctctgccaaaggttattattatgaaaatgcacagcaatttgctgaacattttcaggtttttgcggacgctattcacaagcgtcaaaaaatcagttttatttataatgatcgtttacgccatgttgacccgtatcgtttaattcatcatcagggaagttggtatttggctgcagctgtagctgatgaattacgtgcttatcgtttaagtaaaatagagcaagtgattgtacatgagtcggagcttttcgaacatcatttagaagttttgacccaattagagctcagtgaagggatttggtttgcaaagcataagcaagcggtgaaaatatcggtccggcctgaagttgctttatattttaagcaacgtctgttattgccagagcaacaaatcgtactagaagatgcatcaggtggtttattaattgattgttaa

SEQ ID NO: 70501 - DNA, 276 bp, Acinetobacter baumannii
ttgctcagttcggcaggtgcaacagctggtaccgtcggtggtgcagcatctggggcctctattggcgctgcgatcggtgcagcggctggacctcttggggtgattatgggtggcaccattggcacttttgtcggcgcggtcagtattggtgtaacaggcggatttttaggacatcgttttggtaaaaaagcgggtgtgattgtcgataaaaatatcttccttgactataaatgtctcaagtgcgggacaaaatttaaagaacagcatctgatctga

SEQ ID NO: 70502 - DNA, 450 bp, Acinetobacter baumannii
  misc_feature (434)..(443): n is a, c, g, or t
atgaatggcacggtcgatggacaagatgtttttatcccactcaattggattattggtggggtggaaaatgcaggtaaaggttggcgcatgctgatggaatgcttagccgtaggtcgtgggatttcactgccagcgctctccactgcttcagctgaaatggcctatttaagtgtcggtgcttttgccaaagtccgccaacaatttaaaatttctgtaggacattttgaaggcgtgcaagaggccaccagtgatattgccagtggtacatatatgctcgaagctttccgctatatggtcacttgtggtttaaacgaaggcggcaagcccgcagtgatgacagccatggccaaatactatgccaccgaaaccatgcgtaaaattgtcaatcatgggatggatgtcgttggcggacgggcagtacaaatggggccgcnnnnnnnnnnattttaa

SEQ ID NO: 70503 - DNA, 588 bp, Acinetobacter baumannii
  misc_feature (562)..(571): n is a, c, g, or t
gtggcacgtcagggacactttcctcaaactttagaggactggattgaactgccaggcattggtccatctaccgcaggggcgctgatgtctttgggtttacgtcagtacggcatcattatggatggcaatgtaaaacgcgtgctcgcgcgtttttttgccattgaggatgatctaagcaaacctgtgcatgaacgcagcatgtggcaactggccactaaactctgtccaactgaacgtaaccacgactatacccaagccatcatggatttgggggcaaccgtctgtacccctaaaaaaccactgtgtttatactgcccaatgcagcaacactgtaaagcccatgcacaagggctagaaactgaattgccttttaaaaagcccaagaaagctgtgcctgtgaagtctggccaagttttggtactgcgtcatcacaatcaatggctgtggcaacagcgtcccaatagtggactgtggggtggtttatggtgtttacctatttttgaaaatcgtgatgaactcacgcaactgtgccaaagtctaggactaaaacaagtctcgcaannnnnnnnnngtctcgcaacgcgctga

SEQ ID NO: 70504 - DNA, 282 bp, Acinetobacter baumannii
atgaaacttaatacactcttaatgtcagcaacattagcaacggcatctatgtttactgcaactgcgtatgcagacagcacaactcgcgttgcagcagccagtgctttaggtagtgttgcagggacagcaataggtaaaaacatgggcggcaccaatggtggctatgtgggttctgcattaggtgcagcgggcggtgcagcactcggcaacaaaatctcaaaagataaacagtatgactcttaccatggtaaaaaatggaagaaaaaacataaacaccattaa

SEQ ID NO: 70505 - DNA, 672 bp, Acinetobacter baumannii
atgggatggacgacgtctcaggatccttaccggcctatcaggatgacatttccagatcgcgacagcgctgtcgactatgccctcaagaacgattggcgctatatcgtgcgtgaagatcgtccgcggcgcatcggaccaaacccttgggcgggcacaagcagtcatcagctttatcgcggggtcgatacttccaaggaagggtgggttcagatggggcaaccgacgatgtcggagcatcacctcccaaaaggatacggcgcatccgaaaacacgggaacgccgcagaaatcggaggctgagtttctcgatccagttctggaggctgccatcgagtcctttccagcctctgatccgccggcgtggattggaacgacagaattcctgattgcgggtgcgaccctgatttcgggcgcattcattgccgttgccatatgctcccgtttaggtgttccttcgatcgttggttttttgcttgcaggcatggctttgggcccgcacggtctcgagcttattgatggtgaagcaacccttggcgctatcggtgaattgggcgtgatcttgttgctgttcatgctggggctggaattctcgcttggcaagctgatggagctgcggcggctgatcttcggtgtcggtcttttgcaggtcgccacaacatccggtcgagtatag

SEQ ID NO: 70506 - DNA, 684 bp, Acinetobacter baumannii
gtgggcagtatctatgccagtggtaaaacgcctttccagcttcagcaaattgccttgaccttaaaagaatcggacattcgagacttaaccctcaactcccaagggtttgttcaaggtcaaaagctacaagactatgtcaacaaacacgtcggcaacaaaccaattcaacagttccctatccgctttgctgcggtggcgacccgtcttgacactggacgtaaagccgactttatcaaaggcaatgcgggccaagcagtacgtgcttcatgtagtattccgaacgtttttgtccctgcggtgattggtggaaccaaatatgttgatggtggccttgttagcccaattccagtgaaaacagccaaagatatgggcgcggatattgtgatcgcgattgatatttcagcgcgccctgtcggcaacaaacccctcaatatgtggggcttgctcgaccagaccattaatattatggggcagcaaagcatcaatgaagaattgagccaagcgactgtggtgattcaacccaaagtcggacacttgggcactttggacttaaaagccagcaatcaatctattttagaaggtgaaaaagccgcgcagctcaaaattaaatcgattgaaaaagccattgtcgattttaaaaagacccctgctgcctttaaaccagcccctaaagccaaattctaa

SEQ ID NO: 70507 - DNA, 591 bp, Acinetobacter baumannii
atgcagcaaggtttcttctctgtacagcagacctgtagtacctgtcgcggtcagggcaagatcattaagaatccatgtaatacctgtcatggttcaggcgttaaagaccgtcaacaaaccttagaagtgacgattcctgcgggcgtcgacaacggtgaccgcgttcgtttaacgggtaaaggcgaagcgattcgtgatggtcagtcaggcgacttgtacgtagaagtggtggtgcgtgagcacgaaatcttccaacgtgatggtgcagacctgtatatggatgtccctgtgagcattgccgatgctgctttgggtaaagaaattgaaatcccgacactcgaaggtcgtgtgagtttgaaaattcctgaaggcacacaaacaggtaaaatgttccgtttacgtggcaaaggggttaaacctgtacgtaccagtatgcaaggtgacttactctgccgtatcgtgattgaaacgccagtcaacttaacagcacgtcaacgtgaactgttgaaagagttgcaagaaactttagatggagatgatcacaaatcatcaccaaagaaaaagtctttctttgaccgactgtttgattaa

SEQ ID NO: 70508 - DNA, 432 bp, Acinetobacter baumannii
  misc_feature (350)..(359): n is a, c, g, or t
gtgattccttatgtcgatgaagtggcttataaagtgacgaccaaagacattgtattagacattccctctcaagaagtgattacccgcgataatgccgttttgctcatgaatgcagtggcctatatcaacatcaccacgcctgtaaatgccgtctatgggattgaaaactatacatgggccattcaaaacttagtgcaaacgtcactacgttcaatcgttggtgaaatggatcttgatgatgcgctatcgtctcgtgatcacattaaagccaaacttaaagcagccatttcggatgatatttcagactggggcattaccctcaaaaccgttgaaattcaagacattcaacnnnnnnnnnncaaccctcttcaactatgcaagccgcaatggaagcgcaagcggcggctgagcgtcaacgtcgtgcgaccgtga

SEQ ID NO: 70509 - DNA, 405 bp, Acinetobacter baumannii
atgatttataccagagcaggtgaaatttcacatattctcttatttgaaaattgtccaaccctaagcgacaaacaaaggtgccctttgaaagcatggctgaccagtctaaaacaggctacttataatacaaccttcatgtataacctccgcatggtcattacctttgcaggaactgcttttgttccatattttatgggttttcaactggcaactattccgctgacactcggcgctgttgctgcgggtttaagtgatattgacgcacccaattttattcgcattggggctaatcgtttcgtgtattggtctgattttactgggctcactgggacgtcgttatgccaccatttcctatggttgcttagtggtttccgtttactccatgctcggtgtcggactttttga

SEQ ID NO: 70510 - DNA, 429 bp, Acinetobacter baumannii
ttggaagttacacaaaactgtccagaacatatttataactacttgctagatgaatttgatctgcatcaggagcagttgtataaagtcgaaggacctgtgaacttggcgcgtttattgtccaattttaaacgtccacatctacggtatgacgcacatattcctgttattcctaaagtgttgaaaaagtcggaaagcatgttctctgcaatgcagaagcaggatattttactacatcatccgtttgagtctttcgcacctgtgattaacttgttgcgtgaagctgcacgtgacccacaagtgttggcgattaagcaaaccctctatcgcagtggtgcagactctgaaattgtacaagtcctagcagaagcggcgcgtaatggtaaagaagttaccgcggtgattgagctgcgtgcgcgttttgggctataa

SEQ ID NO: 70511 - DNA, 348 bp, Acinetobacter baumannii
atggtatctggttttgataccataaacgttaaaggatgtgagtccaacaataaactggaaaatactacagactgtaaaagtgcaaaaggtttactccaaaattatggaagcctcaactatattccagataattacagatatcaaaatgcgataaatattaaacaacttgcgctatctggaaaattagatgttctaaagtctattaaactctatagcacatggtcttcgtctatttacaaaaaagccgagtcatacagtaggtctagtcaagaattatctcgtgtttacgcactattgctgttctatgaggatgtaacagggaaagttgttaatggtattaaaaactaa

SEQ ID NO: 70512 - DNA, 477 bp, Acinetobacter baumannii
atgcaggcatcaccgcaaaccatcaccttgatgttggtgttaatcggaattggtttctccattggtaatcatttgggtggaaagtttgccgatctatccctagagaaaaccctgattggcttccttgtacttttgatggtgatgatgcttgttttcccagtattagcacaaacaaccgttggtgcagcgattggcttggtgatttggggtgcggcggcatttgcggtagtaccgccactgcaaatgcgcgtcatgtcggtcgcagcagatgcgcctgggcttgcctcttcagttaacattggtgcctttaacttaggcaatgccttaggtgcctttgcaggtgcaacagtactgagtatgcaactcagctatgcagcggtttcgtatgcaggtgccgcactcagctttatggccttgatcttggtcttactgcaaatgaagttcggtcttagcaagaaagcttgtgaagccatttaa

SEQ ID NO: 70513 - DNA, 414 bp, Acinetobacter baumannii
gtgggtacaggagcaactttacccgtgttggatcaatcgattgatttatgtagtagtttgtttagcccgattccaatacaagagattttaagggtactcaaaccgcaaggatatttgttggtggtgacgcctgcgcctcagcatttatatgccatgcgtgaggctttgttcgaagaggtgaagccgcatgaaccgagcaaatttgtagagcagttgagtgatgcgtttgatttggtgagtgatgatgttgttgatgctgatcttaagcttaatcagcaggacttaaaaaacctgattgccatgacaccttatgcctataaggcgaaacaagagcgccgtgaagctttagaggctcaaacagcttttgaactacaggcacagtatcaaattttactgtttcagaaaaaagcataa

SEQ ID NO: 70514 - DNA, 189 bp, Acinetobacter baumannii
atggcaaagaagaaagctgagccaaaagttgtgattcacaacttcgtggctaaacatatgcatgaagttaaccaaagccaagtctttgtagaccgaaagaaaaatgcaaaacgaggctatgacaagcacaaaaaagggagatattcagatgattatctcccttttttaatgtccgttctttgggtttaa

SEQ ID NO: 70515 - DNA, 273 bp, Acinetobacter baumannii
atgtcacaaacaacgatgcaacaggtcattattacagagccgggtggtgtggataagctggcatatgaaacagtgactatccctaaagcaaaagcagatgaggtcttggttaaggtccatgcgtttggcattaaccgtccagatattttacagcgtcaaggtttatatccaatgccgcctggggtaacacaagtgccggggcttgaggttgcaggtgaaaactttacatattccaaaaaatgtaagctttgtggaagcggcggctattcctga

SEQ ID NO: 70516 - DNA, 228 bp, Acinetobacter baumannii
gtgaaaagctcggctgatgtagctacgattgaagaagtggaagtcgttgttgctccagttcaagccaaagcacctagagcatcaaagcaagctgaaaaagtagaagcgactgaaactgtagcggaaacagctgcggacgagtcggataaatcagactcggacaagccagttcgcccacgtcgtccacgtggtcgtccaccgaaaaaagcgagcccgactgagtcgtaa

SEQ ID NO: 70517 - DNA, 390 bp, Acinetobacter baumannii
atgcctgcacatgtgatttataaccaagttgatccaaacccagcaggtttttcgccgtattggattcaaaccattctacgtcaacaactgggctttgatggggtcttattctcagatgatttaagcatgcaagccgcatgtgttgcaggcggtgcagatgcccgcattcaagccgcactccatgcaggctgtgacatggggttggtgtgtaatgaccgaactgccgcatgtgtggctttggaggggatcagccaactggcgctaccaaaccaagctcgcttagaacgcatgcgtggtcagattccaaacgtcaacgttcaatcgacgctgcatttaggtgaagattgggccaaagtacgcgaccaagtggaactatttagattaagttaa

SEQ ID NO: 70518 - DNA, 171 bp, Acinetobacter baumannii
atgatttgtgagatcaatcaccgcaatgagccagaagaattggtctttatccgtattgaccctgcccaaaagaaaaatttacgcatttcgggaagaatgctgatagcaacttatcccaaagcaccatcggtacgtgaaatgcgtaaagactttaaagactatgtcacttaa

SEQ ID NO: 70519 - DNA, 276 bp, Acinetobacter baumannii
  misc_feature (258)..(267): n is a, c, g, or t
atgtcggctttggagtggcaaacttattgtttaaatgatgccaaaattctgtcgcgtcagcaccgttttagcttccatgaaacgccagaacaacctagtccagaggcattgagccaagcggaaaccatcttgcggcatacgccgctgcgtgggcaggactttttgtatttgcttgaagatgtgtttcacatgctgtggcaaaaacaagagggtaagctgcgcaccttatatgcgatggccagccgtcatcatcaagannnnnnnnnntaccgataa

SEQ ID NO: 70520 - DNA, 288 bp, Acinetobacter baumannii
  misc_feature (242)..(251): n is a, c, g, or t
atgattcaagcggcacaaaataatccagcccaaccgaaaattttaacttattcaaccacgcagcctgcagactatctggtaaagaatattcaatatagcctgacgggtgcaaactttagcttgtgtacggcacaggccgaatatcaggtacagaacccattattgggtcattttaatattgaaaatttggtcgccagtttaattatggttgaacaagcgggttttgatttagccgatgtggnnnnnnnnnngcacagctcaagggtgcgccaggtcgtatgcaagtga

SEQ ID NO: 70521 - DNA, 438 bp, Acinetobacter baumannii
atgcacatgggctgcttgaaggtgcagtttgggcaggggcttgttgagcgacttgttgttgtggcgcgttgttacgaggttttttgttgcctttttcttgttgtacaggcgcaggagcggcatgttgatgcacatgatctgcaccatctaaatgccattctgatgactcgtaacccaactctttttcgcttgaacgtgttgcttctgtacgttcatagctggttggtgcaaagccttcagggttatacgaaatttcgtaatgcggagtttctaagtgtgggtgcggaagcacagtcacacgaacacctgaggtttgttcgaggtaaaccaacgtgtgacgcttttcattcaataagaaggctgcaatttcaacaggaacctgtacttgaacttcaccatgacgttcacgcagcgcaatttcttctactttacgcatga

SEQ ID NO: 70522 - DNA, 363 bp, Acinetobacter baumannii
atgtctgtgggtcatgcttaccgtgcaaaacgtaatggtgaagtgatttcttatgcaaaaaatcattttgattcattgttaaatgtgactgaagctggcgcgcaataccgtcgtacaggttctgcagcattagatttggcatatgttgcagcaggtcgtttcgatgcgtacttcgaacttggcttaaagccttgggatatcgcagctggtgagttgatcgtgaaagaagcgggcggtacagtagttgatgcacgtggtggtagcgaatctatggaaaatggccaagtactggcatgttctatgaaaatgttgaaacctctgatgaaagcagttgtacctgcttggggtgaagctgctaagtaa

SEQ ID NO: 70523 - DNA, 513 bp, Acinetobacter baumannii; identical to SEQ ID NO: 50974

SEQ ID NO: 70524 - DNA, 513 bp, Acinetobacter baumannii; identical to SEQ ID NO: 50974

SEQ ID NO: 70525 - DNA, 477 bp, Acinetobacter baumannii
gtgggcgtaagcattgaaacagcctgcgcagccctgtctaactttggcggtgtgaagcgccgtatggagcttttaggcacggtacgtggcgttgaagtgtatgatgactttgcccatcacccaaccgcaatagatacgacgctggaaggcgcacgtaagcgtttaggcgaacgtaagttgtgggcgattattgaacctcgttcaaataccatgcgcatgggaagccataaagatggactcgcacactctgcacgtttggccgatgaagtgatttggtatcaacccgaaggtttggactgggacttgcaacctgtcattgcggctgcacccaacaaggccgtggtcgcacgtacattagatgatattatccataccatcgtcagtgatgcaggcgagggtgatgcggtagtaatcatgtccaatggtggctttggtggtttacaccaaaaattgattagcgccttgaacgcagaataa

SEQ ID NO: 70526 - DNA, 420 bp, Acinetobacter baumannii
atgacggacttgagcaacatcactctacaacccactgaagatggtatggttagcctgttgattgaccaacagccgatttcagaaaaatatggaatgaagtttgaagccagtattgtggaggaacttcaagccctggaaaatggcgccacactgaaacttttcgaccagtttgtttttgcccataccgacttgaactttgaacatagctatcactacgtcacggtcattgctaagaatgatgaacaatataaagcaaagaaaagctttgtttatcgcatcaaaattgacggtcagcccgacattgagcatgccatcagcaaaaatggtgaaccgatgactgcagccgatgtacgtgaatttatccaagcgcatgtacagaaatcattgactgattataccgacctcaactacgcctattga

SEQ ID NO: 70527 - DNA, 216 bp, Acinetobacter baumannii
atgcgtcctgaagtccgtcgtcgtggtattgtgctaattgtttttgcaatcgtacaatggtttttcatgcgctatattctagacaatcaattatttaatttaaccacctatgaccgtattgtctttttctgtgtaagtagcttggcaggtgcttttgtcatttttgtcggtttgatttatatggtcttaaaaggcaatgctgatacgcaagactaa

SEQ ID NO: 70528 - DNA, 324 bp, Acinetobacter baumannii
atggcactctttatcactgaccatgcagtggttgagctggggcaacagctgttgttcattgtgctgtggtccattttattctttggtgccagtgccatttttgcctccattatgcgggccagcggtacagtcaccatgcccatgatcatcaatatcattgcgattattgcgattgaagtgccctgtgcctacttatttagtgaatggtggggactgcaaggtatttggtatgcttatgcactggcctttgtcagcttatgcattatgcaggggctttattatcaatttatttggaagaaaaagaccattgaaacgctcatttaa

SEQ ID NO: 70529 - DNA, 261 bp, Acinetobacter baumannii
gtgcgtttatctgatttaaaagtcaaacaaactgccatcattaacaaagtgaatcatactttggatggcgaagctcagactgatttggtggctagtcgtcttgaaacattaggctttgtcgcaggtacaaaagtacaggtgattaccaaaggtgtttttggtggcgatccaattttaatccaagtgggttttacacgtttcgccttaagaaaagttgaagctgaaaaaattgaaattcaagtcgaaggagcacctagatga

SEQ ID NO: 70530 - DNA, 249 bp, Acinetobacter baumannii
  misc_feature (224)..(233): n is a, c, g, or t
gtgttgaatcgtgttgcggcagcatatggtgtgcctgcggagaccgtggttgccgtgtggggcgtggaaagtaattttggcgatatttcaggtaaatatccattattacaagctttaggcacattgagttgtgaagggcgccgccaaagctatttccgtggagagttttttgccgctatgcgtattttacagcgtggcgatttaacggagccacaactgaaagnnnnnnnnnngcgatggacgccgtga

SEQ ID NO: 70531 - DNA, 390 bp, Acinetobacter baumannii
atgccgccacatttggccttagaaaaattggccgccttgattcaggagttggatcaggtggtgctggtaggcagtagtttaggtgggttttatgcgacacaactggtcgcgaagttggcagtgccggctgtgctgatcaatccagctatgcaaccatggcatttgttccgaaatctatttggtgcgactcaactgccctatagagtagatgcagacaaaattttagtgttattgcaacaaggcgatgaagttttggattatcgtgaagcacagcgctattataatggcgcagcgctcgtgatctcggaaacgcaaggcaatcatgcgatggaagatttcgcagacaaaataccgatggcattacagtttttatcggactgcttaaaataa

SEQ ID NO: 70532 - DNA, 276 bp, Acinetobacter baumannii
gtgatccaagtcaatggtggttcgcatttacaacccaaaattacagctacgggttgtgcccttggtgccttgatcgcagcctatagcgcagtcaccaatcctgtcattgcagcgctgtctgcgcatgtccactttgccattgcggggcaacttgcttatgcccgaagccaaagcacaggaagttttaatgtagcgtttatggatcacattcatcaaatgaaggctgaaaccatttatgaatatgcagatatacagcttatccgtacctcagcctaa

SEQ ID NO: 70533 - DNA, 363 bp, Acinetobacter baumannii
atgcaccatatcgaaggcagcattcgtaccttacagcggttacgtgaaatggggattcgtttggcgattgatgactttgggacaggacattccagctttttatatttaaaaaacctacctgtagatgagttgaagattgatcgtggttttattcatgagctgaccgttggttcaaaagatgaaatgatcttagaaagtattgttcatctggtcgtgacagcagaaggtgtagaaagtcccctgcaaatggaaatcttgtcgcggttaggctgtcagcaattacaaggttatttgttgggcatgcctatggatgttaagcgcttagaagaatttgagtacacatcgtcaacttatttcaattaa

SEQ ID NO: 70534 - DNA, 243 bp, Acinetobacter baumannii
gtgaccgataaccgctataacatgttctatcagcctgaactgaaccatgacatgcaggtacaggcgaaggatgtctcggcagagtgtgaatacattgttatttatgacccttactgccctgaagaccgtgcgcattatgaaaaattacaaacggtcgtgccgaatctgaataccctgcacttaccttttacagggcatgatgcgattgcggttttggccagttactcagcaatcgacaagtga

SEQ ID NO: 70535 - DNA, 336 bp, Acinetobacter baumannii
gtgcctgaagagcagcgcgttgatgccatgtatcggattttgaaagccgtttggacccaaggcaaagatttatcctttaaatcgcattttgatcaactgatgcaagaattggaaatcacagcattgatcaccgaagatgtagaagccaagcttcaagaaaatgacatgctctgtgaaatgaagtcccagcctgatttccccgtgattgaactgcgtgtggatgggcagagctatgtctttaatagtttgtatcgcgtctggatgattgaaagtattttcagtaatgtgctggaagatcaatataaaaccgaccctgtggatgaaagcgaaggctga

SEQ ID NO: 70536 - DNA, 366 bp, Acinetobacter baumannii
atggcgggcgcaaaacgtgtgatttgttgcgatattgatgcagttagtttagatgcttgccgtgccaatgcagaacttaataatgtagagctagagtatttggatgacttgtatcaatctgaacaggtcgatgttctattggctgctgatgttttatatgatcaatgcaatcgtttctttttagatgaatttttaaagtttgcacctgaagtttgggtggcggatagtcgtgttaaaaattttagccatccgcaatacatgaagctcgatgagcgtagtgccacaacttggccagatctagatgagtcaccagagtttcgtaatgtgagtttttatcgaactttagagactcaaaaaggacactaa

SEQ ID NO: 70537 - DNA, 132 bp, Acinetobacter baumannii
atgatgagacctttaaataatcactgcttgattgatgtgatctacccaattggttgtgtcgcattttgggcgaggatgacccgattttttgtcgatcgtatcgatcaagttgagaagactgaagttgcttaa

SEQ ID NO: 70538 - DNA, 216 bp, Acinetobacter baumannii
gtgtattacaaaacacgtccagagttacatgtaaaatcgacctttaaactaccaggtggtctgtttacctgttggtttgtgattgttttcttcattggcgtgatctatgtgttatcactagaagccgataccatgaaagctttaatggtgagtccaatttggttcatcattttgattattggttattttggtttctacaaaccgaaacataaataa

SEQ ID NO: 70539 - DNA, 156 bp, Acinetobacter baumannii
atgcgtgaaggcttagctgcaaaccgcattgactggttggcgggtatcatcaatggcacaggtaacttcattctgactgaaatgcgtgaaaaaggccgtgcttttgcggatgtgctcaaagaagcacaagaactgggttatgccgaaaacacttag

SEQ ID NO: 70540 - DNA, 324 bp, Acinetobacter baumannii
atgcagggcttagacattcagtctgaggctgagctgtacgactatgtgcgcagtttacccgccaaatatggttgtgctgtgctcatggtttcacatgatttgcagtgggtcatgcaaggaactcatcgtgtggtgtgtttgaataaacacatttgttgtagtggcctgcctgaaagcgtgcaacaacaccctgagtatcaagccatttttggtaccaaccgcgtgttctatcaacatcatcatgatcactgcgcacatggtgatagtgcaacgccttgtcagcatgacgctcgcccacacattcaccctgaaccggaagcttaa

SEQ ID NO: 70541 - DNA, 291 bp, Acinetobacter baumannii
gtgcatcgcagcattgtacgcttaggcaaggtcttttcggaaaaacaacgccctggcttttcaaacttaagttatcgccgtgatacatggaccatgaataaagagcgaacagagttgattgtccatcgtaaagaggggattaatttttattatcgcgtggtggattcgcaaacgctgcaaatggatttggataaaagtaataatctagatgccactaaccaaaaattgtatgcgcgaggttttccgaaattagagcgtgcgtatacgttaaagcgtgagcctaattcatag

SEQ ID NO: 70542 - DNA, 192 bp, Acinetobacter baumannii
atgtcagtaggagtaggatctaatggtgcagagcaagataaggcaataaatgcaggtttattcggtagtggtgagcgatcattccctggcttagcatcaattaagcgaatccatttggatacaagatttgtattcaatccatgttgcaaagcgaccgaagcaattgaaacctccgatgctttacacgcctga

SEQ ID NO: 70543 - DNA, 369 bp, Acinetobacter baumannii
atgctcgtattattagtgatttttatggtcaccgcacccatgattacgagcggcatcaatgtcgatcttcctcaggccaatggcaatcccattgaatcaaaagatgcacctgcaatggtcagcttagataaagaaggtcgctatttccttaaatataaaacacaccgttcagctgaacctttggctttatctgaattgacgtctattttaagtgaagcacagcaacaagctcaggctgacaataaaactttaaccgttgttgtggaaggtgaacagtcacgctcttatggcgaagtcatgtcgctcatgaacagcctacaagaagcgggtctcagccaagttggattactcacagagccattaaagtaa

SEQ ID NO: 70544 - DNA, 216 bp, Acinetobacter baumannii
ttgccatcgatcatcgtggtcggtgcaatgattcaaacggtggggattcctgcaatcggtgttgatgcgaatgttgcattccaaagtgtgaatgtggtgagcatcttaggtgcaattgcggtgttcttagcaagtatcaatattttcggtggcttcgcagtaacagcgcgtatgcttgaaatgttcaagccaaagcaaaagaaaaaagagggctaa

SEQ ID NO: 70545 - DNA, 249 bp, Acinetobacter baumannii
gtgattaagttgtacggttcaatggaacttgcaccgttggtgggtttgggcgattatattgttgacgtggtcgatactgggaatactttacgtgccaatggtttagaacctttggaagaaatttgtaaagtgtcttcacgtctgatcgtgaacaaggcaagtttcaaacgtaagcaagcactgttaaacccaattcttgcacagttagaaacagcagtcgctgaacgtgaagcgttaaaaaacaaataa

SEQ ID NO: 70546 - DNA, 264 bp, Acinetobacter baumannii
gtgaccaatcacacgtataccttccgataccaagaccgtgcatttaaactgattggttatgatgtcaacgatttccaccgtgcatcaggcgacatcacggcgcgaagtatcaactttatgacaggtaaagtaaaaagtacgacaggtgaaaatgagtttgctgaaacaacacaacctgtcaaagttcaatggacaacactcaaacagcgctacgcattgaaactcgaacaggttcagtttaatgaagcactggagtttaaataa

SEQ ID NO: 70547 - DNA, 207 bp, Acinetobacter baumannii
atgttacttgaacgttttgatggcggccctggtggtgtagaagccctggcagctgctatggctgaagactcaggcacattagaggacgtgattgagccgtatttgattcaacaaggttatgtcatgcggacagcccgtggccgtattgccaccaatatggcatatttgcagtttggtatgacaccgccggaaccgaaagacaaataa

SEQ ID NO: 70548 - DNA, 315 bp, Acinetobacter baumannii
gtgagtaatcatcagttctatttggccgatcgtaaatttgccgaaacccatccagaagttttaaaaacggtcgttaatgaactcaacaacaccacacagtgggtcaaacagaatcaacaacaagcagccaaattgttagaaaaaccgacaggcttgtctttagacattttacaaacctcgattggtcgtatgggctttggcgttcaacccatttcagccgaagtcgcaaaaaaacagcagtacgttgccgatgctttctatcaacaaaaactcattccgaacaagctgaatattgacgctgccattattaaataa

SEQ ID NO: 70549 - DNA, 282 bp, Acinetobacter baumannii
gtgtattactattcgtggactggtacgtctcaagtcacgaacattctcgatgtcgcagatagtgcgatctcactgttggggcctttggcctatggacatttagacaatgatggtttagtggcacgctgtagtacacacttcggtaaagtcatccgtgataactatgactggaaccatttagatgaggtcaaccaagttatgggactacgtggactatttagcgcagaccctgttgatgtctatcgccaacatgccaatcgcttaaaaatgcaaggactctag

SEQ ID NO: 70550 - DNA, 159 bp, Acinetobacter baumannii
atgcccactatgcgtagcgacagcagtgtcggtgcaattcctattcccacacatacacctttttatgatgttcagttagagtgccaagtccattttttattaaaagataatattgcgcaatcaattcaatattggggtaaagcctgtaaaggttattaa

SEQ ID NO: 70551 - DNA, 249 bp, Acinetobacter baumannii
atgcttgcacaagaaaccgtgttagaaaaattacgtgagtggatggaagagctgtttgaaattgcgcctgaagatgtgcagttagaatcaaacttagcttcagacctcgatgttgacagtattgatgccattgatttggtcgtaaaaattaaagagctgacaggcaaacaagtcaatcctgacgactttaaaaatgtacgtaccgtacaagatgtggtgctcgtgattcagaatatgtctgctgcatga

SEQ ID NO: 70552 - DNA, 243 bp, Acinetobacter baumannii
ttgtttgttgcaattggccacaaaccaaacagcgcaatgtttgatggtcaattgaacttacgtgatggctatatccaagtccaaagtggcacatctggtaatgccactgctgcttctgttgcaggtgtattcgcagcaggcgacattgctgatagcgtttatcgtcaagcgatcacttcagcgggttctggctgtatggctgcgctagatgcagaaaagtatttggatgctttaggcgaataa

SEQ ID NO: 70553 - DNA, 252 bp, Acinetobacter baumannii
atgatgcgtggtctgttcgatttgttgcagttcaacgtcgctttgggacgtcgaaaagtctatagcgaagcacaccgttttgatcaattgcatgatcagcactttcaagtcatgaatgcaattgaacgtcgtgatccagaagctgcacgtaaagcagtctgtggacacattgagtttgtagtacaacaggtgcgaatgattgatgaagaagaagctcgtcgtcagcgcgccagtcgattaaacaggatataa

SEQ ID NO: 70554 - DNA, 237 bp, Acinetobacter baumannii
atgaaagtgattattccaaccagagtgtattttcattcagcaccgagtaatgcttgtaaaatcaaagatctttttatgattaaaaatgaccatattactgcttatagcacctatcatgatggccaagaacagtgggtttcggccatgtatttcagcaagcgtttaggagacacggttcaaggttgggcaaaactaaaagactttgaatatacgggcacgatgtctggttttaattga

SEQ ID NO: 70555 - DNA, 192 bp, Acinetobacter baumannii
atgttacaacgctcaccagatgcgctcatggcctcaaaatatgtgctggatgccatgcagcatgagcctaaaaaatccttacgtttggaaaaaatttggcagctcaaattactgttaggtaaaaatagccaaatcgcacgtaagaaagataaacaacccgacgtgcagtatctaccacgccaatataaataa

SEQ ID NO: 70556 - DNA, 186 bp, Acinetobacter baumannii
atgaattggctctggctactgctgggttttgttttatttcgtatttttgatgtgtggaaaccttggccaattcgcgtcattgaccaaaaagtcgagggtggttttggcattatgctcgatgacctgattgcagggctatgggctgcgctttgtatttggatttatttttatttcactgtggcttag

SEQ ID NO: 70557 - DNA, 201 bp, Acinetobacter baumannii
atgaaaattttatcgacatcatatacacatgcgcatggtttccgtgcgctcaagcgcttgcataaggcggttatctataatagtgttttacctgatgagttacacaagttgtataaagccttaattcattttgagcgctatatagagcgattagcgcatcagcaaaccgctgtaaagaagaagaaatctaacaaacattga

SEQ ID NO: 70558 - DNA, 258 bp, Acinetobacter baumannii
atgacacgcaggacgttcacacggcattttaagaaagcgacaggcatgaccctagtcgattggctgaatactgaaagaatcagattaagttgtgaacttttagaaacgacaaacttgtctatcgaaaagataaccgagctttcaggttttaataataccgtgtcatttagaaaaaattttcgtgaaaaatatggcaccagccctcaggcatggagaaaagcttttgggatcattaatgaaaataatccatccatttaa

SEQ ID NO: 70559 - DNA, 234 bp, Acinetobacter baumannii
atgttaaatgacatgttgcgtgagtgggataaagcacatccaaagcgtttacacagtatttttggtgccttgcaaaatgtctcgccatcgcagttagcagaccgtgagttgttcgactttgaagcgttagatagcgaacgtgaattcgactttaaaggtgaaagttgttcaacggaagatgagcctgagaacaaacgcattaatatggttaatcttggctttgcagcagactaa

SEQ ID NO: 70560 - DNA, 168 bp, Acinetobacter baumannii
atgagagtgcgcaaaccgtatttattgccgctgcatttactccaagcagagttaatgaaacgtcgccgccgctatctagaagagcgtcaggaaacaaatacacctgtagatcatgcacttatggtgagtattgccggcattgcagcgggtcttcgtaacacaggataa

SEQ ID NO: 70561 - DNA, 183 bp, Acinetobacter baumannii
atgggttggttatttgttatgtggaaagagcaagggcgtcacgtagttgcctataccaatcgacctaagttaagtatccttattttgacgataggcgccggggctgaccccagtccactttttaaaagcacgatggaaagcactcggatcatgaaaattgagttcagtgctaatgtcttgtaa

SEQ ID NO: 70562 - DNA, 195 bp, Acinetobacter baumannii
gtgcttcatttttttactacgccttccaataaggaattggagtgtcgtcataactttcagtatgagaccgatatgcgtttgatccaacgctgtaaattccttgaagatcaagatgagaaaaaagccattcaacatcttttaaaagaacggggttataccaaagctgagattttaaagctcaccattgatggttaa

SEQ ID NO: 70563 - DNA, 246 bp, Acinetobacter baumannii
gtgcaatttgaagatggcaccaaaaaaacgttaggggttattcttccgacagagcaagctttgacgtttgaaacacatgtggcagagcgtatggaaattatttcaggcgaatgtcgtgtacaaattgcagacagcgaagagagtgaattgttccgcgcaggtcagtctttttatgtgcctggcaatagtcgttttaaaattgaaactgacgacgtgttggactacgtgtgccatttagaaggctaa

SEQ ID NO: 70564 - DNA, 183 bp, Acinetobacter baumannii
atgggcaaagaagatacttatcgtgcaactcagaaagcaccaaatgctaaagtggttgctgttcacatggatgcaattaaccacatgtcagtaacacgtgctgagcttgcagagtacgtaaaagacaaagggattcaagataaggttttaattcctattgatggtgaaacgctttctttctaa

SEQ ID NO: 70565 - DNA, 168 bp, Acinetobacter baumannii
atggaagggatgacgcaagagattgcttatgcacttgcagcacgtggtgtcatcacaattgatgacttggctgaccaagcgactgacgatattgctgatattgaaggtctgggtacagagaaagcgggtcaacttattatgaaagcgcgcgaatcatggtttaactag

SEQ ID NO: 70566 - DNA, 129 bp, Acinetobacter baumannii
atgattgacaagatcgaaaatgaagtcggtggcgacttgcatatgattcgggtcaatggtgtggtagtcggtgcatttattggcttagcactggggattattcgcgcggcagttgaactgctcttataa

SEQ ID NO: 70567 - DNA, 162 bp, Acinetobacter baumannii
gtgagtaatgaaacaggcctaggtgtggttcctataggacaaattagccgacgctttgtcgatgaaacaggacgattgcatcagcagttaggtcaaattgctacaaaagtggtgttctgcgtagcaggatttccaatgattttaaaaggagaacaagtgtga

SEQ ID NO: 70568 - DNA, 210 bp, Acinetobacter baumannii
gtgactttattaacgcaggatgtaccgcgttatcgcgtgagtaaacagcgtcagtctgagcgtgcgcgtgtgttagagtttattgtgatcactgatacccatgccaagtcaggtccgccaattcgtcagttgcttgggcagttgtatcattatgccgaattgggtggggtcgatacatctggggtcacgacacagttggcgctgtggtaa

SEQ ID NO: 70569 - DNA, 168 bp, Acinetobacter baumannii
atggaagaacacattacacatcgtaatatgttaaacaccgtactagatgcgcataagactttgatggaactgaatcaaagtaatcaaaatatgtttgaaccgctggtcaaacagttgcaaaaagaacaagacagcctcgatcaagtgtcacagcaacaaaacgcataa

SEQ ID NO: 70570 - DNA, 357 bp, Acinetobacter baumannii; identical to SEQ ID NO: 46762

SEQ ID NO: 70571 - DNA, 300 bp, Acinetobacter baumannii
gtgagaactagttttattaaatttcataattttttattgatttttagcgtatgtattacttcaaatgctacagattataaaccagaacagttagatgagaaaacaatatatagtaatagtgagcatgaactgaatagtgtgtattcagatataaaaggctatatcagtgataataaaaatgaagttaaatatcttgttgatactcaacgtttttggttgaaaaatagaaatttaaaatgtaattttaatggaaaagaagcaaatagtggaaactataaaatttggaccttgataatttag

SEQ ID NO: 70572 - DNA, 348 bp, Acinetobacter baumannii
atgaaagagttggaaacaggtggatgttattgtagtgaaagtacaattaagattttaaaagataaaatttatatatatcaagcttgtgatcaaggtttaaaggagccacgtatatataatattgttggtaagaaaaaagatagtttttctgtagaatatcaaattgacactaataataaagttccggaatttaatttagcatttgttactaacggtaaaaatgtttggaatatagttccgaaaatttttagaaaagaagatttaataaatttaaattttggaattaattatataactgatatgaatataaaaaataagaaaaatgattgtcatgatgatgaagagtaa

SEQ ID NO: 70573 - DNA, 153 bp, Acinetobacter baumannii; identical to SEQ ID NO: 61079

SEQ ID NO: 70574 - DNA, 1626 bp, Acinetobacter baumannii; identical to SEQ ID NO: 68441

SEQ ID NO: 70575 - DNA, 222 bp, Acinetobacter baumannii
atgacaaaacaagtttttgaatatttggaagaaaaagcaagccaagtgatagatacttctttattacctttggattgtttaaaaaacctaaatgagttatctggtgcagttgatgttttagtgaaatgtggttacttaactgataaagaaagtattaataaggcgtttgatattttagagcaagtaaccacctttgcagataattctttacctaaaaattaa

SEQ ID NO: 70576 - DNA, 192 bp, Acinetobacter baumannii; identical to SEQ ID NO: 58996

SEQ ID NO: 70577 - DNA, 123 bp, Acinetobacter baumannii
atgaatacagaagctttgagaaaggattctgttgagcagattccacaacgtcaacaaccgattcaatatgctgaaaactatatacagcgtggcttagagagagaccctaattgggatttataa

SEQ ID NO: 70578 - DNA, 375 bp, Acinetobacter baumannii
atgattttatatgtttgtagttatgttgtaagaaatccttttttttctgagaaaagaattgatgtgaaaaaaatgggttggggaaaactatcaaatataatcaaggatattttttcttttggaggtagtgtcattattcataaaacagatgctgattattctgaagagtctgggagattagcatatgatgatatcgatagttacagtatggtttgtgattctagatacggttatttgtttggatgcagtattagtgaaaatgaagaatatcctgaaggtatttatttgcgccttgtgaatagagcattaaaattatttaaagatatttatgaacatggcgaattatcatttgagtcaaaaacaatatttgagtaa

SEQ ID NO: 70579 - DNA, 477 bp, Acinetobacter baumannii
atgagtgagtttaaagtcggggataaggtcgtatttcaaaacagtaaatcagacgatacagagatttacactgtagaagctgttttagatggcggtagatttcttgggattaacgattacaggcaggcattttcatcaatcaaattcagacatgctgagccacaagaaatcgcagcaggccaccgcattgaccttccaactttgcccaagccagtaggaagcttacaagaattgcatcccgagtttgcaaaagtcttgcacgagaactttctagagctgctaggcgatgaatccaacactgttcaaatggcaaaagatgcagttgagcatggtcacggctttgcaatggtgtcaattgaaggtgttgagcaggtatcaattgcacatgtaatcaacccatttccttgtgaagagcttggcgacgacttccccatagaaaaccgcatcagcccgctgtgtaaatcaaaggatgtttga

SEQ ID NO: 70580 - DNA, 480 bp, Acinetobacter baumannii
atgattgacctaaaccaagaacttgaagattttgatgcttatttttttaaaagacatggtgaattgcctttagatccttcctctgaggaatacgccaataaatcatatctaaaacacgagatgtttaaggcatggaaagcaagagctaaagctcaggcggtgccagatactaaacccattgcctataaggtttcttttgattcatggcaaagacagcacgggaaagactattttgagttttggaaaccagatgagttcgaaggttacaaaccagactatctaattccgttatatagcttcccaactatttcaagtgattttgtggttgttccaaaagaaccaacacagaagatgctcaatgcggctcactgttacatgaatccagttaagggaagtgatgtgcatcctgaaacaaatagaaagcgcaaagaaatgtacaaagcaatgattaaagcaagcgaatcaggagctgagggatga

SEQ ID NO: 70581 - DNA, 717 bp, Acinetobacter baumannii
atgaaaaatagttatcaagctcaaaaagtgattgaagaagtaattaaggaaaagccaaaagcacgttggttgtttttaacactttcaacaaaaaatgcgatagatggagatactttagaacaaagtttgaagcatctaactaaagcatttgataggttgagtagatataaaaaggttaaacaaaatcttgttggatttatgcgttcaacagaagttaccgttaataaaaatgacggtagttataatcagcatatgcacgttttgttatgtgttgaaaatgcatattttagaaaaaaagagaattatataactcaagaagaatgggttaatttatggcaaagagcattgcaagttgattatcgacctgttgctaatattaaagcgatcaaaccaaataaaaaaggcgataaagatattgaatctgcaatcaaagagacctcaaaatattcggttaaatcatctgattttttaactgatgatgatgaaaaaaatcaagaaattgtaagtgatttagaaaaaggtttgtatcgaaagcgtatgttaagttatggtggattgctgaaacaaaagcataaaattttaaacttagacgatgctgaagatggaaatttgattaatacaagtgatgaagataaaacaacagatgaagaagaaaaggcacattcgattacggcaatttggaattttgaaaagcaaaattattatttaaggcattag

SEQ ID NO: 70582 - DNA, 381 bp, Acinetobacter baumannii
atgagctttatcactgaacaagaagcgatagaacatgttgaaggctttgatgctttatctgccagtgataaggctcaatacctccaaatggccgaggcatatctattagcacgtaacgttaaaccttacgaggatgctacccaagtacctgaacctttaaaaacagcctcatatcaaatcatcaagggcattatgaaaggtgatctatatcaagggcaggaacaggtactaaaacgcaagaaagtcaaagctgatacggttgaaactgaaaaagaatatcaggacggatcagtaaagcttagtgcaatcgaacaattcattcttgatttgattaagccttacagcaaacgaaaagctgtattttttgtcaggaaaatctaa

SEQ ID NO: 70583 - DNA, 381 bp, Acinetobacter baumannii
atgagctttatcactgaacaagaagcgatagaacatgttgaaggctttgatgctttatctgccagtgataaggctcaatacctccaaatggccgaagcatatctattagcacgtaacgttaagccttatgaagatgctacccaagtacctgaacctttaaaaacggcctcctatcaaatcatcaaggggattatcaagggtgatctatatcaagggcaggaacaggtactaaaacgcaagaaagtcaaagctgatacggttgaaactgaaaaagaatatcaggacggatcagtaaagcttagtgcaatcgaacaattcattcttgatttgattaagccttacagcaaacgaaaagctgtattttttgtcaggaaaatctaa

SEQ ID NO: 70584 - DNA, 192 bp, Acinetobacter baumannii
gtgcgtgaacctgcaacaaacccaattcaagatgcagctattcaaactgtaaaaattaaattgggtaatttggtctatattcagaacaataaagcttatgcaacccgcttagaaaacggttggtctgatcaagcaccacaaggtatttatggcctcacgtttaattttatttctcaaaagtacggtggctaa

SEQ ID NO: 70585 - DNA, 537 bp, Acinetobacter baumannii
atgacttttgagcaaatagaagagctttattcagcagtacttcgtcaattactaccagttggtgggtatgacaacgcccaagatacggttattgctatcgatataaaagctcatgcaaaggtgctggcacaagctgatgtagatgcaaaacgtattttgaaaacgttggaacgtattcctgaagaactgattagtgaatatgaggctgctctagggctaccgttgaaatgtacggtcaatactacaaaaacaattgatgaacgtcttcagattattcagtgggttcaacagaccaagaatgttttaaaccgtgcttatcttgagggcttgcttggcttatttggcattgagttaattgatttaattcattacagaccaatgcaatgtatagctccatgcaattcaccagtcaacacagaaaatctaaggttcaaagtccaaatgatcttaaaagcccctgtgcaagctgacatggcttgccttattcaaaactatttaccagcttatttacgttatgacattaaggagcaatcatga

SEQ ID NO: 70586 - DNA, 1044 bp, Acinetobacter baumannii
atggcattttcaataaaaagcttttctcagattcgtcaggatattgttcaggaaatcagaaataagactggtttaacaattaatgatgactcagatgctgcaattcgtgctgatggtactgcttcagtggttgaaggtttgtaccatcatcaaatctatattcaaaaacaaatgtttgtagcaacagctgatgaacctttcctttatttacatgctgtgcgtttggaatgtccacgtaatggtggatctaaagcaacaggacgtatcaaagccatttcaaacatcgctgtaactgttccagctggtacaaaaattacagatggcaaaggtcgctactggctcacattgtacaaagagcaactgactgcgaataaaactagagaaattcaagtcattgctgaacaggctggcgtgagctggaactttgacggtcaacaattgttatgggttagccctttagctggtgttgcagctcaggttgatgtaattgaaatgtctggtggcgtggacgttgaggaagttgaagcttggcgtcaaagaatgcaagcgaaggaagcccttggcttaatccgtgaccgtgaagctgatctagagcgaattgttaaggatgtatcaggtgttgcagatgtttttatttttccgaaacgtcgtggacttggttctttagacgttgcggtaacagcagctggtaatccacccaactcaccaagtagtgctttattagccgctgttcaggctgctttagaagaatattcaggattttgggcagatgttagagcttatgcaccaactaaagagtatttaaatatcacagcaacttatacaggtactgcaagtcaatctgatgttgaacaaactattcgtgattatgttggtctacttaagccagctgaaacatttgttgtctcaactcttgtgagtcgtataaaggcgttaattggagtaacagatgttcaaattacaccttcattgaatcaaacaccaaccttaacagtatttactactggttggttgcgtattggtaatcttgtggtgaatcaataa

SEQ ID NO: 70587 - DNA, 3879 bp, Acinetobacter baumannii
atggctcagaaaactatcgtaattgaagtgccgggcactccgattagtgagctggaaccgacttcaaatgtcacagcagaagacgtattacctgtcgttcaagaaggtgaaaccaaaaaaacacctcttgggcaaattgttgcattagttaaaagtgtcttagggtctgctgcattaaaaaatgcatcggattttgctacgcctgctgctgttgctaaagtggatcaagcaagtcaattccgtgatgatgctcaaaatgagcgtattgataatgttgagcatggcttaatatcaattgggaatggcgcggatgcttcattcagtacttatgcaaaaatgattgcctatgttccacctaaagcaaatgtatcggtgcgaaataatgacccagatcaatctttacgtggtacatatatttgggacgggacaagctattcacgtggatatgatccgctggataatattcaacaagctgagactaattcaaaaatttatactgatgatcagttaaataatttagttcaacgcggaattaatatttttgataagtctgatgcattaatagggaaatattactactggcagactggtgaaatcggtgatgctgaccaaagtttttgtgcagcaaaacttatagctgttgagccttctacagaatatagggtccctaatttctacggacagcaattcgctttttttgataaaaataaaaaatatatttcaggtaaagccaatgcgagtgtagataattttaaaattacaacgccagcgaatgctaaatacatcggtatgactgttgacgtcgtatatctcgataagatgatgttgtcgaaaacatcagaatatcaggaagactatgttccccgtcgtattaacttgaatgatttatcaattgactcaaatcaaatcaacgatttgactagtggtgttaaatcaatccttggggcttatagtactaatataattgatctttcgaaggtgcttagtgagcattacgttgaatttagcacaggcaaaataatcccttctgctaattttaatgtttgtggtttttatgaagtcaagccattaactcaatataaaacatcatccaattattttcagcagttctgtttttatgatgctgaatataaatacatttcaggtatgtcaaaggttgacacatctttatttaccttcacaacgccagccaatgccaagtatatccgtttaactgtagacaaaggtttagaaaatagccttgttgtagctgaaaagtcactattccctaaagaatacgagccatatggtttacgttttaaagatttatttattgaagcgaaacaacttccagaactgtattcttttatagctgctactttagccttagaacctatcaatatcattgaccaaaaacgggtcgtgaatgatacctatgtaaactatttaaatggcgaagtaggttatgtagagggttattacactgctggtccttatgaagtagaaggtaacacagattattctgtaaccactgcttacaaccagcaatttgcgttttatgacgaaaacatggtgtatatctctggtcaaaaaaatactggtattagtaaatctttcaagacacctgctaatgcaaagtacgtaaaatttacagtcaaaaaaacagaccttgcaacttttgtagtggctaaaaaagatatttacccaattgagtatttatctaacgacattaacattgcaaactatttgcgtttatatagttcgcaagttttagatttaccagaagttttaggtgacttcataggtgctgaagatatgaatattatcgatacaagtaaggttgtcgataatgcttatgtcatgtatgaaaatggtggtttgggttttaatgcagactattatgctgctggcccttataagatttcaccttctacagtttataaagcgtcgagtaatttttctcagcagtttgcgttttatgacgaaaaaatggcttatatttctggtcaacccttaccagatgatggctctattttcactacgccagccaatgccaaatatataaagctttcaattttgaaaacaatcctaaacactgtggttgttgctaaacgagaaagtttccctgcaagttatgtcccaaacaaagttaagcttgctaataatttaatgattaaaggtacttctgttaatagaatagagatttgggtatcacctgatttaaatgaagcaaacacaaagtttaagtttaaggggccgaatgccattcaattagctttgaacagtattgttgatgctacagcaacgaaccgttatgtgatcaaagctaaaaaaggtctttataaaatcagtaaagcatcagatttcattggctatctgggttatccagctatgattgaaatgaaagaccatgtggatattgaaggtcaaggtgaaaataacaccattatttgggcagaattaccatatgacgatgctgatattgggccttctgccgatgggaatgtttatcccagaaatcagtaccaaacaatttatcattatgctcaagacgcgcatgtaaaagatttaactttcatagctaaaaacttacgttacacgctacaccaagataatccgaaaggctcacatgcaacacataagtatcataatgtaggattcatttataaaggcgataaaggctctttaaatccgttaggtatcggtacatgggagggtgaagaaacttatctttacggtggtcgttctcattcagatgttggacatgcttttgcttgtcataacaatactcaatttaacgtaccttcgggttggttctttgaagatttcagtttctctagtatcactaataaatacgcaatattaatgcaatcagatggttcattgttacaagacaaattaaaactgtctggttgtagctttggtggtgttgcttatatgttggcatatgtagatatctggttgacaggtaatactgctttaaacagagactctttcaatcacgcagaatggcatgtttttgggcatggcaatgacccattcttatttgagaacttgattagtactggactttgtttacggtttaaatcaaatgcagttggtcaaggaaaaacaattcgttttgatacaacatcaagtgcttttgaaactttgattaaaaacaatcaatcgaatgcggactcagcaatttatgtggatagtcgagaatatatcgacggttatattgctcaagatggttccattggattgccagcgattgcttttggttgtaaggatttaacagatggcgcatatctctatgatggaggtgtcaagtacacaagtttaagtgtacgccttggtgactgccgaactgcgaataaacaattgaaattgactgtagacggtgtgttaaacactgttaacttcaaacaagattattcaggtatgagtaatcaaagtattcttgatgctatcaattctcaattaaccaacgtagttgcggacttgtatgtttatggccgtgattattacccgacaatcactgatgtcgctgaaactgtttataactggaactcagataatggggctgttcaagcatacataccaaaaggcagtttggtatctaaagttaaaggtactgtgcggattgcaacaggtaatatgaaagtctacggtgttgcgctcgatgatattcctgtgatgtcaacaacaagtgacggcattagaaaaggacaaggtcgagttctgaagcgcggttatatttcaactaacactgctaatgcattctatgtattggctgacaatcaaaatcctgtggtcggtacgcgctttaatgtagtcaacgggcaactagttaccgatctcaacggcaaaatcagcgtcgacattgatgatgctgtagtttcaattaattgttaa

SEQ ID NO: 70588 - DNA, 351 bp, Acinetobacter baumannii
atgtctatttctgcaaatattaaagttccagacgtatacaccagcgtcaatattaatactcagcgtacaggtttacccctaaatgatcagcgggttttatttgtgacgatggatgttttgtcaggacaattcattcctgttgatgtctatgacaaggcagatgctgatgccaaattcggtcttaagtctcaggctggaagaatgatattggctgctgtgaagactaaccgaactgtgaatgtacaggcggttgcacttgctgctgaggatgtccaaacacaagcagctattcagacagaaagcggtagcgcacttcaaactgaaggcggtgctttgattgaaccggagtaa

SEQ ID NO: 70589 - DNA, 687 bp, Acinetobacter baumannii
gtgcaaaatcaatcacctttgaaaagacctttttttaagacttggatcttttgggcaatttttatttacttgttaattatttttttttacacggttaatttttatttaagtgatggggaaaataaaccacttccttcaaacgaatttggtgatttcttggctggagtatttgcaccattagcatttttcttcattttactaggttacaaacaacaaagtgttgaaatccaaaacaatactcaagaaagacttgagcaaaaaagacaatctttattactttcccaaccattttttcatttcaaaagttttagcggatttataattaattcagatgattcattttttttcaatttaagtctctcattaagcaatagtcgagcaatttgcagacagcttttccttcttttaagttttgaagatagtttagttggtcaaatccctgctggagatacttcatttggatttattaataataattttgaagaccagcgagatttttatttaatcactgaaagtactcacttaaattttgaaaatgaatatgctgttgtttatttattgattaattacactgatctaaatgatttaactcaaatgcaatcactaaagttacttttcaaaaatgataaagatggttcctattcatttagtcattacattgtggacaagaacagttatcagcactaa

SEQ ID NO: 70590 - DNA, 348 bp, Acinetobacter baumannii
atgtttggagaattaataaaaaagattaaggcttggtacaaaggagatccaggactaattgatagcaaccctgcaactggtattgatacagttataagagagccttatagaagtccccttgctaaattggtaagctattttattaggcccatagggtgggcttacaatttttttattcaagagtggaagttcattattactacgtttttagtcatccttaattttgtctacactcactcgattaataagacctttaagcaaaataaccaagaatattccagatgcgaggtacagaaagaaaggggaaatgaaattacttttcattgtttgaagagagaaagccattga

SEQ ID NO: 70591 - DNA, 210 bp, Acinetobacter baumannii
atgcgtgtaaataaccagaatgaaccagtcttgttcggggcaatgacttactcacagatcatgagacttagatcggcttacgaattaggagtgcgagacgaagaaacccgcttagctcattccctatacaagagactgcaaagacgcggctggttgaatcgtttgaaggaacgtcaagccatgacaggacatgacaaggaggcggtatga

SEQ ID NO: 70592 - DNA, 372 bp, Acinetobacter baumannii
atgaaaccagaacagtttattcgtgagtttggggtggagaaggcgagagaggtggttgagtgggcgccagaaggtgctactcactacgggctaagacaataccgccagtgggagggtcgaattctaaaaacatttacagaagggtcttggcgttcaactgctgtttttggtggaaatcttagatttattgaagatgactgcctgtgtattcaagacctcaagcgtctggtggagtctgttgatttagtagatagcttaggtggattaaaagcagcacgttcagaagctcataaagattgttttgtatttaaccagccattgctagccgctattgcagcatacgaatcaatatacggaggcggggatgaatag

SEQ ID NO: 70593 - DNA, 165 bp, Acinetobacter baumannii
atgagtgagtttaaagaaaataaaggaatcgaaggcattttaaaggatgtggttgagcacggtcacggctttgcaatggtgtcaattgaaggtgttgagcatgtatcaattgcacatgtctcaacccatttccttgtgaagagcttggcgacgacttccccatag

SEQ ID NO: 70594 - DNA, 930 bp, Acinetobacter baumannii
atgtcatatttacatacttactttttaatagttccatacattgctttaaccttttattttattactttccaaagtgataaattctttttgaaaacaagaagtagtgtccagtttctatatgttctactattccttggttttgttttcggtaaccttttggtttggaaggctttatttatagattatgagtttttaggatattcggtaagaagcactgcaacacataataaaagtactggacttattacaattctagcaacaattgcagctgtttgcggatggatttttacggcaagagttcaaaccataaatgcaatcaaagggcattctatgcaggttctgatgaatagcaggacatcaactgtgtatatgcaaaaagttgataagacaattgagataagaagaaacttacttaagggtgaagggggaagtgaaagtgataaacaagaagttgtattaactgccgaaaagtttgaagctttgccagaagaagaggataaatctgcagtggtttatatgcttaactttttagaatttgtagctattggtattcgacattataatttagatgaagaattgttaagaggcagtcttagatctattttgaatagcaattacaagctatataaacctgttattgaacatctaagaaaagctgataatcctgcaatatttgttcaattagaattgcttcatgatcgctgggcagatcctgcaaatatttactgtacaaaatgtaagacttggcatccccaaaaacctatattcaagcattggaaagagaaatatataaaattaattcatgtactggttacattgttaacgtgtgggatctggttggcaatattaggccttatgtgggcaataggccgtttaactccttctcctagaaaagatcataaaatctgtgataaatgtaaagcaccataa

SEQ ID NO: 70595 - DNA, 132 bp, Acinetobacter baumannii
atgtcaaaggagggattattttcaagtaatccgataagaatctcagcattatatataagaaagtattatgatcatggacaactgttagaaattgatgcagcggtttatatcagtgcaacaattttgcactaa

SEQ ID NO: 70596 - DNA, 543 bp, Acinetobacter baumannii
gtgaacaataatgaaatctcaactttatataagtttgattacttaggatataagtatattatagatacaatttcatataaaaataaacgaatagttaaagcggaactgtcagatgataaaaaaagaaaaattaaaactagaataatacatagtcttttagatagagtttataatacaacgcattatgatcgggaggagttgttaattaagcgattaaaagtgttatcctctaactactcaataacatataatgaattgtcaaaaactaatttaaaagctggtatgttttatagtcataggttagtaaataattatggtatttttagtgaatttaataaatttttatctaaagctatctactgtcaacaaaacaatttctttggtaaagctatgtcgcagattcctagtaaagaaaaagaaaatattattaaaagtatttgttttgttagtggatttaaagataaaaactttattgagttagagagggttgaaatggaacgagtaaaaaagtgttggaaaaataaacgatataagaagctttga

SEQ ID NO: 70597 - DNA, 330 bp, Acinetobacter baumannii; identical to SEQ ID NO: 68303

SEQ ID NO: 70598 - DNA, 696 bp, Acinetobacter baumannii; identical to SEQ ID NO: 68304

SEQ ID NO: 70599 - DNA, 429 bp, Acinetobacter baumannii; identical to SEQ ID NO: 68305

SEQ ID NO: 70600 - DNA, 246 bp, Acinetobacter baumannii; identical to SEQ ID NO: 68306

SEQ ID NO: 70601 - DNA, 180 bp, Acinetobacter baumannii
atgcaatggaaatggaatgataatagtcaaacagcagtaagactagatccaccagataaagttacattatatgatcatgctcatttatatgataaaaatggaaatccattagataaagatggaaacatagttcctcgcgaattcccagatgcacatattcctattagagactgtaagtaa

SEQ ID NO: 70602 - DNA, 450 bp, Acinetobacter baumannii; identical to SEQ ID NO: 68308

SEQ ID NO: 70603 - DNA, 804 bp, Acinetobacter baumannii
atgctacaagctgtttatttaagtccaatagaattgcaccaaactccagattggtcagatagaccttataacatacaccgtgacccgctttggaaaactgaaaaacagggtaaagagtttgatgatgtatggttctatcactgcgaccatttaggcacaccgcaagaaatgaccgaccatacaggtgctattgtctggaaagctcaatataaagcttggggtgagtgtaaggtaaaaccggctaagtcagatttctttgaaaattcagaaactattagtaataacatccgtttccaaggtcaatatttcgaccaggaaacaggtcttcattacaaccggtatcgttattattcaccgtatgtagggcgttttatttccaaagatcctattgggttattgggtggagataatgtatatgcatatgcaccgaatccagtaagttggattgatcctttgggattagtaaagaaaaaaccatctaaatatgctttaaaagatggtcataatgctactgctcaagagatagcagatagtaaaattggtggaggatctcgaagtggacaatctaaagttcgacaaaaattgttagatgaagataattctaataataatggggtttatacttgctggcgttgtggtcaaacttctactaatccagatgatatgcatttaggtcacacaaaagttccaacttctaaaggaggtaatttaactacaggaaatacagcattagagggtgcagcgtgtaatttaagcgcagaaaatagtggttatgttaaagaaagtatatcttgtaaagagtaa

SEQ ID NO: 70604 - DNA, 3984 bp, Acinetobacter baumannii
atgtcacaaaattcagtcgttgctcctttaaatacttttagtcccaaagatttaacaacaaaaaaggcagaagttgataaatggtttagggaatatacagatggtattgttactgttgaccgactagagacaatctgtagaaatgtacctgttttaggtagtgcctttgctgttggtgatatcattattgatatcataagtatgatcaataaaggtattgataaagttgaaatttttgattggttaaatttaggaattgatgtgatcggattggcaccgatcccatctattagtctgggtattcgtggtgtagcacgaccagcattattttatgtaaagaatgaatcagaacaaattatcaaagcacaagcaaagaaattaggtaaacaaacgttaacttctcaagaagtaaaaaaagctttaagtaccggttttaaagacagtgcaagtgtatttttaacaactatcattgctgaaaatgtagcagggactttagaaaaatttgctaaagaaggacaaagtttacttaatcaggttctaaaagacgttggcaactggattatcacattaacaaatgccattgatactggcttaaaaaaactagtcagtggttcattagatggtcttccaaaccttaagcgtgcaggccagcagtctttaggagttataaaaggaatatttgaacttgatggaacccgtgtagtaaataatgcaaaatatgctaccgaaaacgttgcaaagactgtgggtaaaggatatgtcaacctagccaatttaggaatttccaccgaaacacgagctaaaattttagctttaggtacaaaaataagatctatcggacaagttgctcaaggaaaagtaaatggtttaagtgaccctaatactttatggactattggttggctatttagcattatgggaatggttgccgcaaaacatcggcaaaagaaagcgcagattaaggccaaagaaacgacaaaggccaatgcaactcatccatcaactgcgactgacaaatcaaataaacaagctcatgccgagaataatgccaatcagtgtaaaaactgtatgggcggaactggtggttcaattacctttgcaatgggtaccgagttctttacccatgtcgatgcacaacttggtggaataattcaggacagcattagccgtacctatgtttcaaacctttaccagatggatgacgctatatttggagcacgttgggttactccatttaccacaaaaatttctcgtaaatttaaatatagtccagagaaaaaagaccataaagactatttaaatgggcttgaatacattggtttagatggtcgggcaatcaatctgcctgacctgaagaaaggtcaaagtatttatgatccgattgagcaatacacttatacagttttatcagatgagcttcatttaattgcctacggtgaggacgagaaacgctattatgaaaaatatggtgaggactatcgtctatcttatattgaacgtaaaaatggtttcaaagtcgctttacgttatgaccatgtttctatcgataataaaacaattttatcggacattttatttaaacaggacgataatttactggctcatttagctttgcaattaactccgcaaggtttggtttccgatatttggacaatcaaaaatggccaattagatcgtgtattggcaagttatgattatgatcaacaaggtgatttgattcaggcaacaaatgaatttgcagcttcttattattatcaatatatccatcacttaattacacgttatacagatcttactcatcgtgggatgaacctaaaatgggatggtattttacctacttcaaaagccattgaagaatgggccgacaatgctagtcgtgcttcaaagctggagtgggataaaaatatccgaaaaaccacagtattggatgttgaagggaatagcactgaacattactatgatatagatggctatacttaccgtattgtttatcctgataattttgaagagtggttctttcgagatgatgcgaaaaatataacgctccatattgctaaagacggttcgaaaacttcttacacttatgatgagcgtggtaatgtcttgactacaactcaagatgatggtgcgacaagttattttgaatatgatgaaaaaaatcaactcactggtatggttgatgccgaacagggtcgttggtttaagcaatatgatggttctggaaacctgatcaaagaaattgatccacttaagcatgaaactgcttatgcttacaatgccatgggcttagtcacttccattacagatgctaaaggtggaagtaagtcacttaaatatgatgatcaagggaatttgattagttatacagattgctcaggtaaagagactaagtggcaatatgatgagcgtggtcgtgtaataagcattgaaaatgcattaaaacaaaaagttgagtacttttatactgaacttactttagaaaatcgggaaccaattataaagggtttacctctgaatgcttttggtcaacttgaaaagatcaaacatgctgatgacacagaagaacacttcattcatgatgcggaagggcgtttactggcacatgtagatcctaaacagaacatcactcgctatgaatatgatgaggcgggtttaattctgtctcgtacagacgctttaaaccacaaattaaaatataaatgggatcgattgggacgtctaacccgactcattaatgaaaatggtgcaagttatcaatttttttatgaccttggtgggcgtttaattaaagaaatcgactttgatggtaaggaaacggtataccactatgatgaaaactcgggccaactggcaaccagtattgaagttgcatctgcttatggacaagacctcaaagaccgagctgcaccgaaagaccgaattcaacaatttatctttgacagtatggggcgtttagaacagcgtactgcgggttatggtcactatggtttagaactcgaagaaaaacagactgaagaatttgcctatgattatatggggcgaatcattcaagctaaaaatgctcaaagcaatttacaatggttttatgatgcggctggcaatttagtacaagaacaccagcaagattataaaatcaataaaaccgcggtgtggaaacaccaatatgacgaaattaatgatcgaatcaaaacaactcgtccagacgggcagattattgactggttgacctatggtagcggtcatgtacaaagtttaatcgtgaatggtcaagaccttattagctttgagcgtgatgatttacaccgagaaattgcacgtcactatgccaatggagtgagtcaggaacagcaatatgacttagcaggtcgtttgaaaagccaaatcatgttaagtgaacatgaaaatggctatcaaaaccaatataagccgcacaacaatgcattagagcagaccagtcaactggtacagcgactttatcaatatgataaaacaggtgagctaacggcaattagagatacacgccgtggcaatattgcctataagtacgatcctgtagggcgtttacttgaagcgagcagtaaacttggaaaagaaacgtttaactttgaccctgctagtaacattctagattcgtatcatagtcagaaggctcaaagccactcacaaaagctagatgaaacaggctatggttataatcgtttggttaataacgtagttaaagaatatttagatcaacaataccaatatgatgcttatggacaactcgtaagacagaaaacgagccaaggtgatttaaaccttgagtgggatgtctatggccgtctggtaaagagccgtaatagtcaatatacggcagaatatcgctatgatgctttaggccgccgtattcaaaagcggagtaaaattaccatacaggtcaagagcagaacatcatttatggatgggatggcgatacacttgcttatgagtccacagagcagttga

SEQ ID NO: 70605 - DNA, 219 bp, Acinetobacter baumannii
atgaaagatataaatttattactaatgaatatatggttttcacttgaaagacaaattgtattgaatcaagaacttgagaagataacatcatttgatgaacgttctgaagctttaagaaaatcttattttaaaaacattcaggaagctggattaaataaagatcagtatgtaagtgaattcttaaatttaaaaaacacaatccgaattctttatgtttag

SEQ ID NO: 70606 - DNA, 804 bp, Acinetobacter baumannii
atgtctaaagagcagttttctaattttatagataatgaaataaatgatgacccaattgcctcaagggaggatataattaagtttatgtattcttatgaagtaagagctcttattgctgatttagaaaaattaataattcaaattgaagaatgtacatatattttttatgataaatttaataatcctaaaatatttaaaagtcatgaaacaaaagagggtcttactactatatattcaatggagtcaagacttattaatacaattttagaagctataattattaaatctacttcaatattagattatcttagtaaattagtatttgaggttgaaaatatgccaaaaagctttactacatatcctaaaagaaaatcagttgactataatcatggtaaaactaagctggatcaaactgaacagagtctatggataaattggagtgaagaggagagaaaaaatactatatttgatgagagtattaaagaaatttttatactaaaaagacttagaaaccaaataattcatgatggttttttagatgttgataatatcatttatgagaataagattaatggggttcttcaagaaagatttattcttatgcctgattttaataataaaaaatttgaagaatatagagggaggaagttattttattctcaagataagaagattaatcttgagcttccaaatttaatacaagttcttttaagtacaactaattatactctaaatgttctgattaaaaaatattggtttggtactctttctgcagattttgttttatcaatatcttcagattaa

SEQ ID NO: 70607 - DNA, 993 bp, Acinetobacter baumannii
atgaatgactttttttccagtgtggattatctagaaatagaatctaagttaaaaattttagcttcagatatatgggataatgcaataaaaatgccagagattgaagagtggctatctcaatttactggccaaatactgagtgaacaagaagaaaaattatatatgactttagcactttcaaagtttatatttttcagtcaacgtatgattagagaaatgctaatatctctatatcgggattattttcggacacctattattcatgaactacgtaaaaaaaataaccacaccactaattttgaacttttaaataatttatttgaagaagaattaaaattatcacggttcatcagtgtaggtaatcctgccgaaagtggagctcatttattatatattttcagacaagttaatgatttaaagaaatttctatttagagatctttatcatgcgtttaaagctgaatcagatgaaaatggtaaaattaaatggattgctagagacactaatattaaaagatatgttttttttgatgactttgtaggtgggggaacccaaataacaggctatttaaaagatactcttgcaaatattagagaaaataatccacatatacaaattagttttatgtcaatattttctacgagtcaaggtctagaagttcttaatgatcataatgtttttaatggaaatgcagtttgcctttttgaactagatgaaagttataagagttgtactactggagctagatatttcaaaaaagttgactggtttaatatggaaaattttaaaaaaataattgaacattatggttcacctctttattcaaatccattcggtcatagtgattgtgagttattaattggattttctcacaatacccctaataatactttaccagttttttggaaagatggttatataccagaaacgaataattcttggtttcctattttcaaaagatttgaaaaaaattatggctctgtgagatcataa

SEQ ID NO: 70608 - DNA, 747 bp, Acinetobacter baumannii
ttgaattttaataatggaaaagattttaagtttattaatggatttattgaaaccctcaaagaaatacccaatattattgaacctaatgatattgaagaactattaaatattttaaccagagatttttcaattattttaaaaaaacacaatattcttagatttgcaaaagaatataaaagtgatgaatcttatttagctacggctaataaaattagaaatgattgtactctctttattcaagaccctaaagatcctagtattaagtcttatagagattcatattctagttggagaaaagatttaattgctcaattaaataaagaatcttctaaacctatgatttatgctggactggatacatttattgaaatgtcatctggcaaccctcgtaacttactaagtattttaggtgcagcatatgatttggcgaggtttaaaaatatagattttatcaatggaaaaccattatctatagaagaccaaagtaaagctgttttagattcagcgagatttatatttgaacaagattcaaattttggcagaccttcagatcttgctagagatgctgtaaaaaatttatgtgaattactacgtgtagctagatttgctttaaacattccagaagtttccccactactaattagtttttcagatgaaggattaacaaaacaatctaaagaaactttgcaaagtgcactaaatctctctcaatccaatgatttcacctatatatggtcttccaattag

SEQ ID NO: 70609 - DNA, 198 bp, Acinetobacter baumannii
atgatttcacctatatatggtcttccaattagtaaacgtggtgatattggactaccaccaaacttagtaaatgctatttttgattttaatcgggctaaggaatttgaagctttattaaaaaattatattatcaaatggaatcaaccatttactagagatgaatcatctttggcacatgacgatctttttaatttttaa

SEQ ID NO: 70610 - DNA, 1683 bp, Acinetobacter baumannii
atggctggtgaactttattattcagtttttacagagcaaggtttgtcccttttgcgccaagcaattcaaaatggaactaagctcggtattacagatatgtcattcggtgatggtggtggatcattacctgtaccagattcttcatttactcatttagttaatgaagtttttaaaacacagcttaactctttggcaccagatccaaataatggtaattggttacgtgctgaagccattattgctagcgctattggtggtttcaatatccgtgaattaggactttgggctgggaatgttcttgttgcttattcgaattatccaccaacatataaacctaatccaaatgatggcacagccagaattatgacatttcgtatggtaattcagattgataatactgctaattttgaattagtgattgatccagatattgttctagcaactgtacaagctgttaacaatgttaaagttgaagtacttgaaagtactgttccaattaaaaaagattttcccaaagttttagctgaaagaagtattagatttgatcttattcattcaaaaggtgcattacgttacggcttaaatgatcaggtacctttagatgatatggtaaagaatcatttccgaggtctgacaaacaaagatgcctgggctgaagaaaatattggtatcggatcagcttcatttggtcgtaatgggtgctcaccagcttatctttctaatacttttggtcatgatgctgtttcatatggtgtagcatctttggctggcggagctggagcatgtacaggtaatccagatgtaccaaaggatggtactaattatggttactgttcattttcctatggtaaaaatactaaagcccaaggtcgtataagtaatgcaatgggtgaagaatgtgagtcgaatagccgttatgcatctactgatggttataaatctattgcaggtaaaacacagccctcacatcctgattatgacttatatggtgatgatggtgctgaaggagcagcttcacgagcacacggttttgtatcgcaagcttacggaaattttgcgttcgcttatggttcgatgctggttgcttacaatggttcgcaagttatcgggaagggaattaatgaaggctcaccacttgcgataagtaaaagagggttaggtcttggttataacgtagatattccaacgatattttgtcaagaaggtccgggcgttaatggtggccatgcatgggtcggtttcaataccgccgagccgctaactaaatacgattatcgcttggggaaatcagacacagtaattcaccatattgatgcagatgctagcgactcgactcttgtagctttcgaagtgaaaggattgcttaataacgggacttacggaagcctccataatgttattgtcactcaccctaatgcaggtcaagcatttggtattgttcaatatcgtttaaacggtgttgaatatctaactgtagatcagactagaaaagcaaaattttctggtgcagttgaagcaagtggtgcaggttttgtggttgaaggtaaacgtgtggtcggaggtcaacttgaagcaatagctgatctagcttctaatgcatcccttgcagaagtgattctaaaagttaataaacttttagaatcacttagagatggcacaggacatggcttaattgcaaaataa

SEQ ID NO: 70611 - DNA, 1020 bp, Acinetobacter baumannii
atgtttaattatataatctattatttattagagatggatatgcctaaaaataatgaagagcgcaaatcaaaacgacaaaaaaatattgagacatgggcaatagcttttggattaatttttatgtttggtttttggttaaaatatcctcaatttgttgaatatataaataaagaaagaacgcctattgctgccccctacaaaccaggtgctcaatttgagatggcaaatgacccacaaaaaacttatatgcagagaattggagataactatggtacgtatggggatagttatggatcattaaatactttattcagtggcttagcctttgcagctctctttatttctcttttattacaacgtagagagttagaagctcaacgaaaagagctcgctgctcaacgtgaagaaacaaaagaaagtaataagattgcggaaaaccaaagaaaaattactgaacaacaagctgatttattagcccaacaaataaaaagtgtaaaacatcagcactttaatcaaattctttttaacttacttaaagaaaaaaacagaagaattgaatccatgaaatataaagatatggatggaatagaaatcattaaatatcttgcatttttatttatagatacaattgaaggaataagcttaagaggaatggatgataccaatagaggagagtatattgaacttataaaagaggaaactagtaattattattggactaaaaatgaaaatttcggttctccttttgaacgaactctatatgcaaactatatttccgacttaatttactatatagaagataatgcagaagaagattatataaatgaatcaatacaaactcttagaatgtttatttcacatgatgaactaatgtgtatagcgtggatggcaataatatatccaaatattgagaaacttgttaataaatatggattacttgctaattttagaggtgatgaatatccatatacagaatttaggcttcaattattattctctgagaaagcctttgagctttag

SEQ ID NO: 70612 - DNA, 789 bp, Acinetobacter baumannii; identical to SEQ ID NO: 66636

SEQ ID NO: 70613 - DNA, 342 bp, Acinetobacter baumannii
atgattacattccttaacgagcactggtatttcgtttatatcattgcaataacgattggtttgctgtctctttttatccgtctttatgtattacctaaaatacgatcttcggagggttcacagagtgatatttttttcgctaagaatttaatagaaatattaaattccgatcataacttagtgttgtatgtgaataactctgatggtaaatctgtggattccaatatgcgtaataagatatttattaaagatcctttacgttttgaagatgatctattgattactaaagcatccacgccacatatttactttgatccaaaaacattaaaagtgaaaggttaa

SEQ ID NO: 70614 - DNA, 405 bp, Acinetobacter baumannii
  misc_feature (6)..(15): n is a, c, g, or t
atgatnnnnnnnnnnccgcatgagggcgacaatattgctttaattattaaagatcataaaacacaaaaacagttgttttatgcgccagggcttggaaagattgacgatcaaatcatgcagattatgcaagattctgactgcgtcatgattgatggcacactatggacagatgatgaaatgcagcaaacgggcgtagggaaaaaaactggccgtgaaatggggcatctatacattagtggtgaaggcggttccttatcttacttaaaccaactcagtacaccaaagaaagtgctaattcatattaataataccaatccgattttaaatgaagactctgctcaatttgctgaactaaaggcaaatggtgtagaggttgcctatgatggcatgcaaattgaactctaa

SEQ ID NO: 70615 - DNA, 345 bp, Acinetobacter baumannii
  misc_feature (297)..(306): n is a, c, g, or t
atgaatttacttcttattgtggttctgggcgcgattgttgaaattgccgtatggattggcgtagcacagttcatcagtggatggtatgtgtttttctggttcattattgctttctttattggtctaacgcttattcgtaatagtacggctggtattatgccgcaactacaacaaatgcagatgactggacaattgggtaatgatccgactgtgactaaaaaattagcttatgcttttgctggttttttattaatgttgccaggtttggtatcggatgtattagcgctcttaattctnnnnnnnnnncttaattcttattccgggcgtgcaaactgcgtttcgtaa

SEQ ID NO: 70616 - DNA, 381 bp, Acinetobacter baumannii
ttgttaaatgaatttttattagcaaattttaagaatttatcaaggctaattacatgcttttgttcatcatcaggcaaacttgaaaaattcaccttgccacacattacaacaaagaaatatacccgtggtacaaaacctgggttagctgtaaatttatctttgagagtctttagcttattaacaagaatgtattgctttaagcgtgtcgtagatacgggtgatactcccatatcacggtcatccatgtaccaattaccattggcagacttaatagacttaccgttccagtcttttaattcaataactattaggacactgttggtcactaagattaaatcaaattccccttctttttttgagatcggatcaactaaggtatag

SEQ ID NO: 70617 - DNA, 1758 bp, Acinetobacter baumannii
atgattgttcaattctttagatatgggaacggtttaagtaaagggccattggattatttgcttggtaaagaccgtgatcgagattatgcaaaagtcctacagggcgatgtttccgaagtatcagggttaattgatacatcaccttttgccaaaaaatatacgtcaggttgtttgtctttttacgagcatgatttaagtgatcaagataaacagcagattatgcaaaattttgagcaagccttattccctggcatggatcagagccagtaccgtgttttgtggattgagcatcaagacaagaaaaacgaggagacggggaagcgaagattagagcttaattttctaattcccaatattgaaatccttacagggcaacgtttacagccatattttgaccgagctgatcgttctagagttgatctatttaagaagattacaaactatgaatatcaactgcatgatgcagatgacccgttgtatcaacaagacattaaacacgccaaaaacctacctaaagctgttaatgagattaaggaaactctcaatattttagctacgaaagctgtagagaatggattgattacagatcgtcaaagcatgaaaacgtggctattggatctcggtcttgaaatcagcagagaaacaaaaaaaagcctatctattaaaaatccaaataatgatgacccaaacgccagaccaattaagttaaaaggtgcaatctatgagcaggattttagacttacagaagaaagcgaacgacttactattgcagcatcagagcgatatagacgagaagctgaacagcgaaatcagtcaaatattcaaagatatgcggaatacagtgcgaagcgaagcacagagcttgagcagcagtatcgacagcaccaaagcggatatacagcagaaacagagcgaagcaacgaacgagatattgcagcagatcaacaagacgacagcccaaaccaaacaacagcagcagcagggcatgaacgatctattgcaatcacaacaacagcagatcaagcagctccaagcgaacttgcagcaattgaacggcttgagccaagaaacagctcaagcagccaaattaaggaaaacccttatttcatcgaatatagccctgatttcactggcatgtataacgcttatcagcagcatttgttttggttacgtcagcaagagcaagtacagcgacatcacagagatggagaacaaagtccagtggctaaaaagccaaggggcgagcctgaatattcagaagtgtgggacagagaaaaaatgggactggtgcgtccagatcgacccgaaagcgcagcagtacagcaacaacatgcgaatagtgcaggaaaccaattaaatgaatctcgaagtacagttattgcagattatcgagcagcaacagcagcagctcaaagagcaacagaagcagcaagagcaagccttgcagcttattcatgcacagaacagaaccatagacgaattagagaactacaacaacaaactggtgaagcactgcaaccagttgaacgagaaagaaaacgagctgatcaatatcatcaagaaactacagaatccgaagttatcagaggatttattacaaaacttggagagcagcttaaaacagcgattacagagccatttagagcaattagtgactgggttaaatctaaagaacgagatcaacgaactattgccaacgatgatctatacagaaatcgagaagcagacagcaccattgacccattttttaatagctag

SEQ ID NO: 70618 - DNA, 732 bp, Acinetobacter baumannii
atgcttttttatttacttagctattgtctagttgttcttatctgcgcagtgttccaatggataaataattgtgattatgtgctttcttcttgctcaataaatactgaaaatttaaatgcaatattgcaaacctcagcttcaataattacaccaatatttgctatatggggctattttacttggcgtgaacaagaagtttataaaacatcaaaagaaatcatggcttctattcttactcaaacaaatgatatctataaagcatggaagaatagtaggaactatatggatatatatagccgatttgatgcatattgtttaagggacatctttccaataagctctgaaacattagaaaatagcgaactatccagaaaagaactccaaagaataagaaatgtctatgtattgcttaataatctctacttttcgttaaatcaccttcatataattaataaaaaactgaatctagataagatttttgagacagttgataccattgcaaatgaattagaagaatgtatgagggagttatctgagtttcaatctcaattgactttcatcaaatataactacacagatcaaatgcaaccagaagaaagaataagagaaatctgtcacaaattagatttttcatcttctccgttagggcgtgtagatgattatggaaaaaaagtagatgatatttttaaagcaataacggatgagataatcaatttaagcgataaaatctaa

SEQ ID NO: 70619 - DNA, 948 bp, Acinetobacter baumannii
atgaataatgttcaattaacagatttttttaataatcttgcttataaaccatattgtgcagatgagttactgtatggcttaaaaataagaccgaagaaaacggcaatcaacatgcagtacatacagggaaatcagccttgtatgcttcattactttttttttgacatagatcgttctgatgcagtcatggcatggcatgacgaaaatttaccaatgccttactggacagcacaaacacagaaaaacggtcatgcccatatttgctataaattagaaattccactgtgtaccagtgagtttggtagtcaaaaagcaatagcctatgcatcaaagatacaagtaggacttgccaacaaacttggtgcagacgttggctatagtcatctcattacgaaaaatccatttcataaagactggcgtgtcactttttggactgaacaagcctatacgctcgattatttagctgattttgtagagttgcccaagaaattaaacaaaaatcaggaagttttaggacttgggcgcaactgcactctattcgatacagtgcgtaaatgggcatataaagcgattagagcgcatcgaggaggtacatttgatgtttggttaggggaagtcttaaaacagtgtaagaacgtaaataatgcgtttttagagccattactatattcagaggttcgagcaacagcaaaaagcattgcaatttattgttggaagaaagatgcttattgctatcaagaatttatagatcgccaaatccgtaaaggtaggttaggtgggcttaaaagtaattcttctaatggaggaatagctcgtgcaaacctttataacgaaagaaaaaaaatggctttttctttaaaagagcaagggataaagataaatgaaatagccctagcccttgatgtgtcaagaaaaactgtaagtaactggttaaaatctttaaattag

SEQ ID NO: 70620 - DNA, 450 bp, Acinetobacter baumannii; identical to SEQ ID NO: 68308

SEQ ID NO: 70621 - DNA, 159 bp, Acinetobacter baumannii
atgcttaaaacaatatataaaaaatgtggaattactttaatccagattatacatgtctctaaggatgtagttgagttagagggttttaatgatgatggtgagtggaataaagtggttttttttaacccgtcgtatagcttgaatattattgatatttaa

SEQ ID NO: 70622 - DNA, 147 bp, Acinetobacter baumannii; identical to SEQ ID NO: 56883

SEQ ID NO: 70623 - DNA, 879 bp, Acinetobacter baumannii
atggatattaacataggagtcgaacctgcctttttttattttaataagtttgtagtatattggggtggaaactttcaatgggttattcttttgatggccttattttctattactctaaaaattaattttttccttaataattcaaaaaattttgctttttcaatattaatatattattgctctatgttttttttatatgattttattgcgataaggcaagctcttgctatggctttctttatgatttcaattccttatttaattgaaagaaaatttttcccttatttgtgttttgttgctttagcttctttagttcatatatcagccctagttttactacctttgttttttttcatacactactcttataataaagtttttttatattcaatattaggtttatgtactttaattacagtattgcagactgatattcagttagttagtgtggttttaaactatctttctctaccaggatttgcctctgataagttagatatatatgcgaaagaagatgtatatgcagccttgtctcttagacagttattattaggatttgtgtttattttcttcttttctaaaaaagatgacaagatgattcaagttcttttaaatatctatatattagggattgtaattggaacattgctaaatgaaattccacaactttcattcagattaaaagcttatttcttatggtctgaatctgtactagtggttttctatatttacaagatatttaaaaactatagtttattaagagtatttatatatttagtattagctagtttatatatttattctttatataattatcttgatatcctatcacagcggcatattggttttatttatccttataaattattcttcgagtaa

SEQ ID NO: 70624 - DNA, 1305 bp, Acinetobacter baumannii
atgaaaaaagacaataaaaaacccctgttatctgaagctttggtcggcactgataacaagggtttgcaatctgctaatgcagatcaacacaggtatagaataacacgttttggaattttgaaacatagatcgaagcaacaagaaaattttttgtggactctagcaaaattcaaagaaaactatccaaacgacctaccaagcgaagagactacaaaggctctgaaatctgcacagaaattgcaagggtgcggtaatttcctgctcttcaaaaatttttacacaatagatcaaaccaagctcgcaaaatttcacgtatgtaaccagcatttgttatgcccattttgtgcaggtattcgtgcatctaaagcaattcaaaaatactcggaacgagtagatgaagtcctaaaacaaaatcgtaagctgaaagtggctcttttaacgctcacggttaaaaatggacatgacctacaggaacggtctagccatttgataacatcgcttagaacgcttatcaagcgcagacaggactataagaaaaaaggacgtggctttaacgagttctgcaaaattgatggtgcaatgtattcctatgaaaatacctacaatgagcaaacaggcgaatggcatccccatgttcacatgcttgtgcttctcaatgattggatagaccaggaacaactttctgagacttggcatgagatcactggagactcttttgttgttgatgttcgaagagtcaaaaaatccaaagaatttggatatgcaaaggcagcagccgaagtctgtaaatacgctttaaagtttggcgatctgacagtcgaaaagacttgggaagcattcaaaatcttaaaaggcaaacgcttaagcggtgcatttggttctctttacggtgtaaaaattcctgaaaacttagcagatgaaatgcccgatgatcaggacttgccatatcttgaaatgctgtacaagttcgtatttggcaagcattcgtactatgacttagttatgactcgtcaagtagagccacaagcaaatgaccgaatgaggagtgaggaggaggcaccgaccgaccgacacgaccgaatgagggattttgataaggcgataacggacgaagcgaggacgttgccggtgcgagggcacgcagtcacggaacgaccacagcgaggacgtaaaaaagcccactggagaatcccgcctgctacccgtgttcgggttcggcaacgaatccgaagatgggacggatatttatataatattgacctattcccgtatgttgagcataggctattagcttttattggttag

SEQ ID NO: 70625 - DNA, 438 bp, Acinetobacter baumannii
atgttattcaaatctttaggtgttgcaatggctacaaattctgcttctagctctgacgaagatactaaggcagtgactattcgtttaactgataatgaaattcagatttatgacacagttgctaagtcaatgggtttgactcgtcaagacttcttgtctcatatcattcgctctaatttccgacagtctttgaaagagtttgttattggttatacagattcaaatccaactactccattatcccttgtatttaattcacacactgaaaatgaagatgttcgacttaagttaaatcatctattgcgagttatttctcaagaattacagcaagaagatgaggaacaaagttatgaggaaatggagagttttgtttcttctccccttgcacctcctcgcaaaggcatttttgttgaaacgcttaagtcagaggagaaataa

SEQ ID NO: 70626 - DNA, 267 bp, Acinetobacter baumannii
atgaaattcacaaaattatcatccataaagtataataaaaatgataagtcatatcaaatagtatatgactttcaaaaactaactgaagactttacttcaactggaaaagttaattatgaaagatttccaattcaatatacattttccttgatttctgataaaagtaaactctttttaattaaagatattgttgaaaagagaaagggtgagaaaaacattgtttcgaaaattgaaaataataatatgtattcattttttttgaaatag

SEQ ID NO: 70627 - DNA, 444 bp, Acinetobacter baumannii
atgtctccgacaaacccggtacggttcactatctcagtattgccggccgaagaactaccggcatttgaatcgacaattaattggttgttcctagatccggaacttggtgaagaagaacagcaattccatatagccaaaatgtatggccaaagttatacggaacatccggagttaacactatatacacgaatcagtgatacggatccggagtggccgcacgtggtagcagaattcaagttaggtacgttgcatttaatcttcattcttcctttttctaaaaaagattcttccatattcaacttagaaacagacttcccaaaattgtgtcagctcttcaggcattaccaaaaatttgaagatcaaatcatttttgaaaatttatcgaactctgaagatagagaatgtgattataaagtaaggtttagcacagataaaattaattaa

SEQ ID NO: 70628 - DNA, 204 bp, Acinetobacter baumannii
atggctgtttcaaatactaatcttttagagcttctaggcaaacaagtttctttctcttggcttggtgctgatggtgttacatacaattctgagggtgaattgacttcaattgtttttcatttgcatgcaacgtctgagtttgctgtagatgaaggtgattattttagttttgatgaggttcagagctttcaagtagcacagtaa

SEQ ID NO: 70629 - DNA, 246 bp, Acinetobacter baumannii
atgactgtagaagataattttaaccatatgatgtctgttgcattgtctaatgctaaacaaagatcgattcaacagaatttggacaaaattaaaaacaatgctgatgatttggactctgttctaaatttgagagtaaacagtgctttaaagcaggaattcagcagaatttgtaagttaaatcagtctactgcaagttctgagcttaaacgttatatgctcaaaattgttgagcaaggttctttataa

SEQ ID NO: 70630 - DNA, 333 bp, Acinetobacter baumannii
atgaatagaagtaatcaactgagtttagatcttccggaatacgaagtaaaaaaagaagaaagttatgcaaattacaaggggaaatatactgtcgatatttctcaaatatacaggttttatattgctgtaaattcaataggaacactcattaaaacaaaagaaaaaattaaaggttttgattttattcttgagtgtgatgatgaaaaaattgcagatgaaatattagactgtgtacctaaagcaaaatcaagaaagtactttaaagtaccaaactttaaacctttactttatgaaccgtaccgggtttgtcggagacatttttatttaagttag

SEQ ID NO: 70631 - DNA, 621 bp, Acinetobacter baumannii
atgttgtctgaattatttatcaactatctcggaattaatattatcgatgacaaatatataattaaagatgaaataataataaattatgatgaaatctctatgtttgaaaaagtactaaaatgtgctaaaaatggtgatatagattctcaaaataaaattggaaaaatgtatcaacaaggttatggtattgaaaaaaattatgctttagcattctattggtatcagcaagcagcaaatcaacaagattcatttgggcagctgaatgttggaatgtcttatcttaatggtttaggcgtgaaacaagatatagatacagcattattatggttaaatagatctatagcacaagataatccagatgctcttattacacttgctgagatgtatgaaaatggaaagtttttagaaaaaagtattgaacaagctatttctttttataaaaaagcagtaaaacaaggaagtggtgttgcagcatatagattaggtttaatatatgaatatggcaaagatgctgtcgtagatataaaaatggcaaagcggtggtattatcaagcggtaaataacttcaatgaagatgctaaaaaacgtttagatgaattaaataatatggagagtagttaa

SEQ ID NO: 70632 - DNA, 363 bp, Acinetobacter baumannii
atgattgtgaaacaagtttttgatgagctaggcggatttgacgagaattttttcatgtattatgaagaaacggatttattatttagattaagaaaaagaaaatatcaaacatttattgttccagaaagtaagataatacacttagagggtgcttcagaaactattaaagaaacaaggcttaattggacatatgaaagtaaagaaaaatattaccttaaaaataagtctaaattatcattaacaatttcaaatatgattttttatttaacggttttacaaaggttggtattatttaaagttttacgtaataaaggtaaatatgattattggatgagtttttataattggcttcattctaaataa

SEQ ID NO: 70633 - DNA, 189 bp, Acinetobacter baumannii
atgactggacagcgcattgggtatatcggcactgttgcaaagttagcgatgaggcagccttttgtcttattcaaaggccttacatttcaaaaactctgcttaccaggcgcatttcgcccaggggatcaccataataaaatgctgaggcctggcctttgcgtagtgcacgcatcacctcaatacctttga

SEQ ID NO: 70634 - DNA, 567 bp, Acinetobacter baumannii
  misc_feature (545)..(554): n is a, c, g, or t
atgaagattaacaatgaacaaaaagatacattatatctgtttgttctacaaggtatgaattatttaataccaatattattgatgccttttttaatgattaaattgggggtcaagtcttatgggttaattggattttctactgcaataatccaattcttaattttatttgttgattttggttttaatatgagcgcaacaaaaagagttgcagttcataaagataataaggtagctttaagtcgtatttttttttcaactatatttgctaagatagtattacttagtattagtatatttgcttttatcataataataaatatttcaaaatttcatgaatatcaaatagcacttttatgcactctaccaatgcttattggaaatacttttacttttacttggttttatcaaggaattgggcatataagatttctttctgtattaagcatgtgttgtcgaatattaattttaccgtctttattttattttgtgaaggaagcacaagattacatttacgcaatacttataaattcatcagtttatatagnnnnnnnnnnatatgaaatttga

SEQ ID NO: 70635 - DNA, 582 bp, Acinetobacter baumannii
ttgtttgttgtaattttaggtctttttacaaatccagtagtagttggggtttatacggcagctgagaaaataattcgagctataagtttattattttacacaccaattaatcaagtatattatccaaaaattgctcatttagcatcacataataagcagttagctcttgatacagtagggaaagtatttaaatttagtttgtatttaatggtatttttatctctaacaatattgcttttctcatcatttattgaaaaatttattgggaacgaatatgagggtataagtaatttattgatgatattgtgtttagttcctatttttagtgcaataggtggggtggctggccaaatgggtctaattgcatatattgatagtgcaaaagctaagaaaactttccaaaatatatatattatagccggtctttttgctgtttttcaggtcactatttttacttatttatttcaagcagaaggcacaagttttgcggtcctatcaacagaaatgtttgtagctggattgatgatctactattttaaaaagtatttaaaaatagaagaaagaaacaagacttatatgtag

SEQ ID NO: 70636 - DNA, 342 bp, Acinetobacter baumannii
  misc_feature (305)..(314): n is a, c, g, or t
atgaaaaaacttgagcaccttacaggtaaaaaaatattgttcttatgtgtgcaaacttttgatttagaaaaagggattgttcaacaactagaaaaacatggtgctcaagtaacctattttgatgaaaggcccaaaaacaataactttactaaaggtttaattcgtttgaaaagggacttgttacagcgtaaaattaataaatactataataatattctaaaaaaacttaaaaatgaaaaatttgattatttattagttaatcgtggtgaagttgtaccttcttttttcctagagaaatttatacnnnnnnnnnngtgttcgtatattctacacttgggatag

SEQ ID NO: 70637 - DNA, 210 bp, Acinetobacter baumannii
atgaaagtgattaattatggtgatgggaaatctggatttggtgcaagtggcttaagtgcgaacttaaaagaaatgcataaaggatttataaaaaatcttaaatttgcctataaaaataacttaattactttcaataaatatatattagctcgaacaattgagcaattaaaatatatacgtcgaattgtcatagtagggttaaaaaaatga

SEQ ID NO: 70638 - DNA, 360 bp, Acinetobacter baumannii
  misc_feature (328)..(337): n is a, c, g, or t
atgctgttaaaagttggtgaattggctaagcaaacaggacttactgtccgtgctcttcatcactatgacgatatcggtttacttcagccttcggcccgttccgatgctggttatcgactatatacccctaaagacattactcgtttgcatcaaattcaagcattacgagggctgggtatgtcgctagccgaaatctatacggttcttgaagatcccaatctagcacttttaccgattattgatcggcagattcaagcaattgatcaaagactgacagagcagaaaaaattgcgaaatcagcttggacaattgaaatctcagctcatcnnnnnnnnnnaaagctcgcccataagtggatga

SEQ ID NO: 70639 - DNA, 789 bp, Acinetobacter baumannii; identical to SEQ ID NO: 66636

SEQ ID NO: 70640 - DNA, 198 bp, Acinetobacter baumannii
atgatgaaacaaaatatagctattatcttattttcaagctttgctttaagtgcttgtgcaacatctactgaatcaaatcaaaaacaaacaaagccctcacctgaactggagcaaaaaattcagaagttggttgagaaaactaaaaagaatatgatttttgtcgaggttgtagctatctcatgggagattttgggctag

SEQ ID NO: 70641 - DNA, 450 bp, Acinetobacter baumannii; identical to SEQ ID NO: 68308

SEQ ID NO: 70642 - DNA, 405 bp, Acinetobacter baumannii
  misc_feature (377)..(385): n is a, c, g, or t
ttgggttttgctgattgtgtcattgccaaaccagatgctcaagagcaaatgccacgttttttagaataccttgaacgtggttatcatgcagatatgacctatttagaagaaaatctggaaaagcgagcagatccaactttattggtgccaggaacaaaaagtattatttgcgtacgtatgaattatttggtggaatcgccaaaaccacgatatgtaccttttgaaccaaactctgcgattattgcccgttatgctcgtggtcgtgattaccataaggtgatgcgtggcagattaaaaacgttagccacacgtatccgtgaaaaagtgggagattttgaatctcgcccttttgcagactcggcacctatttttgagannnnnnnnnaggtaagtcaagtgatgtaa

SEQ ID NO: 70643 - DNA, 294 bp, Acinetobacter baumannii
atgattaagttggaaggaacagtactaaacgtatttacccaacaaggcggtaaagacaaaaaaacaggcgatcaatttgctgatcgtgacaaggtgcaaattttaggtgctatggatctgccaaacggtgacgtaaaaaatgaactttttacgttatcagtagagaattatcgggactttaaagactacctaaatcagaaaatttcaattgctgttggtgcaatggcaagtggtcgtaatgtgattttttatgttgctaaaggtgcaaaacctgttttagcggaaacaatgtga

SEQ ID NO: 70644 - DNA, 405 bp, Acinetobacter baumannii
atggtttttgtgataaatctagctttatcccaagaaaaaaatgaagagattattcagacacgattaaaagatatgcagccagaaattatatatattcaagaaacttcagaatcgataaacgataggaaattaaattactttgatgttcgaattaaaagcccagacaagcttaataatcctttttttgcacagcaatttattgaaaatttaaaaaaagttaccccggcattgatggatggaaatagtgagatactcttggtcttaagaacagatcttcaatttggtctaatttcaacaggccagtacagtctatattctgttgagcagaatgatacagagtttaacgttatagagcagcaaagttctgagttcaatcaaatatcctttttatcgatcaacttctaa

SEQ ID NO: 70645 - DNA, 330 bp, Acinetobacter baumannii
  misc_feature (250)..(259): n is a, c, g, or t
ttgtctttacagccatcttatattgctgggttctggcggaggacttttgcttttattattgatgttgtactagtgagtctattttgtgggcttattgttagtattttttcgcgtttattacatcagcatcctgtgatttctactttagtgggctattggtgtgtcattttatattttggattattgaatagccatttaaatctaggaaaaacttttgcaaaacagttattaaaaattaaagtgctggatnnnnnnnnnnctatcagttcccttatctatttcacgtgctgcgattctatttgcgcctctatgtttaatttctttaagtga

SEQ ID NO: 70646 - DNA, 177 bp, Acinetobacter baumannii
atgaactacgcactcaccacaagtgatgatgtagccaaactgacacttaaccgtcttgatcaggatgagctttataccatccctcaaatcgatgcgaaattgttctggctaatgaaacgtgcatcaccaagtttgtataccaagtttcttggcacatcgtacaaattatttaaataa

SEQ ID NO: 70647 - DNA, 177 bp, Acinetobacter baumannii; identical to SEQ ID NO: 70646

SEQ ID NO: 70648 - DNA, 177 bp, Acinetobacter baumannii; identical to SEQ ID NO: 70646

SEQ ID NO: 70649 - DNA, 177 bp, Acinetobacter baumannii; identical to SEQ ID NO: 70646

SEQ ID NO: 70650 - DNA, 177 bp, Acinetobacter baumannii; identical to SEQ ID NO: 70646

SEQ ID NO: 70651 - DNA, 381 bp, Acinetobacter baumannii
atgctaaaggatcaccagataacgccaattttgcaatatttggtccacctggatatggcagattcatcatttttgcgactttgtcgaaagcttcacctgccgcatcatcaattgactcacctaatagctcatattgaccaataccatgagctgccatcaattgtgtatgaccacctgaaacaagcaatgcaacaaatggaaactcaggcggttggcttgaaagcaaaggggccaacatgtgtccttccatatggtgaacaccaattgctggtttatttaaagaaaatgctaaagttcttccaaacaaggctccggtcattaacgctcccattaaacccgggccacgtgtatatgcgactgcatcaatttcctgtttcttaa

SEQ ID NO: 70652 - DNA, 348 bp, Acinetobacter baumannii
atggaaagtgtacgttatgatttttctccaggtactaaaacatatactgtctttcagaacttggttaacaatttttccgtaggtcaaatttacaatattatctatagagcaattgcaaacagtacagagcaatatcaatcaggaaaaatcactaaaatccatgctcaaaatatggttatctcatcttgtgaagggcaaggcgaaagagcaattgctaataactgggatcttaaaaactacgcaagagttaaagagttacttcagtcacaaataagcaaaatcttctttgattcgatacttcagatttcatatcttggattttcggagaaaccaacacgccgtttatag

SEQ ID NO: 70653 - DNA, 495 bp, Acinetobacter baumannii
atgcaggcaaccattgagcaagtttcaaatcagccatgggatgtcattgtaagttcatcattaaaaagatgtgtttgttttgccgagcaactggccaaaacagcagaactccccttacttgtaaatcatgacttaaaagaaatgtattttggtgaatgggaaggcatctcaactcagcaaatttatgaaacttcacccgaattactggcaaacttttggcaaaaaccaagtcaatattgtccacctcgcgcagaaacattagaccagtttcaaacaagggttcttaaaggctttcaagatttgctggagcatatgcaaaagcaaaacttacagcatgctttagttgttactcatggcggtgtgattaagctattggcttgtttagccagacaacagcctctagatgacttacttaaaatgccggcagagcttggaaaattatattcactcgaattttctgaaacagatggtcaattaacttttaagttaagatag

SEQ ID NO: 70654 - DNA, 177 bp, Acinetobacter baumannii; identical to SEQ ID NO: 70646

SEQ ID NO: 70655 - DNA, 240 bp, Acinetobacter baumannii
atgcagctcttaactgatatgggggcatcacctgtacttaatttgcttaaaaactatgaacgcgatggagagctagatttcatttcaacggatgtatattcatttcatgttgaccgctcccccattgaaaccgacacattcttatgtacttatcacggcgctgctagcgacattgtgccgaatgatcaggttgaacaaaaagttttaattcctgaaattagagaaaagctcaagtgctaa

SEQ ID NO: 70656 - DNA, 156 bp, Acinetobacter baumannii
gtgccagttgcagccttagtcgctaaattttttgtacctgtagctgcttcggtagcaaaatgtttagtaccagttacagcttcacttgctacatgtttagtgccagtagcagctttagaagaaagttcagttactttacctgttgtttttttgtag

SEQ ID NO: 70657 - DNA, 972 bp, Acinetobacter baumannii
atggctgtaccagaccaaacgccatataaagaatatgtcgctaatggcacgacaacaattttcccattagagtttgactgtgatagcgctgatcatctcattgtaaagattaatgatgagattattccagcacttaataattggtcattaaatataaatacaggttcagttgtatttaacattgcgccagttactgagtcaaaaataatccttaagcgtgacacaccgctgctacgtgataccgactacgcaacttataataattcaattagaccacagccagtaaatagcgactttgaccgcatttggcgcaagcttcaagaagttggcgtaacaaattggctaactgattcagatattaaaaatctgaatatttatgttgattcactcaatgatgaaacccgtgaagatttttttaacaagcttggaaatcttgagcagaatacaaatgcaatgcttcaagaagcaattgcaaatggaactgttagcgctttagcaattactacggttgaaactattgatgagttggacaccttaaataaatgggatgggcgcacagtctatgtcaaaggtgttgctaactttaaatatgattcagccgatgatgaatgggttcttgctccgaatacagccaactctttaattgatcaaagcggtaaaagtcagcaagaactcaatatgagttctatttatacagtcggatctgttgcagagatgctggctttaaatactgagttcagggttagaacggttcggattaaagctactggtgcgatgtatatctatgatccatcacaagccactgttaatgatgggttctatattcttaatggctgggttctggttggatataatgaccgccttcttgctaccttggcaggattaaaaggtgatggcacaaacgaatatacaaaattaaagtctttaattgatgttgccggggactgttctaaattttgtgtaagtacttaa

SEQ ID NO: 70658 - DNA, 1686 bp, Acinetobacter baumannii
atgctaaaaccaaaaattagctttctcgcattttttctactgtgggctgaatttcaggggtggaaagttcctgactttcatgtccgcgtatgcgagtttttagaatattggtatatcaatgggcgtacagcattattgatgatgccgcgtggtcattctaaatcaagcatcctagacgtttttaatgcatgggttatttattgctggcccgaagaaacaatgatattgcatcaaggcactactgaccccgatgcttttaaatgttccaacggtacgaagaacgttcttgaaaatcaccctctatgtattggcaatgagtctgtaaaacgccgtagtggtgaaacagaacgctggtgggtgcaaggttcaaaagacattcgttatggaaccatgctttcaaaagggatcctttcaggggtaacagggcatcgtgccacattcattcaaaatgatgacgtagagactccaaaaaccacaggcacacctgatcaaagggaaaagttgcgctttcgtttatcagagcaaacacatattgctattcctggtgcaaaaaagttgtggatcggaacaccacatgcgcatgactccctgtatgacgaaattaaaaaattacggaaagtaagcgtaatggtgctaaaaatgtttgagcatgaaagacgaattgaaaaagccgaagccgataaagtctatacactcaatttcgagccaatacattctttctcaggaataggtgaaggttctaaatatctatacaaaggtgaagattatgagtgctttaaatctggtgatttatttaagatcattctaaaaaaagacagctttattgttgatttttattctgaaggcatatggtcagaacgctttacacctgaagaaatggaagcccgccgtgaagagtgtaaaacattaaacgagtgggattcacagtatcaaatgcatgctaaacccgttggtgacgtgcgtcttgatccaagctttatgattccatataactgtgagccagttcttcgccgtgctaatggtcagtacattatgatgctcggagagcgtcaaattgttggtattacattccaatgggatccatcatcaggcaaaactaaatctgatatttcttcaacagctttagtacttcatgacgactttggtaataaatattggcatagatcctttaatttaactggccctgtagttgaacacaatgataatggtcatatcaatggggggcaggtctggcagttatgcgaccttatcgaagagttccatattcctaaagtaactatagaaactaatgggataggtggttttgcaccagcagcgttaaaaggtgcacttaaagcaagaaaaattagatgtggtgtaactgagaaacataatacaacgccaaaaaataaacgcattttagacgccttggaaggccctttattgtcaggtcttttatgggttcacacatccattacagataagccagaaggtggagaaaataactctactgtttataagaaatttggagcatttaacccagctctaacagttcaagaagatgacgaaatggactctttagcaggggctatcactgactcacctgaacgcgtcgggaaaatacacagaactgttgaatctaatgagcggcctaattggagaacaaatggtggagtcgttgaagccaccttagatttcaatgattag

SEQ ID NO: 70659 - DNA, 315 bp, Acinetobacter baumannii
atgcgtgacgatcaagttgagaaaatggaaaagctggcagaagaagttgctgatgattttattatcacaacttgtgcagctatcaatacctctattgctgataaacaaggccgtggtgataaaggtttcttatacaaaatatcaaaagatacggctggggtattggcaaccattgagcgagttttagcgtttaaaaatgggaaaattgatccaataagcgcgactagagaaacacaggaagcttatgaaaaaaagctagctgcagaagccgaagctaaagcacaaaaacttcgtgagcgaattcgagctagttga

SEQ ID NO: 70660 - DNA, 294 bp, Acinetobacter baumannii
atgatttataaaatttggcaatatggtacaagtctacctatacaacgtatagggttgattatattaactataggtctgatttctttttttgcatggagcattgaaacaaaaactgttttttggatcgatgcttatagcggttgggacccttatttttatccagatagatataattctatcttctatagaattcatttgctgtttattccacttggcttgttaatgacatggttgtttaggccagttactaaagttttgaaatgtttaggtaattgggtttttaaaaacaagtaa

SEQ ID NO: 70661 - DNA, 2541 bp, Acinetobacter baumannii
atgaaagaacaatgcaaacaagcggtagctaaagcacttggcaagcaatctttatcagctcaagaagcaacggatattgaatcgcgtattaatgaaacgatgcgtaatatggcgcgtaaggatcgtgataattggcgcaatctttctgatgctgaaaaattaacagaagcatcaaagcaagttgctatcgatattcaagaacaattaaaacgcaaacataaaattgctgctcaagacatccttaaacaatcgcaaaacattgcagcattagaccatggcaaattatcgtcaatggaagtcatagaccgcatggttgcagcccatggcgatatgtctggcattcagtcaattgattcaaaagcgcgtggtattgctgccatttatcgcggtgagctggtggacttctacacaaatattaaaggcggttttggcatcttcacagatcaagaattagtacaaaaaattgttcgagagcgatttggcgaaagcacaggcgatgcattagctaagaaaattagcgacaagatgggtgatgtttttgaaactatgcgtgaccgttttaaccggaacggcggcgacattggtaagttagataattggggattgcctcaaactcacaacttagaaaaaattgctcaggctggtaaacaagcatggttaagcaaggcagaatcattaattgacacacgccaatatgtgcatgagaacggcgattactactcgcaacaggaaatacgctcattgcttgaatatacctacgacacgttatcaagtgacggcgctaataaaattgaagtgggccgacaagctacaggcggcggcacttccaaagtcactaaccgtcatggtgaaagtcgggtattgcattttaaagatgctgaatcatggcttgaatatcaatccgatttcggcggcatgcaatttgtagatctggtcgaagctcatattaatggcctatcaaaagatattgccatggtcgaaaaccttggaagtaacccaaaaacagcattaaaaattttgatggatgctgcagctaataaagattggaaaaacgggatatcagatggaactactaaaggagttagaaaacgtgcacaggttatgtttgacgagtttagcggcggcaattctccacaatctcaagtattggcaaaccttggtttagcttatcgttcaatgaatgttgcctctatgttgggaggcaccacaattgcatcgattacggatcaggcaatgatcgctaaaacagcacaagtacatggtctttcatatcgtaaagctttcggcgaattaatcggacagctcaacccagcaaataaagcagatagagaactagctcatagcttaggtctggccacagaagaaatgctaggttcgattgctcgttggtcagatgatggacttacggcaacttatggtaaatctgaaaaattggctcgtatctcaagtggtgttgcatctcaggtgatgcgtgtatctcttttgaatgcccttacttcagcgtctaaagtaggtttcactaaactactaatggagaaatacggacgtttaagccgttcaaaagcatggaatgatttagacgcacaagaccgcgaactgctttcaaacactggtttggatgaacgtgcatggcaggtttttcaattagcagatccagtcgttgaccgcaaaggcaatcaactaatgtcagcgcgttctatctatgaaattccagatgaaaaattaactacatttggtgatccaaaacaagttaaagaccaagtagcttcacaacttcaagcacacttacttgatgagcagggcatggcagttattgaggcagggcttcgtgaacgtacgtggtttacggtaggtgcaaaaggtacagttgcaggagagatttttaagggccttatgcaattcaaatcattctcagccgcttttttgatgcgccaaggtagcagaacgctggctcaagaaggtttcaaaggtaaagctgcttatgcaattccacttgttgcaatgacaactgttttaggtggtctggttgttcaattgcgtgaactgttaaacggcaatgacccacaaactgtttacgacagcaatgaccctaaaaaggcgaataacttctttatgcgttctgttgttactggtggtggtcttcctgtattaggcgatattcttgttgctggaactgatccatcaggaagggattcaagcgattatttaactggaacctttggcggtgattttaaaagtttattgagcttaacagttggtaatttaactcagtacaacgaaggcaaagataccaatttcggcaatgaagctttcaaatttgtaaagagtaaaattcctgctcagaacttgtggtatacaaaggctgcaattaatcgtttattttttgataatatgcaagatctaatagcgcccggctatagagaaaaagctttaagaaaagcagagagagatcaggaccgtcagcgctttataggggattggtcgtggggtgaaggatttgatgaagctagggcaccagactttgaaagggttgtagaatga

SEQ ID NO: 70662 - DNA, 216 bp, Acinetobacter baumannii
atgtttccagttccagaagattttgattttgaaaaaaaatacgtttttatcgctggcaataacgaaatgatctttcaagtaataatggttttacctgatcattttaattatgttgatgaaaagtaccttacagatacctatcaactagataagccaattgaggaaattattcgaccttctactgctgaagaagaaagtgcagggaagcgtctttaa

SEQ ID NO: 70663 - DNA, 519 bp, Acinetobacter baumannii
atgactattaaaattattgcaacattagaagaattaagagaatggaatgttgaaaatttcattttcacaaatcaaatatttagacgtcatcaatacctagtattaaataatatggttggcataagacatgatgatgatccaaatcagatgtatgggatccctttttcttttgttcaggttcagaatgatgaacagaataatagttctactccagaaaaagctaaattgaaatttttgcgtttgtttactgaggttgttggtggccctaatcatggtgaactaataagcgtgtggggtagcgatacttttgatgcttttgctgagccagaaaatgattatctttggggttatgaaaaggttcccactgaactggcaataattcgatataggaaagcgaaaacattcgttgtattcaataataaatattatattagagaattctttatttgtaatagttctgaccaagacaaggctattagaagctttagaaattactttaatccagtatttaaaaagtaa

SEQ ID NO: 70664 - DNA, 549 bp, Acinetobacter baumannii
ttggcgcctttgactgcattactcttattctctgattggcgtttagagcatgttgagaaaagcagggagcagcaaggtagagcaatctataatctagtgaaacaggtcgactctattttaggtgaattagagatagagatagaagatgaaagcaacttttctaccgatgtttcaccgatagttgaagatttatcaaaggaactaattagaaaactttctacactccagcacgagctgaacgatttttattacgatgatccgcaggcaaatgcatttagagaggcagtagaaactgtcttgaaggagttgagggggaattattttctattaacacggaaattttctgtcttggtcaaaaagtataacccttcaaagtataactatgaatatcataatgaaagtgatgaagactttatacttagacaagaaggattgtatgaagaatatagcgaacaatatgttgaaaacttcgcaaatattggtacccagattgaaaatttaaaaacattgcacaatgctttgaaagtaaaagctgatagccctaattaa

SEQ ID NO: 70665 - DNA, 183 bp, Acinetobacter baumannii
atgacaatgaatcatattgaggttgaagctgtaattgagtgtgcaaaaatcaaagcaaaaagcgatattacagtagcagttttaaataatgccactagtagtggattggctgccatcaatgatggaagtaaagaaaagcttatcgagtttattaaaaagctacatgatcagattgatgaatga

SEQ ID NO: 70666 - DNA, 261 bp, Acinetobacter baumannii
gtgattgagttaaatggtggtgaattagatacgttgtaccaattagcaatcaatggacctcttgagagtggtgatatgcccagcaagtcaggtttcgttggattgtgcgacaaaggatttgctgtacgagacttaagcacatggcttggacatatcacacctgaaggaatggcttacttcaaagaatttgaatgggcaaaagggaaaggcgaacaaatccttttgcttaaacaattccattcaattggaggtgttcaatga

SEQ ID NO: 70667 - DNA, 339 bp, Acinetobacter baumannii
atgagtgagtttaaagtcggggataaggttgttttgaaaaacagtagccaagacaaggtaatgactattcaagaatgctacaaggaattcattcgagcatattgggatgacaaacattattcatttgctcatgaagttaattttcgttttgccacccccgaagaaatcgcagcaggctaccgcattgactttccaactttgcccaagccagtaggaagcttacaagaattgcatccagagtttgcaaaggttcttaatgagaattttctagagttgctaggcgacgacttccccatagaaaaccacatttcgcctaactgccaatcgagggatgcttga

SEQ ID NO: 70668 - DNA, 2406 bp, Acinetobacter baumannii
atggctgatgagatcgttactcgggaacagttagaaaatgcgtcaaaagatgcaagtagtttagagctatttattagtggagcggttgatgaagatgttttaactcgtttagggcaacaatatccaacattagctaaactcatccgcattctaatggaaacaggaggctggaaagcctatccaactgaggccgcattgcttgcaacaacgccaattgttaacccttcagttagctatgcctttgataccaagaagctctatttatggaatgggacatcttggataaatgaagggctaagccaatatgaacaatctaagctatacactgatgatctgttgccacaaaaaagccttactgtaggttcagttgaattagttggaccaaattctcggttgatagcaggtattggtgtcaacctaaatttagacattgttaatgattcgcgctacacggctatggttatcccatgttatgaggatacagagataacactatggaactctaataacggaaccgttgcgggtgcgggttttggctttacatttcacaatgcttatccaccatcgcaagcaaataaaattactccgcatcctggttttcatagcacagtaaatggcaccgatactttaattcacacaagaactccagttggtgctaaatatattgttgtgaataaaattgtgacatcacttagcttggatctcacatggaagattcaaaacggatatggccttgataaagcattaacttttaatgcagtcagcttaatgctggacggaaaatctagcgttttatttagaacatctacaccagataatctttattcaagttcaaatgtggtgccgggtaaatatctcaatctgactgatggactaatccgagatatcacaacaaagccaaattggaaactaggcgtgattccagttgatgctggtgttacctatcagctcaagttgattggtgatccgagcttaattaagccaagctttctcatgaatacacgttcaattgctcaaaacaccccaactaccttggcgagtttaactagtcttggtgataatctgtactcatgtgttgcacccgcaggcgcaacataccttgttttaacacttgatctaacaccagattatccaagcgtcgctatttcaaactcacttgctgtgcagcgcattaagaatgcaacgggactatcaattacccatatttctggcattccgattgctgatccaattgcaagagctgggattttaaaatctagtatttacactgattcaaatatttacagccagtctcagaataagactgactggtacttaagtattgttaattcaacggttcagccgcgtacagattatcactggaaaatggcaatgattccagtaaagcctggtggtgtttacagagtagtttgccctagaccaagtaatacatataacttgcgttttacagagttagataatcctttagttacgaatactgtaacgttagcaccagctcaaagcacagtaattgatgacaataatattgaagttgttgcacctagcaatgcgaagtatttactcattaatacttatattgttagtcctggctttaactatgacattacatcgacacttgttgttaaggatgtaagtaatgctgttaaaacctcatctgaaatttcgatgttgaatggattaagtttacgggatagtgattctagaaagcgactggatgcgcttgaaactagaacaattgattcaattctaaaaggcaagaagtggtgtgtagttggtgacagtattactgcacaaactggccgttcaacacacaattaccattattatttgtcccaattagttggcggaatgacgatatataattatggtatttcaggtactggcttttttaataggtcgaatgtttcagctgatattgtagaaactgatattgatttcatttcagtttttatgggaacaaatgactggggtaatcagacttctgaaaaccaaaaattgcttggagtatttggagatacggggaccacaacaatttcaggatgcattaacacaacccttagtggattaatcaataaattcccattaatccctttgattttgttaaccccattaccacgtggtaacaattatgggttgaacgctactgataacgcttatggctataacttaaaagacttagttgacttattgcatcaatatgcaacacatttctctttaccaattcttgatctttatagtggatcaactttatatccatggcaagctacagctaacgacttttacttcaagcctcctgctggtagtggttacccagatgtaggtgatggattgcatccgaacgatgaaggtcacaaagttttagctcacataatgcggttgcctttagagggcattcagcacaaataa

SEQ ID NO: 70669 - DNA, 381 bp, Acinetobacter baumannii
ttgcctaaacgaaagggggaaggcatgactgaaaatgaatcatacgggttgagattcgaaaagaaaattgactccattcagagtgatattcgcatgttgtcagatcatgttactcgactgactttcattaatgaagcgcacaaagagactagcgaacagaacaaaaaggatatcgatacattggatatcaaagtcgccaatttagaaaaccgcacagcagcgcaagatggtggtctttctgtattgcgtgtactgcttggcatctttgcaggaatcgtattttcgctgtgcgcttgggttggatcttcaattattcaattaagccaagatcaatctttaattaaagaaaaagtatcacggttagaggaagcaggacgatga

SEQ ID NO: 70670 - DNA, 219 bp, Acinetobacter baumannii
atgaatagtgaaaatacaagagcttatctagctttcgcattagtgggactgatgtttgttttagtgattgctttattttttgtggatatgccgcgagaaaacagcaatctgatcaatacggcattgggttttattgctggggctatgacaactgcatgtggtttttattttggtagctctgaacttgagaaaaagaaaggggaacgagatgacaaataa

SEQ ID NO: 70671 - DNA, 303 bp, Acinetobacter baumannii
atggataacgtagctcagctagaaactgatactaatttccaaagccgaaagaaaataacttggggtgtttttagtgtcctgctgttatttttagttgctggtatcttatattatttttttgtataccgattctatcaatctactgataatgcttatgtacaagccgatgtcacttgggtaatgccaaagatttcaggcgaagtgatggagttattaattaacgataatcagtttgtaaaaaaaggggctttgttgcacaaacctatctctaaaggcttattccacaatataattttcaaatga

SEQ ID NO: 70672 - DNA, 957 bp, Acinetobacter baumannii
atgacaattcttcaaaatgcaattgattcaatagcgcttggtattgaagattatgaagaagctgttcatgattctagacgtttgatttcatgtacacggaatatattttcaggaatacttttactttttaaacataagcttagtgaattaagcccagaaaattctgatgaagtacttattaagcaaaaagttatacccagccagagaactggtgaaattagttgggttggagaaggtaataaaacagtagatgttcaaggtatagaagatcgttttaaagggcttggtattaaagtagattggacacgattaaagaaaattcagaaatatagaaatgatattgaacactactatacaactaattcatcatctgctgtacaacagatgatttctgattcttttttagttattgtgaactttatttcagaatatctaaatggagatccaagagatttactgggtgaagacatttttaacgtgatgaaagaaattgatgaagtttatgaacaagacaagaagctatgtgtagctaaattccaaacactcaaatattttcatcctgctattcccactgtattaactgatacaagttgttttgaatgtggatctggttttctaaatcctttaaaagataatacttatgcagaagaaacacgttatcaatgtagatcttgtaatgctgaatttgactatgaaaaattagtaaatgttgcatttgaaaatgagtttagtttatctactagagatatcatgaatggtgaagaagatattagctgcaattgccctgaatgcggagggtattttctatatcaagagggagtttgtgtggcatgtggttacgaaaataatttaatttgtgagctgtgcgatgacaaaattcctccctcagaggttgaagtatttgaaggacgttgttcatattgtaattataaatgggaaaaaataatggctgagtaa

SEQ ID NO: 70673 - DNA, 555 bp, Acinetobacter baumannii
atgaatttagaaaaaagattggaaatctataaagctgaatattattttcaaatagattttaaagaaaaattatatgcccgaatggcaatttatgcagttttgataactggatgtattaccgcaaatatcacaatgtttgacactctaattcttaattctgaaatgctccttacgttctttatttttttatgggaagtaatgatagtgttattgatttttactttgtatggattttactgcctctcacacatcaagttagatagttggacaaatacctcaagtgatatggaaaattatagaaatgtactagagaatcattatatacaacatagtcaaaccacaattcaagatccaaattttgaaactgaaaaacaagaatatgtaaatgatcaatacacactttatcttgtagagcagtattctcaatgtgctactgttattcgcgataataatatttatagacagcgttggttattaaaaattatgtcgtgtacctatgcactattaattcttacaggtatattgggttgtatctatctaatagttaaaatttag

SEQ ID NO: 70674 - DNA, 318 bp, Acinetobacter baumannii
atgcttaaattcttattatgtgttgctatattaatcgaaacaattgctacaacttttttaaagctttctgatggctttaccaaacctctttttagtttcattacaatcctcggttatatagtttccttctatttgctctctattatcgtaaaagaattaccaattggaattgtttacgccgtatggtctggtatgggtatcatcttgataagctttattggctattttttgtttgagcaaagcctaaatatttcaagtctaactggtatcgcttttatcattataggtgtagttcttgttaatttttattcgacataa

SEQ ID NO: 70675 - DNA, 570 bp, Acinetobacter baumannii
atgttgagccgctcaaactatatgaaagtttttaatgagcttgatgagatttatacctctaagtcttttgaacatctcagtcttttaacttttttaaataaaaatgtatatgaatctccaatgatttattggaatatcaatacgaaaaatgaaattagctatgactgttcgataggaattgataataactttattgaattataccatttatattataaagcgttagataatcttcatcctcaaaagataggaaatcattttttagatagaagtaatattatttgtgagtttgattatatagataaaaaaaattatgaaaaatctgttttttataatgaatttttaaagaaacaagatgcctataatattatacaactacatctaactcataaaaataaagcatttggaataattaattttttaacaaataaaaacaaaaacaatgactacctgagtttaagttttttaacaaaaattatttccaaccatgagttttataaaaataatagtaaaacaattaatcaatacgatctcacaaaaagagagtatcaaaagatattccttttctag

SEQ ID NO: 70676 - DNA, 417 bp, Acinetobacter baumannii
atgaaaccagagcagtttattcgtcagtttggcgaaaagaaggcgagagaggttgttgagggggcgccagaaggtgctgaattttaccacaatgacaacaacgaatatgtgaagaatattgatcaggagcacttagagcaagctcaagctgaacctaaagagagtcatttagttaattttgattcatcaagttcagagggttggattgaaaacgcagcatggattgaatacatcaacgtgcttattgacctttccgacctcaagcgccttgtggagtctgttgatttagtaaatagcttaggtggaataaaagcagcacgttcagaagctcataaagattgttttgtatataaccagccattgctagccgctattgcagcatacgaatcaatatacggaggcggggaaaatgcataa

SEQ ID NO: 70677 - DNA, 423 bp, Acinetobacter baumannii
atgagtgagtttaaagtcggggataaggttgtttgcaaatatgagcatattatattgtttggaaacgttgttttagagatcaagaattttcgagaggatcttaaagagattggggacttctgcacattcaccaatggtaacgattactggttgagtgctttaaggttcgccaccccagaagaaatcgcagcaggacaccgcatagacatgcccactctgcccaagccaattgggagcctacaagaactgcatccagagtttgcaaaggttcttaatgagaattttctagagttgataagtgacgattcccacacagaaaactgcattggctgtgttgataaaccctcggattcgggggaattagaaaccctagacaaaccagaaaaccatatttcgccgaattgcgaggtcaaaaatggataa

SEQ ID NO: 70678 - DNA, 339 bp, Acinetobacter baumannii
atgatcacaatagaaaatagcaatttaataaactggcctgaatatcctgaatatgtttgtgccattgtgctttgcaataatgtggatgtgaatacaagtgatgggcttattatgccaaaaggtacagagtttatttggcttcttagtaagatcccaactcaaacaggtgcatctgaattaacaatctgcaatgcaaagctattatgcctcgacgggtttgggctatggaatgggctaaatagtggcttttgtgagtttctagatccacttgagcttcatatcaagccttgccttaaaagtaaggcgactagtttgaactataaggagtgtgaagcatga

SEQ ID NO: 70679 - DNA, 471 bp, Acinetobacter baumannii
atgagcgaaattatttcagctgataataccgagttattaatgcgcattctcagctatgcgcaagagcagcaacatttggttaatgctgttgaaattcaggaacaggtggcgcagctaccacaggttgaaattccaatctttcatcattttgcaccaaacatttacatgcgccagatgaatgtgaatgcaggcacattaatggtcacaaagatgcacaagactgagcattttttaattgtgttgaagggtagtgcaacgatcttggatagtagcgggctgatgcatgtccaggcaccacagatcattaaaacgcaaaaaggaaccaagcgggttatctattttcatgaagatagtgcctggctaacaacccacccaaccagtgagaccgatttaaatttaatcgaagatcagcttattgttccagatgatgaaattaatcaatttttaaaaagtattgaggtatcagcatga

SEQ ID NO: 70680 - DNA, 378 bp, Acinetobacter baumannii
gtggaaatatataagatagtttctttttgctttataccttttttaataattacagcattattaacaagtaaatctattacacttggattggtgcgtgctactaatagtatttattccttaatctctatcattggtatagtttgggggatctttgtaattattagtctatttggttggtggtctattcttgtattaccgattgtatggtttttctcattaatagttgttgctaactttttgactaaaagagacagtcggtcaggattaacagctggtgaaacattattaatgaatcaaggaatacttggatttttcaccacatgtttattgatttttagccttttgccatatagtttgaaatggctggatataatttaa

SEQ ID NO: 70681 - DNA, 192 bp, Acinetobacter baumannii
atgaaaatagtatcaggtagggatgcgcttattgcagttgcattgggatttcaggtttatacaaggccgaaatcagaattggttgaaaatagagtttggagtcgagtttctgataatgcaaatataagactatttcttggagatgaaagtaatcaaatctttgaatatggtgtagaagtaaaagaaggataa

SEQ ID NO: 70682 - DNA, 1683 bp, Acinetobacter baumannii
atgtccaaaccaaagataagctttttagctttttttctactttgggcagaactacagggctggaaagtaccaacgtttcatattcaggtctgtatcttcctagagaacttttatttaaatgggcgcactgcactgctcatgatgccccgtgggcattccaaatcttcaatgctagatgtctttaatgcatgggtaatttattgttggcctgaaacacaaatattacatcaagggacaactgattcagatgcatataaatgcagtaaaggtacacgtgatgtactggagcgccacccactttgtgcaagcaatcataatgttggaattagacagggagaaatagaacgttggttcgtaaatggaactaacgatgtgcgttatggcactatgctagcaaaaggtattttatcaggcgttacaggtcaccgtgcacactttatccagaacgatgatgttgagacaccacagacaacagccaatccagaacaacgagaaaaattaccaaagaaattaagcgaacaaacacacattgctataccaggcgcaaaaaagctatggattggtacgccacacacttatgactcgctttatgaaaaaattaaaaaacaaaagcgagtaagcacatttattctcaagatgtttgaacatgaaaaacgtgttgaaaatggcgagaagggacaaaaggttttacttgattttgagccaattcactcatttgcggggattggtataggtgcgaagtatttaactaaagatgttcattacacatgcgtaaataaggggggcacatgggaagtaacacttcttgagtctcactatgtaattgacttctactctaagggtatttgggaagagcgctttactccagctgaaatggagattcgacgcgaggagtgtaaaacccttaacgagtgggactctcaatatcaaatgcacgctaagcctattggcgatgtgcgtttagatccagacaaaatgctggcgtacgattgcgaaccatatattaagcgagcaaatggcgaaatcatccttatgcttggcgatcgtcaaatggttggctgctcacttaagtgggatccatcgtctggcaagcttaagtctgatgtatcgtcagtagcactatttttccatgatgcattaggtaataaatactggcatcgctctatctctctaacgggtcctgacgtaatcacagatgaaggcgggaatattgtaggcggtcaggtttggcagctatgcgatttaatccaagagttcaatgttccgagagtagtagttgaaaccaacgggataggtggatttgcgccttcatcactcaaaggtgcgcttaaaaagcgtgggattcaatgtggtgtaactgaacaacatgcacaccaaaataaaaataagcgcattctagaagcaatggaaggccctttaatgtctggtcttttatgggctcatatttctgtgcttgaggttggagaaggagaaaatgtagaggattcaccacaagtaaaacaaatgcgtgaatggaaccctgcgcttagcaatcaacctgatgattacatggactcagcagcaggcgcaatcgttgaacagcctgagcgtatcgggaaaatacacaacaaaaacactgttaaagaagccgttaattggagaacaaacggtggcgtatacgaagccacagtagactttgattag

SEQ ID NO: 70683 - DNA, 180 bp, Acinetobacter baumannii
atgaaatacttatattttaaagcaatatttttgctatctgttagtcaatttatatatgcagcagatcctcagctcaattcaagttttaaagtacaagctaaaattgaaaatggctgttcaatggctttgttgcacaaacctatctctaaaggcttattccacaatataattttcaaatga

SEQ ID NO: 70684 - DNA, 1002 bp, Acinetobacter baumannii
atgactcaagatttccagtctcaatcaaatccacgttatcaaattatttttgatattattaaatctgcaatagattctcgattgttgcccataggtgcagttttattagaagcaccaatttctaaattatttaatactagccgagttcctgtacgaacagctcttcagcaattaaatgattacaagttaatttctaggtttgatggccgtggattcctagtcaaccctgaacagcttgaaattgaacctatacgaattaaattaacaaaagagttgttaggattatcttctcatgatgaggttattgatacacgctcactcagtgataaggtgtatgatgagctttatgcatgtatttcaaaaataatattacatggacattatcgtctcaacgaaaaaaaagctgcactaagcttaaatgtaagtagaagtgtaattcgtgaagctttaaaaactttacacctacagggcttattagaaaaagaaccttatggtgattggttagctgggccgctgactgcacaaagcgttattgaaaattatgaattaagattaattttagagcctatagctcttaaagcgaatgctcataatattaattattcccaactacaacaaatgtttgacaatattgtatatgctgaaaagaatttaagttctatcaattcacaatttattcaaaaaatcgaaaatgacttacaccatatcacatgtgatatatcatggcataataaaaaaatggcaaatgtactttatcagtcacaaagttctatttctatcagccaagtattacaccatgacatccatataaatgattatatgtttatgttagaagaacataagtctgttatagatgcactactatatggatctatagataatgcagttcttagtttagaaaaacatctgattaatgcaaaaaaaagatctattgaatatttaaaagtattctcaattatacctgagcctaatacccccgactatttagagcggatttcataa

SEQ ID NO: 70685 - DNA, 1170 bp, Acinetobacter baumannii
atgaaaaagcctatattaagaattctggggacatcagttactttaattgaagagatcagaaaacaagctgaaatagatttgggtattaaaattgagtatcaaatacacgatcctgaaacagcccaacgtattgcagtacttagtccagataaatatgacttatatgaccaatggtttcataatattgattttgtgtggcctgtaaaatctatccaaccaattgaaataagcaaaattaaacgttggaatgaaattaatgatttagcaaaaaagggtacattaatttcagatcaagctttggctaaaggtggcgtgccttgtgatcgcttgtatatacaagaagatggaactctaggaagtaatgaaacaaatttaatcactatgttaccgcttacgcataatgttgatagtttcgtatatttcccaaatttattacctgaaaatttaaaatcgacagatgaaagttggtcatggttacttgatgaaaattggaaaggttctgttgcggtacaaaatgatgctgcaattggtgggttagacctggcaatggccgtgcaatctagtggtaaattaaatttccaaaatgtaggaaatttagctttacatgaaatagacgctttaactgaaatattgaaaaaattaaagcaacagaatcatttcaaagacttttgggcagatgatgagcacgcttatcaacttatatcaaataaagagattaatattggaagtctatggtatccggctttaattaaattattaaagaataaaaaggattttagaattgctaaacctaaagaaggttatcgtgcgtggtttggtggtttggcgctgtcacgtgatttaaaatctccacttaaagaagtagcatatgattatctaaattggtggttggaggggtgggcaggatcacttatggcacgacaaggactttatatatcgaatccgttgcaagcacgtaagtttttaaaagcaagtgaatgggattattggtatatgggtaaacctgcagcagaggttttatatggggtagataatcagccattaattgaacaaggttctgtaagagaaggtggttcatatattgaaagaatggggcatattggtgtgtggaattcagtaatggatgaacataattatttagttagaaaatggaacgatctggtcagttaa

SEQ ID NO: 70686 - DNA, 1245 bp, Acinetobacter baumannii
atgataaaaatcaagaaatttacaagatcctgtagtgtagtaatacttactgggttaagtagtaattctatatatgcaaatgatgcatttgagacaaatagtccttggatgttaggggattggtcaggtaagagaagtcagcttaaagaacagggctatgatttttctataagctatttaggagaagcagcaacaatactagattccaaaaaggaatcgaatcatgattcagcatatgcagatcactggggctttgcagtgggttttgatttaaacaaaatcttgaattggaacggggctgaagcctatataaatatcacacaaagaaatggtaaccaagtcgagcataaatcagatgttcttgcctcccatatcagccaagtccaagaagtctatgggcgaggtcaggcatggagattaacagatctttgggtcaagcaaaaacttttgaatgaaaaattagatattaaaattggtcgttttggtcaaagtgaagatttttcaagttttgattgtgaatttcaaaatttagccttatgtggtggtcaaataggacattggtcaggagatcaatggtttaatggtccagtgagccaatgggcagcacgtgttaaatataatattaaccctgaaatgtacactcagattggtgtgtatgagtataatccgcgtaatttagatcgaaacaaaggttttaatttaagtacagatggttcacaaggggcaattatacctttagagttggtttggaaacctaaattgaattctaatgagttagatggtgaatatcggtttggttattattttggtactgctgacgcagataatgtacaaactactgcgattgaaaatgtacataaaagtggcgcttgggtttcctttaaacagaaagttagccaagacagcgataatccttcacgtggcttaacggtcatgggacaagttgcaatgtatgataataagtctagtatcttcaatgacgctgaaaatattgctttagtatataaaggattatttgattcacgagtacaagatgaagttggtttaggggtttctcgcattggtttagatagtgaattaaatcctgaattagaccatgaattgaatatcgagttatattacggtattcatgtaactgattatttgaccatacgtccaaacattcagtatgttgagcatatcggtggagatgttaagaatggagatgtatggctagctggtttaaaatttaatatcaatttctaa

SEQ ID NO: 70687 - DNA, 960 bp, Acinetobacter baumannii
ttgattcctattcatatcatcacaggttttttaggtagtggtaaaactacatttattaaaaagttgcttttaagtgaacaaggccatcaaacaattgtattaattaatgaactaggtgaaattgggattgataatctcttagtgcaaacaatccatgaaaatacatatctattacctagtggttgtatgtgttgtacggtgctaacagatttgaaagaaacgttgttatctgttctaaaagcaagaaataataaagaaattcctttttttgatcggattgttattgaaacgacaggaatggcaaatcctgcatcagtaataaagacaattcagcaagatacacatttgaaaggaggttttatagtacatggtttaagtacgatcgtggatgcggaaaatggaatattgcaatcgaaaatacacccagaatgggctgcgcaaatcattgccgcgcagcaggttttacttagtaaaactgatcgagttaataagcaaacattgactagcattcaacaggaaattttagagttatatcccgacataaatcttgctaatgtaaatgaaattaattcaattaatgaattatttaaatctaatgttgaaaaagtaaaactcacgtcgagcatgcgtttttttaatcaacatgaaaagcaaaaacaccaaaaggctcaaagttttgttattcagtatgaagaaaaaatagattggatgaaaataggtatttggctaagtttattgttaaaaaaacatggagaaaaaatacttagaattaaggggtttttacatttaaatgatactgatcaacctatattaattcagggagtacagcattgtttatatccaccagaacatttacttgaatggccgtggttagatgaatattcaagacttgtatttattgttcgcgatatagagatagagttactaaaaaaatcatttttattattcatgaaaaaataa

SEQ ID NO: 70688 - DNA, 300 bp, Acinetobacter baumannii
atgtgtgggctttgtggtttgattggtgaagaagcagaatggagtgatggacttcattcttcactaccaaaacgtcgaaatcgcttaagacgtatactttttataaatcatgtgattaagccttaccgtttaaatatcactgattttcaaggagtaaattatcttgtagaaacacttactggaaaacagagtatagcaaatggtttgaataacttatgggatgaaattgaaaagcttactggtcgtgaaattgatgtgttagatcctttaattcttaatcatctggagctttctaattga

SEQ ID NO: 70689 - DNA, 750 bp, Acinetobacter baumannii
atgaaattattaagtgattgtcgagttgttgtgacgggtgctgcaagtgggattggagcagctatttctttagcatttgcaaaagagggggcatcgcttgttctcagtgatttagataaagagaaattacagaaacaagaaattagttgtaaacaatatacaaacaaagtggtttccgtatgcgcggatataggcactgaggctggtgcaaatgcaacaattgaccaatgcttggagtcatttgggggtatcgatgtattggttaataatgctgggatattaacacaagctccttttatggaaatcactaaaaatatgtgggatgaaatgctacgtattgatttaacaagcatatttttaacgtgtcagcgtgcgctaccttatatgcttgaacaaaagtggggacgtattattaatatctcttcacaattaggtataaaaggtggtgttgagcttgttcactattcagccgccaaagctgcggtaataggttttactaaatctttagcgcaggaagttgctaaagaaaatatattagtaaacgtcatcgctccaggtccaatttttacatcattagttgatggcataagtgatgaatggaaagttgaaaaatctaaggaacttccattaggacggttcggaacaccagaagaaattgcacccacagcaattttacttgcctctgagccaggtggaaatctatttgttgggcaaactttaggaccaaatagtggcgatgtaatgccttag

SEQ ID NO: 70690 - DNA, 765 bp, Acinetobacter baumannii
atgtcgaaatttcccgttgctttaatcactggcgctgctagtggaattggtcaagctttagcagttgcatatgcagaacaaggaatatgtgttgttggaggatattttgaaaaagatccgtatgacccgaaaaaaactcaagaacttgttaaggaggctggtggtcaatgtgtaatggtccccgtagatgtaacaaatagtctttctttagattatgcagctaaggtagcaatagaccaatttgggcgtttagattacgccatcgcaaatgcaggtttattacgtcaagcatcattatctgaaatgacagatgagttatggaatgaaatgttgaatgttgacctaactggagtaatgcgtacttttagatccgcgtcaaaatatatgggcaatggtggagctatgatagccatttcttctatagcaggtggcgtttatggatggcaaaatcatgcacattatgcagcttcaaaggcaggtgttctagggatttgtcgttcactttctgtggaattggctccacaaggtatacgttgtaatgctgtcattccaggcttaattgaaacaccacaatcacttgatgaaaaaaattcattagggccgaaaggattattagaagcaggcaaaaagattccactaggacgagttggtcgtcctgaagaagttgcaaaacttgttcgttttctcactagttctgatgcaagttacattacaggtcaaagcgtcattgttgatggcggattaactgtacgttggccagattaa

SEQ ID NO: 70691 - DNA, 1371 bp, Acinetobacter baumannii
atgaatatgggaataaaaaaagagcaagaagtggatatttcagaaagtttacacagtgaggatgactggaagcctggagaaattaaacagaaagatattaattacgcatcatggatcgcattttttgcctgggtatttgcagtatacgactttattttgtttggtacgctattgccggttatgggtgatcactttaattggaacgaggctgagcaagctacattagctaccttaattgcaattggtggcgccgtagttgcatttgcaattggtcctattgtagacaaaattggacgtcgtaaagggattatttttacgatgactgggacagcaattgcaagtgctctaacagcagttacaggtacaggtaaaagtgcattagtcgcaatacgatctgttgctggtttaggttatgcggaagaaggggtgaatgctacttatttaaccgaaatgtacgcaaactcaactgatgaaaaatttaaaaaacgtaaaggctttatctattcacttgtacaaagtggttggcctgtaggtgctttgcttgcagccgctctaacagcaattttattaccttacgtcggttggcaggggtgttttattttcgctgcaattcctgcctttgttattgcatttttagcaaggaaactaaaagagtcaccacaatttcaggtatctcaaaaaatagcagatctaaaaaaacaaggaaatttaaaccaagctaatgctatcgctaaaaagtttggtgtagatggtgcagaacatcaaaaagtaggggttttggctgcattcaaaggttcagcactacgtccaaccttagttatgagtttagctattttattaaattggtcagctattcaggtatttagtgtgctaggtacttctgtattgatcaatgtacataacttatcttttcagaactcattaattattttggttttatctaaccttgttggttttatggggtacttggtgcatggctggcttggagatcgaattggtcgacgtaatgcagtagctattggatggatgattggtggtattgcattttactcaatggttagtgtttcaagtgatttagtgacagtcgtagcactatatagcatagggttatttttcttaactgggccttactctgcaatgttgttctttatgggtgaatcttttccaacatcaattcgtgctactggtggagcgattgtacatgcaatgggacctattggagcaattttagctggggtaggtatttcaacaaccttaacaggtggtggagagtgggcaagtgctgcaatttggtttggggcattaccttgtttcctatctggccttgtaatgcttgcagcacgtcatgttaaccctgatgaagttaaataa

SEQ ID NO: 70692 - DNA, 882 bp, Acinetobacter baumannii
atggctaaagaaattttagtatcgtttggaattgatgtagatgctgttgcaggttggctgggatcttatggtggtgaggactcaccagatgatatttcgcgtggtttatttgctggtgaagtaggttcaatgcgtttattggatctatttaataagcacaaaattaagacgacatggtttattccaggtcactcagtagaaacttttccagaccaaatgaaggctgtagcagatgctggtcatgaaattggaatgcatgggtatagtcatgagaatccaattgcaatgacacctgaacaagaagaggcggttttagataaagcaattgaattaattgaaaaattatctggaaagcgcccaacaggatatgtagctccatggtgggaatttagtaatgtcactaacgaattattactaaaaaaaggcattaaatatgaccatagtttaatgcataacgattttacgccttattacgtacgtgtaggtgatacctggacaaagattgattatagccaacaacctgaaagttggatgaaaccattggtacggggtgaagaaactgatcttattgaaattcctgcaaactggtaccttgatgatttaccaccaatgatgttcattaaaaaatctccaaatagtcatggatttgtaaatcctagagatattgaacaaatgtggaaagaccaatttgagtgggtataccgtgaaatggattatgcagtttttccaattacgattcatccggacgtgtctggtcgtccacaagttctgttgatgttggaacgcttaattgagcattttaaaaagcatgagggtgtcaaattcgtaacattagatgaggctgcaaatgacttctctgaaagatatccacgtaaaggctaa

SEQ ID NO: 70693 - DNA, 1335 bp, Acinetobacter baumannii
atgcatgatgcaacggaaactgcaaaccgttttttaactcaacaaacagatcctgttaaagagttagaaaaactgagtgcaaaaattaaagcggctgaaaatgtatttatttctacttgtttagatagagcatatagagaagcacaggctgcgaaagaaagatggaaagctggaaacccattatctatttttgatggagtaccaatcgcttggaaagacttatttgatttacacagtttaaatacaacagctggatcaataaccagccaaagcaaaaaaccagcattatctgatgctttattagtacagcagctaacccgcttcgggttggttaatgttggcaaaacaaatttaactgaatttgcatattctggattagggctaaatccacattatgggactccaaagaatgtacataattcaaattgtattcctggaggatcttcttcaggagcagctgtctctgtagggctcggtattgttcctatttcttttgggacggatactgcgggatcaatacgtatccctgccgcatttaatggtttagttggattcaaaagtagtcacaaccgttactcaaaaataggcgttttcccattagcccacagtttggatagtgttggcccaattgcacgaagtgtgcgtgattgtattgccttagataatttattgactgatcaagaaaaaaatcctgtatctcacttaaagcagccacatttttgtattgatgtagggtttattgagcaattagaactagatgaatctgtaaggcataacttttttaaggttgtcactcaattacaacaagttggtgcaatagtcgaatttaaagaaattaatggatttcgccaatctatatcattgattaatcagagtttatggttgggggcggcggaggcttacacatgtcatcaagaattattggaatcagaagaagctcgattaattgatactagagttagaaaacgtcttgaatctgcaaaaagcattctagcttcgactcaaatcaagttgtaccaaacagctttaaatttgaaacgacttattcgcgaagaattggatggcgcctgtatgttaactcccacagtcgcacatactgcccctgaaattaaaccattgcttgaagatgatgagctatttgttgaaaccaatcttaaaactttaagacttactatgcctggaagttatctcaatatgccgggcgtcgcattaccaaatggtttcgatcaaagaaaattaccaacaagcattcttatttcaagttatgaagagaatgatagaagagttttgcaaagtgctgaatttattgaaaatttaattaaaaaagttcaataa

SEQ ID NO: 70694 - DNA, 195 bp, Acinetobacter baumannii
atgtcaactcagttaattaagatttttaaaaatggaagcactaactttgtagacttgccagctgagttagataagaatcgcgaagtcaccaaaatttatgactacgatggaaacgagcttaaaattaacttcttacgtgatgaggttttttataaaggcatctggtgtcaatttcagaaaaaacagggcgactaa

SEQ ID NO: 70695 - DNA, 378 bp, Acinetobacter baumannii
atgcaagaaaatgcgattccatgggtgttaaaggtttttccagcagtaattggggcaatattagcgttggttttaagcggtgatattgataaagaaggaaaaattaaagtttcaatgagcgttgttacaaagtttgcctgtagcgtaactgtcagtttatatggcggctctgcatttattgagcactttggttttcttacacactcaacgatgttccaaggtttcatcatgctgatttttgcagtgtttggccttttggttattggcattgtttatcaatcaatcgctttgatgaaaggtaaatccctttcagaagtaattgctgaagttaaatcggcgtttgtcgcaatcataagcgggaagggtggtgacaaatga

SEQ ID NO: 70696 - DNA, 1506 bp, Acinetobacter baumannii
atggaacttacacaaaataatttacaggctcatgttgccgcttcactcaatttgccaattgatttgtgtcggctttctttaagcagctctaatcttgtagctacaggacatttaaagtttattggaactgggggtattaagttatatccaggtctaaaaggttccttattaacgacagcatataatctagaaatcaacggaaaaattgaaatagatcagaacaaagataataacgctgtaggacctgttaccgccgagtctgattgtgctatcaaacattctggtgattcattgattcttaaaggagtagtttttaaaccatcagcatcggtaaatatttctactcgacctaagaaacagcttatctgtgaagatttagaagttgatggtggccagatcaacctttatgtaattcctgctgtagatgcaaaagttattattgatcgaggtctttaccagaacgctggcgtgtacgacaacattcaaattatttctggttcggatatttctataacaaatattacttctcgctttgcagccagaagtggaattgttgttagcaatgaaactaaaaaagccagacttcttgctaatttatgttatggcaataaaaaggatgctgtaaaccaaggagggtggggaatcgtatgttctgttaatacgcaagatactctcgtatcaaataacattctaatcggtaatcaggtcggtggtatttcaatggataccttcccagattcagaccaaccgagtttaggaagtcgattatgtttatctgccaatattatttatggtctatatgaaggctcttatggtgtaactggcatctctttaaacgatgcttcaaacgcaattctttcaacaaattatatctttaaggttgcacaaggcatccacactgatcgtgcacactttgcaaatattagtactaatacaattcaagatgtcactgcgtattttattcaattatatagaagtgatgatgtatcgatgggtaagaacttattcaatggctgttctgtatcgggtgctgcttcagtcaattgcatcgactcatcaaggtttaatattgatggtccaacgatacgtaatttgacaggtccagctggcagtgtgttgcgcgttagcggaacatctaaagactggacaattcagaaccttgacgttgttagaagtgttgcaggctctgggtatattttcaatatattaggttctggtgtttcaaacggagttattaaaaactgtacgtttaaaggacttgtaaatgcatcatggcaatggtttattgcctcagataatattgctcagttctcatcgtttaataatacagtcaatgctcccggcacaaactacatttatcaaggtagcaactgtactgctggtgatgatttaattaatggtgtaaagaatctgtatgcagctgctccaacgtttaaatctgtgactggtcaaattgcggttattgctggtgcaattaaattctataacggctcaacatgggcttga

SEQ ID NO: 70697 - DNA, 1179 bp, Acinetobacter baumannii
atgaagcagtctggagctttcttggctcgtcccatgcttattttgacagtcgctctggttggactcaatttaagaccttttatgaccagtattggtcctttagtctcaaagattcgagcaggtactggattaagtctacaaggaatagctttactcactttattgcccatgatgttgatgggacttattgcctttattggtccaatcgtacagagcatcgttggagaacgcagagttgttttgggtgctttgctgactatatgtattggatgcgcacttagatttttatttcctacagctgagggcgtaattgctagtgcaataattattggtttaggcgtcgcgctgatacaggctgcttttccaggaattattaaacgagagtttagtcaacatatcgggcctatgatggggctttattcagctatgcttatgggtggtggcgcactaggcgcatggttggcacctgtgatttccaatataacgggtctatggtcactggggctggctttctttactatacccgctgtattagcattagtatcaacatttatttttttaccctccattgtaagttcgactgcccatctgtcacctgtaaaaacattattaaagaaacctagaacatggttgttaatgctgtgttttggtttggtcaatggtggctattcttcggtggttgcgtggttggcaccttcgtttcaagatcatggctggagtatttctcaaagtgggaaattgcttgccttacttgccttgagtcaagcagcctcggctctgtctttgcctattttagctaggaaatataaagatcgacgtccgtggttgtggtttactctattcatgcaatttgctggctttgcaggacttgcttttatacctgaatttgcatctgtgttatgggcaatttgtttaggaataggcttgggaggttgttttgccttaacacttattgtggcattagaccattttgaagagccgaacaatgcgggtgctttatctgcacttatgcaaggaggcggttttttacttgctgcaataccgccttggtttgtagcagctttgcatgactttacagggacttataaggcaggttggatttttcatttatgtagtgtgatattggttattgtgttagtggtaaggttagctccaagaagttataacaaaattcactaa

SEQ ID NO: 70698 - DNA, 360 bp, Acinetobacter baumannii
atgaaatttacaaatattggtattgaaggttttaaaataggtataagcgcacctgatgatcttgacctaactgctgaaaaggtactttttaaaaatgtagaaacatgcattgaggtcagaaaggtggctaagaaaacaagtaaaaaaaatatagccagaagcgcaccagacaaaaaagtaaaaaaagataaagaatcaaatctagatataaatgaagttattcaaaatcttcataatttagaaattcaatcaaaaataaataaagattttgaaaaactcgagaagataagaaaactcaaaggtttaatcggctctaaaaaatttatttgcgaatattcaaccttgcgggagaaagggtga

SEQ ID NO: 70699 - DNA, 360 bp, Acinetobacter baumannii
atgatgaaatttagtgatactgaagccattgattgcggcagagtacttgatgctcccaaagatgcaaatattgaaatggtaaaaactaaagctaccagagtagatactgtattttatattagagataatgaaaaacaattaaagcagaaaatcttagaaagtgtggttgatggaacacctcctgaggtaatagagaaatttatacaatctattaaagaattagacgatattaaagcagattctgttgaattacttacctatagaactgggttggcaaattttgtgaaaaaaatcgttggtgttgtaggttttgttgcttcaatagtcgggattatttcaccctttctcccgcaaggttga

SEQ ID NO: 70700 - DNA, 387 bp, Acinetobacter baumannii
atgttcctgaagcaaaatacgcacaataagagcttctcatgtgaacgatgtgaatggtcatgtgaaccatttcagaaaatcattcacacgctcaaagccttacctaccaatgcatacaacaaccatgtgaatgatgtgaaccattttttcgcgcgcgcacgtgagagaaaaaatcacttattacttaaattaaatcaatttaatttaaatattgttcataaattaaacataagcaaaaacactctcacgcgaggaaatatacataaatcattcacatcattcacatgtaatacaatttattgtttttactcatgtttctatgtgaaccattggtcaaaatcattcacacaaccattcacatcattcacatggaattttgaggattaa

SEQ ID NO: 70701 - DNA, 636 bp, Acinetobacter baumannii
atggaaattcaacaattaaaagccgctgaagttgttcgcaatcaatacggtttctggaaccatcctgaatgggcaaattacttcaaaactaactttaatcagaatgaacatctttccgatgaagaaattacacgtgtacatattcatttcaatgtaacgactgaccgtgtttattttgaaacagatgcacctgaagaattaactaaacgatatttcaataatggtgaccaatcagcaattatcgaatggaacccatctaaaccagatcatgaccgtgattggtttctagtatctatttttgaaaatagtaatggtgatgtcgttgctttatgggcaaaacaatacaacaccctcttatcaattgaacgtccgctttttgagaaaaattttgttgaaaattgtggtgatcttcgctttttaaaatgggaagaatgctcggacggtaacggttcatatcaaactgattgggatgcattcggtcatcacaatgattctgaagatgatgaagcgatcatggaacatgctgaacatgttacctcttgcctcatgtcatggcttgaatgtgccaagttaaaaaataaggaaattgatgctctcaaagtcgagttagcaaaggctaaggaggcttcaatatga

SEQ ID NO: 70702 - DNA, 357 bp, Acinetobacter baumannii
atgaatgaaattgtagaagcacttattcaactcggtcttattcctctggattgggttgatgctagtcagttctcaaaattgactggtatcgaagagcaaaagctaactcacagacgtaaaaattggcccgaagatttagtttgggcaaagcaagacggcaacatatattattcaatcaaaggttataaccaatggctgacagaacaagctcaaaatcgttacctcaaggcgtgcggatcagaaatggcgcagtgcaaatctatttcgagcgaaacaaacaagcctacaacatcacgttaccgcaccccgcgagtgcagaaggcatcacggcagccgctaaaattagagatcaactaa

SEQ ID NO: 70703 - DNA, 192 bp, Acinetobacter baumannii
atgaagcacgaaaacaaagtgtttgctctggttgacgtaaataactgttatgtcagttgtgaacgtgtattcaatcctgaattgattgataagccggttattgtcttatcaaacaatgatggctgtgctgtcgccagatccaacgattatgtggaattgaattgcaatagaaaaatcactctaacccaataa

SEQ ID NO: 70704 - DNA, 1245 bp, Acinetobacter baumannii
ttgaaacagattctcttggcacttaaattaaatcttcgcaaactgattctgatttcgactatcctcagtgtttcgtgtttatttattgtttctgtatttattctcaattatgtcattaaagaccaattaattcagaattcacttttagtgaatgtcaaatatgcctcaagggttgccaacagcgcagatcagcatttcgatgatatgctcaaagaattaaagtatagtgctgagctgttagggcaagatttttctaatccccaattaatccaagaggaagcaaagcgtcttaaacatcaatccaacaaatttaacagtgtattgggtgtggataagcaaagcagagttatttcttttgcaccgcaaagtttaaacttgagtcctcatattttatataaaacagtgggaattactgaatccttaaagaataaaagcacttatatttctcccccttattggtcagttaaacataatctaattgtactgctatctcaaccgatctatgaccgcaagaaaaaatatcagggcatggtggggggcacgatttatttacaaaaaaataatctgatccagaaaatgctttctaccgaatatgactttaagaaaagttatatgtatgtcattgatcaggataatcgaattatttttcatcccgatccaagcagaatcggagagaaaattatcaataataccggactggattatatgatccgtacccggctggggagtgtccggttaatcaatagtcggggaatcgaaaatttggccggttttgcctacattcccagtgtgaactggattgtcgtctcccagcaaccgacggaagagttgttcaggcaggctaatgttattcttttaaaagtctccgtcggtattttaattttttatatttttatttttattattgtctggagaatgtcgcgctttatttcttcaccgttaaatagcttggcaaaaatggccagcatgctcaatcagcctgacattcaggagaacattaaacaagttgatccttggtattttgaggttttaaagtttagaacctcattgttacttagctcgcaaacctttagtgagaagattgctgaattgcgtcaacatgtgaatactgatccactaactggtttatataacaggcgggggatgcaaatatttttaaaagaagtgatgaacttaggacgagattttgctgtgctagcgattgatatcggtaagcgtccgctgaatcccatgcctattttttaa

SEQ ID NO: 70705 - DNA, 219 bp, Acinetobacter baumannii; identical to SEQ ID NO: 42617

SEQ ID NO: 70706 - DNA, 555 bp, Acinetobacter baumannii
atgacaactaaaccattcttcgatgctgccagagttattgcaggcggcaagcttacacaggcacaagtagatgatctaaataaagtggtcgaaaaacttgcaccaggtggaaaaactacaagtgatgttggcgttgacctaatttctagttttgaaggcacacaattcaaagcttatgacgatggtgttggagtctggactattggaactggcacgactgtttatccaaatggtgtgaaggtcaagaagggcgatacttgtacagcagaacaagctaagacttactttaagcacgacttagccaaatttgaaaagactgtaaatgaatcggttactgtgcctttaactcaaaaccaatttgatgctttggtatcgctgacttacaacattggctcaggtgcttttaataattcaaccttattaaaaaaactgaataaaggtgactatcaaggcgctgctgatcaattccttgtctggaataaggcaggcagtaaagtcatgaaaggtctagttcgtcgccgagaagcagagcgagcactctttttaaagaagtaa

SEQ ID NO: 70707 - DNA, 495 bp, Acinetobacter baumannii
atgaaaagaaattacttaaatctaaacatttacaatgggatggttagttttgaaaatttagaatttaaaaaagatgatacaagttcatatacaggagcttttgatttttttattaattttttgcaagaaatagatataccagaaaaagatttaaagggtaaaaatcaagtaatagaaaagctagatatattagtaaggattatcaacaatcttataaattttaaagagaaaaatcacaaactagatgaaaaacttttatttatactttccattataaataaaagttttaataagtttattgagtatgatattagtattactgaattactaagagaagttaacacaactcttgaaaatgaattatctgacattttcaacaactatctcaactcagatttcaatttatttacctttaaacaactaagcaaaacatctttagaggaaaaatggctttgttgcacaaacctatctctaaaggcttattccacaatataa

SEQ ID NO: 70708 - DNA, 1377 bp, Acinetobacter baumannii
atgttagtaagattctcaattgaaaattttctttcttttaaagaaagaacattcttctcaatgattcctggtaaaacaagaagtaaggcatatcacaaaaataagacagtatctaatattcaaacattaaagttttctgccatttttggcgcaaatgcttcaggtaaaagtaatttaataaagtctatagatttcggtaaaaagttaattctaggtaaagaaaaattaagttctatcgaaaatcaaaaatttaaattaacggatactcctgaattaaatagccgttttgaatatgagatacaagccaatgggttcatgtatgcctatggctttgttatttctaagaaaagcatagttgaggaatggttatatttagtagatacaaaaaaagaaattcttatttttgaaaggcttaatgatgatattactatcaataatcaattgattagtaaattcccaaagcatgaaaaagagttttggaacttttttattagttccgttaaatcagataaattaattttaactcacgcctcacagttagaaattaataaggaattttcatcttttaatcatgtaagaaatattctgaactggtttaaaaacagcttaactattgtttatccaaattccagatctgttggtatccattttgaattactaaaaaatgaagatctacggaatatgtttggtaagtttttatcttattttgatactggtattcattcaattgattttgaagtagttgaacctgcaaaaatcaggataccagaacatattctaaatgagactatcgaggatttattagaagaagatggtgaaaagacaacagctattctttctgaaccaagatcaggtcaattagtattcatacaaaaagatggtacagaggtgacctgcgcaaaaatggtcacaaaaagaaaaatttgtggcactgaaaaatatgttgaatttgatccaactgatgaagagtcagatggcaccaaacgtttattagatctaatacctctacttgttgattcaatggatggtgataacgtcattattattgacgaaattgagagaagtcttcatccaaatcttgtcatgaattttatcgagttttatttagactcttcgagaactgcaaaaaataatactcaattaattttagcaactcatgaatcaggcttattagatcagaccctacttagaaaagatgaggtatggttcattgctaaatctcaagatggttcttcccatgtttcgtcattagaagaatttaaagtgcgttttgacaaagagctgagaaagaattacctaataggacgatttaatggaattccaaaatttggaaataagttaaatttagaagacactaacggaaatcattatttttaa

SEQ ID NO: 70709 - DNA, 693 bp, Acinetobacter baumannii
atgccaagagatgctattccatttgagagaacaagctcagtaacagatgtatataaaatctttttgatagctgcagaaggttttaaaactgaatttttttatttatctgctttaaatgagaggcatgggcgaatatgtagactagtaccatttaaacgacctccagaagaagcatctcattctgcacctaatagagttctaggtcagctaaagagagaagcttcaaaacttaatctcaaagaggatgactcttgttggttagttgttgacagagactcttggggacaagtccttgttgatgctgttaatgagtgcaaacgcctccaatataattctattgtgagtgctccctgctttgaaatttggttattattttattttaaaaaactgaatgaattaactgaagatcaaaaaactcaacttatttcaaatgaatatgtgacaaccagagaaacttttatcgaaaagttattaaccagctttatggcagaattaagattagggaaatataaagcaaataaagaattacctgaatttttctttgatcctaataatattcaaaaagctattcatgaagctcgttctattgaaatagaagagatatctaataatgatagttatgaatttccgaccctaataggttcacaaatgtatcaaatgctttctctattctttcaggaaaacactatatag

SEQ ID NO: 70710 - DNA, 1437 bp, Acinetobacter baumannii
atggcgatttaccacttttcagtcaaaaccgtagcacgatcagcaggacgttccgccactgctgcgattgcctatcgggcaggtgaaaagatctattgtgaacgtgaaggccgagaacatgactacagccgaaaaactggtgtggaatacaaagaaatttatttaccagaaggcgcaccggaacatttaaagaatcgagaaaaactctggaacgaagttgaacaacgggaaacccgaaaaaactcgacagttgcgcgggaatttgaaatcgcttttccaaatgaattaaatcaggaacaacgcctggccatgctcgaagaactatgcgccagtatcgtggacagacatcaggtggccgtcgatgcctgtattcatgcaccgcatactggatctggtagtgatgaacgcaattatcacgcccatatcctgatgagcacacgcaaacttactccggaaggcttcaccgagaaaacccgggaactggatcagaaacacagtggagaaatcgaacactggcgcgaacactttgccgatatctgcaatatgcacctggatctggctggatacactgcccgagtcgaccaccgcagctacaaagaccaggagaatggtttagaagccacgctgcacgaagggccgaaagtcaccgaactgcgccgaaaagggattgagaccgaaatcagccgaagcaatgacgaaatcaaacagagaaatcaggctcagttgcaatacggcaaaaatatggatctgctgattgctgaaaatgagatcaaactcaatacactaaaaactgaacagcagatccaaatcaaaaatagtgctaaaacgccaccaattgacgaaaaagccctgtttgaagaaaaacagagggaaacccttggcaaagtgctaaatcgcgaaatcagcgcaaaagacgcgaatctagacctagaatttatgcaggatgtttttaaaaaggcagaaaacaccttgggcaagatgcaaaagcataaaaatgagtttagtcagcagctcgcccaagacatcgtgaaaaacagactgaaacaaagtcatgacaagttgcaaagtctggtcgatcaacacaataaattaacccagaacaaacccttactgtttggaaaaaaagcctgggaagcccaacgtgacgaggtttatcaggaacacaaaaagctaaaaggtcagcatgaacaccagaaaaaacatggtgtgaaggatttattggaaaatgaaaagttcaaagaacatgcctggaagcagtaccaacaacaacatccggccaaagccaagcaataccagactctatactcaacctatcaagtcattaaaaaatgtgtgaatgagatcaaagcagaacaacagctgaaactcagacaagaacaacaactcaaagcacagcaacatgcgcctagaatgaaatctcgtggcatgagtcgctaa

SEQ ID NO: 70711 - DNA, 321 bp, Acinetobacter baumannii
atgttagggatggtttcccaggatgatggtattggattaatgagtgttactgaaacattagacagcaaaattaaagcccaggaagaaaagctgaaacagcttaaagctcaaagacaggcagcactggcaagagaacgagccaaagagaaagaacaggcaagaaaggatgataccagacgtaagattttaatcggatcctgcatgttgaaaatcaccgaagatgatgaacaagccagagctaaattaattgctcagatggataagtatttaacggatgaaagagatcgtaagctgtttgatctaccggcagttaattattaa

SEQ ID NO: 70712 - DNA, 192 bp, Acinetobacter baumannii
atgagattgctaattgctttaatttttccatggttgctgtttttcactataggaagaccatttgcaggcatcatttgtttggtactccaaattacagttctaggttggatcccggctgccatctgggcggtctatgctttgtcgcaatacaagactgatcagaaaattaaaagagcaattcgctcatcataa

SEQ ID NO: 70713 - DNA, 693 bp, Acinetobacter baumannii; identical to SEQ ID NO: 70709

SEQ ID NO: 70714 - DNA, 1377 bp, Acinetobacter baumannii; identical to SEQ ID NO: 70708

SEQ ID NO: 70715 - DNA, 1488 bp, Acinetobacter baumannii
atgttatccactattcgagaacaatggttctctaatattcgcggggatgtccttgcgggtattgttgtcgctttggctctaattcctgaagcaattgccttctctattattgcaggtgtcgatcctaaagtcgggttatacgcttcattctgtattgccgtggtgattgcttttgtaggtggtcgccctggtatgatttctgcggcaaccggtgccatggcgttattaatggtaacactggttaaagagcatggtctgcaatacttattagcagccacaattttgacaggatttattcaaatcttagccggctatctaaaattaggtgccttgatgcggtttgtatccaagtcagttgtgattggctttgtgaatgccctggctattctaatttttatggctcaattacctgaactcactaatgtgacatggcatgtctatgcgatgacaattggtggtttagccattatttatctattcccttatattccagtgatagggaagcttttaccctctcctctcatctgtattgtcttacttacgctctttgccttattcattggtttagatgtaagaaccgtcggagatatggggcaattaccggatacgcttccaattttcttgcttcctgatattcctttaaatcttgaaaccttaacgattattttgccttattcactgggattagcagccgtaggtttgcttgaatctatgatgacagcaacgattgtcgatgatttaacagataccaatagtgataaaaaccgtgagtgtaaaggacaaggcgttgccaatattgcttcaggtttcttaggcggaatggcaggctgtgccatgattggtcaatcgattattaatgtgaaatctggtgggcgtacccgtttatctacatttagtgccggggtcttcctgttgattatggtggtgtttatcagtgactggcttaaagtcattccaatggctgcactggttgctgtcatgattatggtatcaattggaacatttaactgggattctctgcgcaatatccgccaatatcctctctctagcaatatcgtgatgatcgttacagtcgtcgtagttgttgccacacataacctggcttatggtgtattagtcggtgttcttctttctgcattattttttgccaataaaattgaacgctatatggcgattcaatctgtatttgatgaatcagaaagcacacgtacttatacggtaacaggtcaagtgttcttcagttcagcagataaatttacttctgcatttgatttcaaagaggcactttcaaaagtggtgattgatgtcagtcaggcacacttctgggatgtttctgcggttgctgccgtagataaagtggtcattaagtttagacgtgaaggaacagaagtcgaacttattggaatgaatgaagctagtaaaacattagtcgataagtttggtatccatgataagccagatgctttagatcgcttaaatagccactaa

SEQ ID NO: 70716 - DNA, 852 bp, Acinetobacter baumannii
atgtcaaaaattattgcatgtattgatggatcactagtaacaaatactgtgtgtgattatgcagcttggtttagcgataaacttaattcacctattaaactattgcatgtcattgataagccaaaagcaaaagcaccacaagatttaagtggtgcaattggtctaggaagtcgagaaaccttgctcaaagaattggttgaactcgaagaacgtaagggaaaaatcgagctagagcatggccagattcttcttcgggaagcaaagaactatttattggagaagttctctattgatgctcaaagttttcaacgccatggcagtgttttagaaacaatcatgggaatggaagacgacattagagttcttgttatgggtaagcatgggaatgaaaccgagcatgattccagtaaaattggaacccatattgaaaatgttgttcgtgcccttcataaacccgtattaataacgtctgcaccatttagtccacctaagtcttttttaattgcttttgatggaagtcagactgcacgtatttgtgtagacaaaattgccaatagccctttattaaaaaacctgacagctcatctggtatatgttggtaagccaaatagtgatatgacatctcaagtcacttgggcaaaagagttgcttgcaaataatggttttgatgtcattgagagtgtactcgaaggtgatgtcgagaaatcaatattagattaccaagagaaaaactctattgatatgatggttattggtgcatatggtcactcaaaaatacgccagttttttattggtagtacgacgaccaaattgttatcaagctctacaaaaccagtattattattaagataa

SEQ ID NO: 70717 - DNA, 144 bp, Acinetobacter baumannii
atgccaaaattgaaagacattgccctgggcattattgtggccccactgttaatcccaatcatgctggttgcatcgtaccaggataaaaaggcactcaaaaaagagctgaatgaacgccaaaaagaaaaagaccaggcatcctga

SEQ ID NO: 70718 - DNA, 576 bp, Acinetobacter baumannii
atggctaagttatcactaagtgaagtatctaaaaaattccatgtggatagatcaaccatttacagagctgtacgtaatggacgtttatcacgctccagtgatggacaattcgatctagcagaggtcatccgatgctttggagaacctgagcaaacatctcaaaaaattgaatcatctaggcaagaaggtgatgaatctacaaaaaaacttattgcccatttagaaaatgaagtcaaaaaataccaagaacgtgaagaacggttaatgcaacaaattgaccgtatgcaaacactcattgagctgaaaagtgttgcacctgccacagcattaccacaacaagatgctacggcatgcgacaccgacatgccacagcatgcgacaacacaacaagacaatgataataaaaagaataatgaattcaatattgcagaaaatgtggcagtgccacagcaagaaactacggcataccacacccaaacgctacagcatgccacgttgcaaaatgtggcagtgccacaacacaaaaagcgtggcttatttggccgtgtgctgaatgctgtgtttgatcatgactga

SEQ ID NO: 70719 - DNA, 939 bp, Acinetobacter baumannii
gtggtaaaagacaatgccttaatcaatgcaagctataacttagatttagtagaacaacgtttaattttattggccattgttgaggcaagagaaagcgggaaaggtattaatgcgaatgatccccttgaagtacatgcagaaggctatatcaatcaatttggcgtacatcgcaatacggcttatcaagcattaaaagatgcctgtaatgatttatttgcaagacaatttagctatcaaaaaataaatgaacgagggaatattgagaactatagatcccgttgggttagtgaaattggatatgtagataatgaagcagtggttaaacttatctttgccccagccatagttcccttaattacacgcttagaagagcatttcactaaatacgaattgcagcaagttagtaatctcagcagtgcttatgctgttcgcttatatgaattattaattgcttggagaagtactggctctactcctgttatagagctaagtgatttccgtcaaagaattggcgtactcgatacagagtacaagcgtatggaacgctttaaaactagtgtacttgagcttgctattaaacaaattaacgaacatacagatatcactgtgaagtatgagcaacacaaaagaggtcgatcaatttcaggattctcttttacttttaaacagaaaaagaaggacaacccaccgatagaaagagatccgaatacgttagatctctttacaaagatgactgatgcacaacgccatatgtttgcaaataaactttctgaacttcctgaaatgggtcgttattcccagggaactgaaagctatccgcaatttgctgttcgtattgctgagatgctgcaagaccctgaccgaataaaagaactatacccatacctaaaaaaagtgggatatatgccatcaaataaaaaggacaccgtaaatggctaa

SEQ ID NO: 70720 - DNA, 537 bp, Acinetobacter baumannii
atgacagatttgaataagaaacaagctttttgggcagagcaactgccattgtttaaagaaaaatattggcttccagagcacttagatgttcttgaatttaatatggatggcggctgttttgaaatacctatagatgtaaaaactgatcttagtgaagacgatctttttgacatttaccatcgggtaaatagtggttgggcaatgtggaagaaagccgtaaccttcatgcaagaaaaagccaaagctcaggcggtgccagagactcatttgctagttgagaaatccaagattgaaacttggtggcaagatgcagaagagcctgaaaactttgcaagtcgcattgaagacatgccaagtcttggacagtacctaaatggcgatgaagtcatggagatcacagagcatcacaccatccacttaccttctaaaactatttatggagtttgggttgataaagatggtgatagaagtttctgcactggaacattggaagagtgccaagcattggtagcaagcgaatcgggagctgagggatga

SEQ ID NO: 70721 - DNA, 1878 bp, Acinetobacter baumannii
ttggatgatgcgcttaaaaatatcgatcgctcaaagtatgtggatgttgatggtaatccattaaccaatgatcaaataaaagagatgatcagttattcatttgaatcaattaccacagatggcctaaataaattaaatgttggcgagatgcaccaaggtggcgggaaagttacaaaccgtatgagtcaatcccgtgttttgcattggaagaatgcagatgcatggcttgagatgcaacaaaaatatggggcgctaccatttgttgatctgattgattcgcatattgatactatggcaaaaaatattgccttagttgagaaatttggtagcaatccaaaccgtgcttttgagcttttagcacaagaagccaaacgtattgataacgcaaatggcattaaaacaaatgccttaactgacggaattcgtcgtgcaacaacaatgtacgatgtatttgcaaaccgtgaaatgggacatggtattgaagcattgaactcctttggtgtggcttaccgtgcatggaatgtatctacaatgcttggttcagcattgttggcttccctgtcagatatagcaccaatgataaaactggcacgtatgcacaatctatctgtagcgaagcttatgggtaatctaataggcgagatgaatccatttaaccccaaagatagggagttgtcatttagtatgggtattgctgttgatgaaatcacatcatcactgggtcggtttgcctcggaagatttaacaaatgtttatgatcgcgccagccaggtcgcacgtgtatccaatactgctgcatccactattatgcgcgcatcactcttaaatgcttggacacgagcaactaaggcggcttggtcaaaaaccttaatgaataaatacgccaatttgcccaaagaaaaaaaatgggggcaactggatgcaaaagatcagagttttttaaaagctgttggtttggatgagcgcacatgggaggttatgagtctagcagaaccaatgaaggatggatcaggaaacccattaatgacaacccaatcaattctgaatatcccagatgatcagataaagcatctaggtaacccaactgaagtaaaaaaccaagccgttaaaaaatacttttcccatgttttagatgaacagggtatggctgttattgaagccggactgcgtgagcgtacaaggctgtatggtaaaactcatggcggtgaaattttagggttttttggacgcggaatgatgcagtttaaatccttccctgtaacctttctgatgcgccacggtacgcgcgctttgcgtgatggtgcattctcaccaactccatttacctatatgattcctcttgctatggggatgagtgcaatgggtgccttgtcactacagttgggtgaaattgcaaatgggaacaatcctctaacgatgtgggatgacgatgatccagatgttgctttaagctttatgacaaaagcaatgatgaagggtggtggtatgactctcttgggggatattgttgcagctggtgcagatacgtcaggacgtgatggaagggattttttattaggtccgatgggtggcgacatggtgaaactagcccaacttaccagcggaacagccaatcaactactaaatggaaaagatgtaaccagcaaaaccaaccaaatgtacatgttggcaaaatcaaaaatacctggtcaaaatttatggtacacaaaaaccgttatgaatcgcttaatgtttgatgatcttcaaaatatgattgcacctgactatcaagaaaagtataaaagaaaaatgcaaaagcaaggccgtagccaatggtgggaaagtggtgaaggtcttgaaggtttgaacccaattgattttgagagggtggtagagtga

SEQ ID NO: 70722 - DNA, 2208 bp, Acinetobacter baumannii; identical to SEQ ID NO: 56578

SEQ ID NO: 70723 - DNA, 1092 bp, Acinetobacter baumannii
atgctatttttgcttgttttcttatcttcaacactctatctgtatgcgacaagaaaccttaagtcattaagtttttttaaacaatttattgtctggattcccacatttcttgctttttatatcccaatggcttttcagaaagatgttggaaccgattactattcatacattagtatctatagtaatgctgtagaaagatacttatatgctgaaaaaggtgagtacctttttttatggataattgattttgcaaaaattttcaatcactaccaatttgtatttataatattctcattaattatatcattatcatttttttacagtttatttgttttgaaaaataaatacgactataaagcatggttaatattttttatatacttttcggcaactggaatatacaacacatcattcaacaccttaagacaaagtataattatttcactgcttccttttttaatacatctttttgttaaaaaaagacatttgatttttttattatgcattttagcgctgtcctttctacataagtcggttttattgtatttatctttttatcttgtagcattaatcccaaataataagaaaatagttttttttgcatttgtatttagtacgcttctttatactataaactttggatctataattaatatccttgcgaacaacccacttattggtttgatttttggtaactattcttattatgtcgacagctcattttttgatgctggaccaacattgtcgatagtaaccaaactatattatttacctttgtttatattgttttggctgatatatgttaaagagaagaatataaatttatattttgattttactattaagttgtgggctgtcacatgctttatgattattcaaatgatgcacattggtatattttatagattttggaatatgtttgcatttttatatgttttcccaatctactatgtagttgattactatattaagaaaagagatgctttgtttgtttttcttttaatattgtacataattataccttatattattaaagttttaatattgccatctgcagaatatctttataactttaataatttaatcttttaa

SEQ ID NO: 70724 - DNA, 1008 bp, Acinetobacter baumannii
atgctcaaattaagaaaaagtttaaataaaatttcaaaaaactatagtacagttgaagttattgataagttacagctttctatcacccaaaccaaccctaattacttatttctaaaaagtttaagcaatttttggaaatttactataataaatattctatttataactataacctttctcttttttaattcccttatagctccagataatcatattatagtaaatttattaattacggtctgcattagtctgttatatatatttatactacaacctatattaaataccataattttaggtcaccttgattatgaaagaacattgggctattatcttaaatattggtgtttaagtggatttattctctgcagtttgaccccttggcttccagatttaccccatcaacttctaagttatggatggtttatatctacaactatactactgagtgctttgctgctagatgcaacaccatatatgaatagattagagcaaagtgcatttattaatatcgataaatggataattaatatcggcttaatctctcttagtatttttcttatttctgtctttcttattattggtgaacctgatcatatctggttcataatttatagtctgatcccgatctgtttcttattttacccagaatctttccgccctctcttctatatttttggatacaataaagaagataccaacttaacagataaacaaataatgtatagaagtattggtattatcttctttaggctattctgggtttttggctttagctatttatttataaagtcttcctcacaaccttttatgtatgctgcaggcttgattctaggaagtatattaataaccggatttagtgccaagaatctctcttctacacttaaatatttaacctacatcgccttatgtatagcaacgttatacaccatactcttccctttgatattaatttattatttatatcaaagctatcaagcaaaaaaaatcattttatctagctgctaa

SEQ ID NO: 70725 - DNA, 333 bp, Acinetobacter baumannii
  misc_feature (301)..(310): n is a, c, g, or t
atgacagcttggcaaagattaggaatagaaccgacagataaccagagagaaataaaaaaggcgtatgccaaacaactaaagttaatcgatcaagatacccagccagaagaatttattcttcttagagaagcattagaaactgctcaattcgaagcagaatatttaatatatgaaaatgaggatttggataactcatcctctatatttgaagaaaataattcttttaatgaccaaaatttaaattcagatgacttaaatgatcaaacacttgaaaataaacttaagagactaaaacatcatnnnnnnnnnnctttaatatacgtgatgaattaa

SEQ ID NO: 70726 - DNA, 1752 bp, Acinetobacter baumannii
atgaatattgaaatttgtactcctaactccgctacaactaaagaaaagggtgatttactagaaaaactgtgtaaaaaaatgcttgaagcacaaaattatctagtgacagaggaagtgcgaaagactggcagtgaattagatttattatgtgaacataaagtttctgggaaaaaaatttatgttgagtgtaaagcatatagagataaaaaaattgatgccccaatcataagacaattatttggtacagttgtatttgagaactatagtgaaggctggttaataggtacttcagaatttagtaaagatgcgaaaggattttgtgaggagctacctagtcgaccacttggtgatcgtatagtagtctattcatcaacagatattattgaatcactacaagcatctaaaattattagctcaatacctcgtgaacatctcgaacaacaccttgatataaacagcattggtgaatggtttttattaattacaacttttggaaatttttgggtaagtacaatattaagtgcaggcattccaacaaatgctgtatgttattatgcaaaaacaggcgtcttagttgaagatcaagaactactagataacattgcctctacagatagtagtctttctaagttagatttttctaaaattataaatacaaaaaaagagatgaaacctttgtttgactctcaaattgaagttgtagaagttcaaagaggcgaagattggaatgactatcgacctgcacgtccacaggatttcgtaggaagaactaaggatattcaagagatttttgatttttttaagaagattagagcaaatgaaataaatactaggatttttgctattactggtaattctggattaggcaagagttctttgattattactctttctgaaaaagctaaaaatcgtcatcaaaaacaaaaattatttctttacgctattgatgttcgtgcggctaaatcaccagaatatatttactccgcattgttaaaaactttacaagaggcccaaataaaaggttttggtgatccaactattaaattacaaataactaacgtaaaccatcctttagagtctgaatctatagctaaatacttgaatagccttgaaagatcaaagcaattagtagtattagtttttgaccaatttgaagaattgtttagcaaaccagagctattcgaactatttaataatgcaacgaacattctattagatgccgctagtttaaaaacaaatttatgcataggttttgcatggaagactgatagtacaacccactcggaacatcctgcttatttcttctggcatcgtttgtcagattatcgaattgtaagaaaattaaatccattttctgttagagaatctaatgctgtcataaataagtttgaggaagcaattggagaaaaagttcatagcgacttaagacataacttaattgtaagtagtcagggttatccatggttgttaaagaaactatgcattcatttacatgaaaaaatattgtcaggccaaaaacaagaggagcttttagagaataaattagatatctcaagtctttttgctagcgatttagaagagttaaatcctaatgaagttagagctttaaaatttattgctcaaagagcacctgttgatcttgttgatacaattgatacatgtggagaagatgtagtcacaaacctgcttcataaacgactaatcattaaaagtggtattagattagggtttgttgacatttactgttcataa

SEQ ID NO: 70727 - DNA, 657 bp, Acinetobacter baumannii; identical to SEQ ID NO: 63435

SEQ ID NO: 70728 - DNA, 1419 bp, Acinetobacter baumannii
atgttggagactttacaagttagtgagttttctcaacatatcaacaatgcaattgctcgatataaatatttaaatcgcgaaggtctatccgatgccgaaagctttgctgaattagataaagtgctggagcaaggacaaaaaatgcatcagcaaatgaatccttccgatcctaattacttacggttttattacgattatttatatggattagattttagagggcattcaaaagtagttatagagaatttcacccagttgaatattccactcgaaaaattaccggcatatgtacgtcatgcaattgctgatagttatttggcggagcaaaaaccgaaacaggccgagtttgcttataaaacgcttttaaccgaaaagaattatccggatatgaccgtttatacgggactgtattattcttatattgaacaagaaaaatataaggaagctgaacaacttctcgctgaagttgatcggcttattccgacttataaatatagtcaggctaagggtgtagataaaaccagtcatcctgatcgtgatgattatattgctttacaaggaatgcatttagcctacgctaatcatctggatcaagctgaaaagcattttcaaaaaaaagtagagcaggcgcctgcgaatgagagcctgattaataatcttgcgcgtgtagaacgttggagagaaaaaccgctagaggcaaaaaaaacaatttcccggttaaatggtatagatccgattgctaaagacacccgcattaatgaaatgcaaaatgctcaagctttaggtgatattccgacatggcgaaaaatcacacaaaacttagtgcaatattaccctgatgatagtggggtcattaaaagtcgaaaagaattagaagatcgtaatagagccacaatttcacattcaaccacttgggggcaaagtaaggccgacggtcgcgatactgtaagtgggcagaatggtttaaaagaccgtgaaatggaaacgcgtcttaatagcccttggattaatgataattatcgtttattcgcttggcatcaagatcgttatggggagtaccgttttggtgatgtgcatgaccagcgttatggggtcggagcagaatggcaggcgaaccgtaaggcgttgtcggcaattgtgtcgcaaagtacggatggtggacaagcaggagtccgtcttgattggtcccaatggctaaacgaccactggcagtatcaattgcaatataacagtcaggctgacattcctttacaagcccttgatgcaggggaagatggtcaatcttaccgagctgctgtcacatggcaaaaagatgaatctcgccagattggcgcgagttacggtttaactgatattagtgatggtaacaaacaacaagaattttcaagggactgttctaaattttgtgtaagtacttaa

SEQ ID NO: 70729 - DNA, 264 bp, Acinetobacter baumannii
ttgataccgattgactataggtctatttaccaacgcaatactggtgtttatgttcaagggatcattagagattcaaaagcgtataacgctaatattttagctggtgatgtgattgtttctattaatggcattggtgtctttggaactaaagattttaataaagtaaaaaatgctgaactggaaaaaacaaaaactttaaacttaaaaatacttcgtattgtcaaaggtgatttgaaggaaatagaaataccgatcagtttttaa

SEQ ID NO: 70730 - DNA, 471 bp, Acinetobacter baumannii
gtgcaacaaagccttggaagacatcttttaggtctcgcaagggatcggaaattctcagataaaccgatagttgtttttttagatgaagctcataattttatcgggaaaagcattggtaacgaagattcgattgccaaattagattcttttgagttaattgcaaaggaaggacgaaaatttggtttgaatatttgcttagcaactcagagaccaagggatataactgaaggcgtattaagccaattaggcacattaattgttcataggcttactaatgatcgagatagagaaattattgaacgtgcttgtggtgaaattgataaagcagcttcagattttttacctagtttacaaccaggggaagctgtacttattggaaacgattttccgattccattaacgattaatattcatcaaccgtcaataataccaaattcagcaggtgcagactttcaaaataaaaggatatga

SEQ ID NO: 70731 - DNA, 267 bp, Acinetobacter baumannii
atgaaaacatctaaatttactgacagtcagatcatgtccatcttgaaacaggcagaatctggcacacctgtagcgaccctttgccgtgaacacggcatgagtaatgctaccttttataaatggcgtgccaaatatggtggtatggatacatcattaatggctcgactgaaagagctagaagccgaaaataccagacttaaaaagatgtatgcggaagagcgattaaaggccgaaatcatccaggaagcgatggcaaaaaagtggtaa

SEQ ID NO: 70732 - DNA, 789 bp, Acinetobacter baumannii
atggcacaacaggcagttgcccagcatgccattagtattcgtttggcttgtaaagcatttggcattagtgaaacctgctaccgctatcaagccaaactcagcgatgacaatgcactcattgctgaacagctcattgaactcactgaggaaaattccgattggggctttggtttgtgcttctcgtatttacggcatgttgagagttgctgctggaatcacaagcgggtttaccgcatttactgtgagttggcactgaatctgcgtattaaaccgagaagaagactaaaacggcatgcgcctgaaccattgaaagaaccaatccgagaaaatcaggtttggtcattagattttatgcatgatcagctttccgatggtcgcaagtttcgattattgaatgtgattgatgattaccgccgcgaaggcctagccattgaagcagggttctcattgcccacaatcagggttattcgtacgttgaatcaattgctggagtggagagaaaaaccgttagtgatccgatgcgataatggtcccgaatttatcagtcacgaatttgtgcgctgggctactgagtacggtattcgtattgaatatattcaaccgggtaagccccagcagaatgcgtatattgaacgctataatcggaccatacgttatagttggctgagcaagcatttatttgatactttggatgaagtacaagattatgcaacaaactggttgtggcattacaaccatgaaagaccacatcaagctaacaaaggaaagccacctctaatggctgcttaa

SEQ ID NO: 70733 - DNA, 558 bp, Acinetobacter baumannii
atgcctgcttcaacctttcaatactacacccgtactgcacagattctgcattgggtcatggccatcatttttatcactgcttgggtgattggtttctatagtggaaattttctaagttatgacgttgatggcagctttaaaggcgatgtcattacactacataagaatatcgccacaaccattatcttcctcgtggtcattcgtctgttttggcgttacacccatcctgccccacaattgcctgacacgatgtcaccaacaatgaaaactttagctcacatcggacatttattactgtatgtaattttagtcgctttaccagtcactggctgtttatttagctggagtgctggtcaccctgctccggttttatatttatttgaaattccacgcctggtgcaagataatcctgagttattagccattgttaagccattacatatttatatttcatggtttgctggtttacttattgttggacatgtacttgcagctttaaaacatcactttatagataaagacaatgttttaaacagtatgaccaaacaacctaaataa

SEQ ID NO: 70734 - DNA, 219 bp, Acinetobacter baumannii; identical to SEQ ID NO: 70670

SEQ ID NO: 70735 - DNA, 321 bp, Acinetobacter baumannii
gtgaaggtcaagaagggcgatacttgtacagcagaacaagctaagacttactttaagcacgacttagccaaatttgaaaagactgtaaatgaatcggttactgtgcctttaactcaaaaccaatttgatgctttggtatcgctgacttacaacattggctcaggtgcttttaataattcaaccttattaaaaaaactgaataaaggtgactatcaaggcgctgctgatcaattccttgtctggaataaggcaggcagtaaagtcatgaaaggtctagttcgtcgccgagaagcagagcgagcactctttttaaagaagtaa

SEQ ID NO: 70736 - DNA, 447 bp, Acinetobacter baumannii; identical to SEQ ID NO: 69455

SEQ ID NO: 70737 - DNA, 303 bp, Acinetobacter baumannii; identical to SEQ ID NO: 70671

SEQ ID NO: 70738 - DNA, 219 bp, Acinetobacter baumannii
atgaatagtgaaaacacaagagcttatctagctttcgcattagtgggactgatgtttgttttagtgattgctttattttttgtggatatgccgcgagaaaacagcaatctgatcaatacggcattgggttttattgctggggctatgacaactgcatgtggattttattttggtagctctgagttagagaaaaagaaaggtgaatccaatgacaactaa

SEQ ID NO: 70739 - DNA, 357 bp, Acinetobacter baumannii
atgactgaaaatgaatcatacgggttgagattcgaaaagaaaattgactccattcagagtgatatccgcatgttgtcagatcatgttactcgactgactttcattaatgaagcgcacaaagagactagcgaacagaacaaaaaggatatcgatacattggatatcaaagtcgccaatttagaaaaccgcacagcagcgcaagatggtggaatttctgtgctgcgtgtattgcttggcatctttgcaggggtcgtattttcattgtgtgcgtgggttggatcttcaattattcaattaagccaagatcaatctttaattaaagaaaaagtatcacggttagaggaagcaggacgatga

SEQ ID NO: 70740 - DNA, 813 bp, Acinetobacter baumannii
ttgaaatatctattacgtgcatcacagatggctcgaagcacgtacttttatcatgagcagcgatcaaagcttaacgacaaatacagtgaccttaagcagcaaattaagatgatctatcataagcataaaggtcggtatggctatcgtagaattactcttgctttaaagaatatgggattaacaattaaccataaatgtgtacaaagactcatgcagtcaatgaaacttaaatcacgcattagaatcgcaaaatatcgttcttacaaaggggacatcgggcaagttgcagataatgtactacagcgccaatttaaagctgacaaaccaaatcagaaatgggtaacggatgtaaccgagtttaatattcgaggagataggctttacctatcaccaattatggacttgtttaatggggaaattattgccttccaaacccaccgtagaccaatgtatgagttagtaaaaaatatgttgaaagatgcacttacgaagcttgcagatcatgaaaagcctatcatccattcagatcagggatggcaatatcaaatgcgtcattatcagcgagaactagcagaaaatggtttaacccaaagtatgtctcgtaaaggaaattgcttagataatgcatcaatggagagtttctttggaatacttaaatcagaatgtttctacggtgaaaaatttaattctgttgaggaattagagaaaactgtgaaagaatacattcattattacaaccatgaaagaatcaaggttaaattaaaaggactaagccctgtacaatacagaactcagtccttagaagctgcttaa

SEQ ID NO: 70741 - DNA, 192 bp, Acinetobacter baumannii
atgcaaagactaaatttttataaattaaatataaataaagattattataattttaaaaaaaccttaattacatcttcaaatgatatagaagccggctatatcaatacacttgaaagtaaggatgactgtctacatgctatattttataaaaaaatttctattaatgaaagaattttaaatccgataggttag

SEQ ID NO: 70742 - DNA, 318 bp, Acinetobacter baumannii; identical to SEQ ID NO: 50537

SEQ ID NO: 70743 - DNA, 174 bp, Acinetobacter baumannii
atgatgctgtcttcgttacccgatgctgtggtcgcttgtgccactggtgcatcattcaccgcagtcaccgtaatcgtgcctgtcgcagtgctgcttgagactaaaccattgttgtcggttgcactgtattggaagttggtgttgccattccagtctgcattcggtttgaagtag

SEQ ID NO: 70744 - DNA, 696 bp, Acinetobacter baumannii
atgttgaatagaaataatcattacgattcagtagagtttttagcaattaataaaaacacaattgatggaattgacccagtaaatattattcattttatggatatttcatcggcattcatagctctaataaaattagatgaatataaaagatgtaagaatataaagttaatagatatttataatagtaaggagggtaaaattgaattaagcgattaccattttaaaagtataaatgattttaataataaaaatataaaaatttttaaagttaaggataatgaacataatatttttgaaatttttagtacctatgttgctggtaataatttattcttaatttcagtaagatttattaatttaattgattataatagtaatttagaaaaactagtgaatttatttccattattttttaattggctgataaaaaataaaataaagaaaaatattgagaaaattgttactaaaaaggaaaaaattattttaagttatgtagtttgtggaaagacgaattgggaaatggctagaatattaaatataagcgaaaactctatcaagtttcatttaaaaaatctttttaagaaaacaaattcaaataataggtctcatttagtatctattgcatttaagtataatttagtagatttgggtaatattgattttgatttaatggataggggatgtgatctgaaatga

SEQ ID NO: 70745 - DNA, 1254 bp, Acinetobacter baumannii
atgagtaataaattatttagagaagaagtttttaatgagatgaaaaataaatggataggagagataatacttataaggcctttatcttttacattttatactgtattttctttgcttattattatacttattgtagtttattttatttatggtagttatacaaaaagaagcacagtacaaggacaactcgtacctagtaatggtttagttaaagtatattcaacagatgctggtataattttaaaaaaatatataaaagaaggccaaaatgttaaaaaaggtgatattttgtatgaaatttctttggaacgtatggataaacaaggagatgtacaagatgctattagctcccaagtgcaattacggaatttgtctctaaaaaatgaattaattcaagttcaaacatcacaacataacgaaaaacttgaaattcaaaataaaatcaatacctacacaactgatttagtaaagataaataacttaatagaaagtcaaaaaaagagggttaatattgctgaaaatatattatctagatataaacccttactacaaaatgactctataacatttgagcaatatcaacaaaagcaagatattttcttagagcaagattcgaagttacaggatcttgttcgaaataaaaattctattttaagtgatttgaaacaacaaaaaataataatgaatggactagatgctaaacaagatcaatatttagaacggttaaatagagatattgcacttacaaatcaagagttaactgagagccaatctaaaaaaaacttaattattaaagcaagttcatctggtatagccacagcagtcaatgtgcaagagggacaatacattaatacctctacaattttattaagtattatacctaaaaatagtaatttaattgctgagttttatgtaccgagtaatatgattggatttattaaaataggggataaagtcttactgagatatgaagcatatccatatcagaaatttgggcatgcagatgggaaaattagctcagtatcaaaggcttcattattgagtagtgatttgccaaatatttcagcaatatttccccaacaaacatcaatttatattgtgaaagctaaacttgagaagcaatcaattatgacttatgggaatcaacaacaattacaagtaggaatgacatttgaagcagatattttacaagaaacaaggagtctatatgaatgggtatttgaacctcttattagtatttctggaaaattataa

SEQ ID NO: 70746 - DNA, 462 bp, Acinetobacter baumannii
  misc_feature (415)..(424): n is a, c, g, or t
atgtcaattgtaaaagaattatctttagattcaaaaaaaaatgtccctgttattttacaaagtgaagcatctgaatgcggattagcttgcttggcaatgattgttaattattatggctataaaattgatttattaatattaagaaaaaaatttcctatttctttaaaaggcttaactttaaaaaatttaattcaaattagtacaaatatgaacatggtttcaagacctgtaaaagtagatttaggaaatattaaacaattgaagataccttgtattctacattgggacatgaatcactttgttattttaaccaatgtcactaatacaaagataacaatcatagatccgggaattggaaaaaataccttaacaattaatgaattttcaaaaaaattcactggtatagccttagaannnnnnnnnngaattatggccacaagaaaattttggaaagaaaaatga

SEQ ID NO: 70747 - DNA, 1449 bp, Acinetobacter baumannii
atgtttattcaaaatattatttcttatgtacgatcatgggtaatgatttatatgggaactacattgaatattcaatggagagcaaacttattttctcatattcttaaactcccagttcaattttttgaaactcgccatttaggcgatgttatttcaagatttcaatctattgatactattcaaaagactttaactgttacttttttagaagcattattagatggcttaatgactatttttacaataacacttatgttgaaatatagtcctaaattagccttagtgtcgattatagcaatgctgttatatatagtggctcgaaaagctctctatgaaccattaagaaaactgactgaagaaaaaattattcatgaggcgaagcaaaattctcattttatcgagacaatgagaggcatcagaacaataaagttatttaggaaaaatgatgaaagacgagcgttttggttatcattacttgttgatgaagtcaattccgatattaaaattcaaaaattgaatatttcttttaaattaatgaatggaattttattcggtttagaaaatattattgttatttggttgggggctaatttagttttagatggaaatttttcagttggtgttcttgttgcttttattgcttataaagtccaatttagtactagagtaatctctttaattgataaatattatgaagtaaaaatgctgacattacatggaaatcgtatttcggatattgctttaactgaacctgaaaatgtttatagtaaaagctattttttcaacaataactttaagccaagtatacaagttaagaatatttcatatagatacacacagtttgagcctttaattttaaataatgtaaattttgagattcatgaaggtgaatctgtggctattgttggtcctactggttcagggaaatcaacattattgaatttattgttaggtacgttatcacctacagagggggagatttgtataggaaactattcattggagaccataggtatagataatgtaagagatatgattgctacagtgttacaagacgatgttctttttgccggatctattagtgataatatttgcttttttgattccaatgtagacttagagtgggtagctgagtgtgctttcatggcatgtattcatgatgaaattaatgctatgccaatgggatattatacgttggttggagatatgggaactgtcttatcaggaggacaaaagcagcgtattttgttggcaagagcactatataaaaagccaaaaattttatttatggatgaagcgacaagtaatttagatgtacttaaagaatctgaggtaaatcataatattaaatctttgaatataactcgagtgattatagcccatcgaccagaaacaattgcctcagcagatagaattattaatttagatgattttaaaagagtatcttag

SEQ ID NO: 70748 - DNA, 1437 bp, Acinetobacter baumannii
atgtataaagctatatatatatttattttcttcaatttaataatttctaaggtttatgcagaaaatttctcaatactattagatcgtgaaaaatatgatttaatcaagaaaaaatatgagagttctaattataattgtctaaaaaaaatagacgctatatctaaattagttgttgacttaaatactgtgatcgattatacattatgcaataatccagatgtttcagaagcttggttacttgcaaaaaaacaaatagaacaagtagatattattaaatcaaattatctaccaaaagttaatttaattggagagtctaatataggaaaagttggctataaagcttatgcaaatcctcagtcaaattataattcaaaatcaatttattctagtgttaatattgatagtaaatggttattttatgatttcggtttaaaaaataattcgattgatcaagcaaaatttatgctcattgctttatctgaaaaccaaaatgcaattgtacagaaagcttttttagaagcttcgacattatattttgaagtcattcgattacagggggaatttaccctaaatcaagaagcagaaaatttagctcaacaaagttattccattgcagaaaaaaaatatcacgctgggattggcttactttcggaaatgctgcaggcaaagactaatttagcaaaagcaagctcagacaaaattaaagctgaagggcatttattagccattaaaggagaattggctgtgtatatgggttttgatgtgaatagtccattagaaataaatgcgagatctatgagtaacccagagtatcaacaagtctttttatcagttaatgatttacttcaacaagcaaataaaattcatccagaattattgcgtgctcaagcagaggttttcgcagctaaagagaatgtacaagttgtaaaaaaaggaaatttacctaaactgtctttgacgagttctttgcgcgcatatagacaacaaggaaatccatctatagacataggtggaaatgagacaatggctggtattaaagtagagatacctatatttagcggatttgaatatagacataagcttaaaatggctcaatcagatctagatcttaaagatatggaacttcaaaaaatacaaagaaaaattaatattaacgtgtggaaaagctattacaatcttagtgctgaaacagaaaatttaaattcgattgaagagttacaaaacagtgcattaaaattttatcaaatttctatccaaagatataaatctggtgtaggaagtatgttggaactgatagatgctcagaaaagtttagcagatgcgaagcaacaaaaaaattctgcaatttcaaagtggaatatagcaagagtcgaacttttggctagtattgggctacttactgtctcttatacacatctccgagcccacgagacgtag

SEQ ID NO: 70749 - DNA, 162 bp, Acinetobacter baumannii
atgaaaaatggaattaaaaacaaatataaacctgaatcaactaaaatctctttagatgattttgaaaaaatagaactcgatgttattgaagaaaaccttctttttgatatcagtagtggtaaaattaacattcattattatgatagatacgggatgatataa

SEQ ID NO: 70750 - DNA, 939 bp, Acinetobacter baumannii
atgaaaagttttgagctaattttatatcccactgaacagtgcaattttagatgtagctactgctatgaaaactttgaaattggaagaatgcttcctgaagttgtagaaagtgtgaaaaacctcatcgataaccgtttagatgttgtagatcacttacatttaagttggtttggtggtgaacctttgattgccaaagatattttattagatatagcaaattatgcttttaacgaaagtcagaaaaaaaataagaaattgacaggtagtttcacaacgaatgcttaccttctgacggaagatttagcccgtgaatttagtagaatacatcataatcaatatcaaatttcattagatggatattatgaacagcatgataaaacacgaaaattagcttcaggaaaaggtacatttaataaaatatggaacaacctaatcaatttaaaaaattcaaatattccttttgaaatattattgagattgcaccttactcgcgaaaacttagaatctatgcaaattttggctcatcaaattaaaaataattttattattgatccacgcttttcagtattggtcaaggttgttggtgattgggggggagataatcaaattaaagagattcttttatcaaaaaatgaacaagagcgtgctgtagatgaaattttaaaaatcatttatccaaacaaagataatgcctctagccttggtattagggaaactaagtatatttgttatgcggctaaacctaattctctcgctatacgagcacaaggaactatacaaaaatgtacggtaagtctttctgatgaaagaaataatgttggaaaattaacaaatgaaggactgataattttagataaagatttaatgaaaatgtggatgcgtggtttatataacaaagatgaaaagtctttagcttgcccagcctttagggtagtttaa

SEQ ID NO: 70751 - DNA, 1044 bp, Acinetobacter baumannii
atggaaattacaaaagctctaattgctacaaaacacactttttctaaatgtgtaatctgtaaatatatttttagagaaaatgatgaaaacccccaaagtgacgaacatataattccagagtttttaggaggaaaatttaaggtcgggatactatgcaaggtttgcaataatgcaatgggaagcggttttgaagatagacttgcccaatcatttcttggtaaagcacatgccaacaagtatcaaattaaaggtaaaagtggaaaagttcctaactctccattagtaggtacttatgaatacggcaataaaaaaatattttttacatctgattataaagttaaaacccattattctttggactgtattcagagtgatgagaaaggaatagtattttctggccatatagatgccagtgatttagaaagctctaaaaagcaagttatggccagtgtacttagagccttcaagaagcaagataaaaaagtggatgaagaacatatttacagacaaatcaatcaaataatagataactcaaaaataaatatagaacataatcctactattaatggaaaaatagaaataaattttcatgatattgagctgttatcattaaaaatagcttatgaagttctgtgtattcattttggtgaagcaatcacaaatgatccgtattttgattcatggcgaaaatctctacaagaacaaaagatagaatcatcaatacagtacaaatacgataacttttttacatggtttaaatctcttactgaaattttcccgacccccaatttttttaattttaaggagtttgaaggagataataataaggataataaattaattattcttgtaaatgaggctgtttttgtaagatgtatgggaatatggattacatttagaactaatcaaaaattgcttgtgtgcctatatgaacactctatgctggataataagctaagattttatgatagtgattcttttatgattagactagtcaacgagcatgtttttactaatcaacaaccaaacgataaagaatgttaa

SEQ ID NO: 70752 - DNA, 1728 bp, Acinetobacter baumannii
atgacaaaaaatgatttctctaaactatgggaacagaattgtaaaagcgaatcaccaataatatctatatataacatatacttaaattacattgataatgatgagttggcatgcttttttgctgaaatccacaatagcgggaaagtaaatatcttcaaagaattatcaaattttgagtcttatgaaaataaaatagatacatatatattattcgattttattaacaaatcttccaagtatattaaaaattactctataaatgatctagtctcaaccattgaaaaattagtattaaaaaataatattgaatattctcatcttataggtatatatgaaacaataattggacaagatttagaacaggcgattttagctttagattatattctaaaaattaatatagatatttctatcaatctaatcactcctactctatatgcactttctagaaacagtggagaaatttgcttagatagaatcatgaatttattgacatctgaaaaaaatcacatagtggcaaatacattattagccttaggaaatattaaaaatattcctattaatgaggaagtctcaaaattaattctcgaaaaaagtattagtaattctaatgaaaatgttctttctggtcttacatatacattacttaaattttacattagagaaaaagatctcaaactccaaattttaaaaaaacttaatgaaatagtaaatctagatccatcaaatcaaattgttttacattcaatagccgtagagttgcaaagcaatggaaaagaatttgatattgaaatgattcaatttttattagataaattagaaaacgtcgaattagattcaatcaatacattacgaaaaatagatcacattttatacaacatttcttcccaacattttgcaatggtaataaaatttctagaaagaattttcatacaatctgagcataaaatttccattaaaaattttaattttttcttatcttactacttgttaagtgaagaaaataaagaagatttatcatttttaattaccagatggtttctaagtaaagatggttttctatgcagatcagcaggaaatcttattttagaaaaagaaatagttatttattttgacttaaaccaattacaagaaaatcatgataatgatctttactatttagcgagaaaagcatgtggctggtattttacaaatcctataacagctattagtttaattttctctacattgaaaacttgtacagatcaagaaataataaaaaagatttttaatttaattttcaaccctcttcttataagctacccaggaaaagttcatgattacataatagaacaaagaaaaaaagtagctaaaaaaattaaaaaacatattgatgaatgtttaaaaaatttagatgaatatcataaaaaccttaatgaagcttataaaattaaggaattgaggccatctcaattagagagctatacttatagaaaatatcaacaagacttaatgcaaaaaagatttgaagaaccaaatgaaaactctctaatatcaagtttctcaacaagcacactattatatggcaatagttcagcttttcttgtgcatacgtcgcaaggaagttttcgtcaaacagtccaaatgcaaaaatttagtcatagtgtagaatttccttcaatggaaatattggatcctcttactctttataactttttaatacattgcagaggtgaggcattaaaatga

SEQ ID NO: 70753 - DNA, 1713 bp, Acinetobacter baumannii
atgaaattaattattaaagaatacttagcctctttaaaagaaagaaatgaactagatgcacttttaccagacctgctttctcagatgggattgcaaattttatctgcaccaagtataggaaatcgacaatatggagtggatatttccgcatttggatcaatagaagatggtcccccaaaaatatacttattttctatcaaatctggtcacctcggaagacaagattgggatagtggtaattctcaagatttacgcccgtcattaaatgaaattagagatgtgtatattccaacccatatccctgttgagtttaaaaattttccaatcgagatatgtctcacatttggtggcgatctaaaacaagaattggaactaaacattgcacaatatgaaaaattaaattcaacagatacagttagcttcactagatggggcggcgatcgtattgcaggttttttagaaaaatatctttttaatgaacaattattcttaaatgaagaggtaaaatctttacttagaaaatctctagcattagtcgatcaacctgaggtttctttcgcaaattttaaaagtttattatcttttatatttactggactagaattgaaagatgtaaaagaacatctcacttctcttagacaatgttatctagctttaggtatccttaattcatggtgtgaaggtgaaaacaatcttgaatcagctttcctatcatctgaaaggttaattctattaagttggactatttttaaattacatgcgacatcaaaaaaccaaaattcaaaaaaagttaaaaatatttttaattcaatattaatgctttatttttctattaatcaaaaatatctcgataaaatattgaagcattgcaataaattacatgcattatctgctgcagtacatcctaactctgaagtagacgtaaatttaaaactatttgatattttaggtaaaacagctttatttggtttatggtcaaattggttttatagtcgtttatacacttacaaacaggaagaggtttttcaagaaaaagctttagagcaatatgaagaattatcaaaatcgatcaagcaattaattttaaataatcctattttatttcaaccatacaaagatgagcaagctatagaaatttccctagctattttataccttttagaaaatgaacagaatgataaggatataaatagctggttaacagatatgactcatattatctatgaatcatttagatcaaatagaagatatccttctactcttaatgaatatcttagccttattcaacatccaagtagtagctctaaaatgtatagaaagtctgtaacgaaaggttcaattctttatccattattagcttttttttcttattactttcaaaacacagaattattaaacatcttaaaaagtatggtaaaagagtatattcctgaatgtacaatgcagatatggaatccagacgaatactcagaagaacatttctataaaaatactgatattcatggtactactttaactggtatttcctttgaagaattagataccgcattcaaacaaatcaaaagtgaatgtaaagaaaatcagaaaataaatgacttatcagctataaagtatgagttttctcctttaattctcacggcatgtaggcactatagactgcctgttcctttccattattttttgagtatgctttcaattccacttgataattaa

SEQ ID NO: 70754 - DNA, 243 bp, Acinetobacter baumannii
atggcaatgagtaagaaagaatttttgaggatgcttgagcagcaagaagggtacgccgtgaatgagtggaagtctcttaagaaagagactccaccatatggccaatcaataattacattaggcaaagatgaagaagggtacttccatcacaccaataaggagttcctaaacggtgatgaggaaatccttgttgaaatgggagtgactgattggcaaataaaaaatataaaaattcagaattaa

SEQ ID NO: 70755 - DNA, 2448 bp, Acinetobacter baumannii
atgactaaacgtgacacctcaaacatgacgtcaagtgaagttttggctcattgtcaggtatatacacctgatcaaattgaatatcttcagcataaaattatccagcgttttggtggacctaatcaggccatttacattgatcgaaatagagttgagatagataaagttgaatactctaatcccttaattctgccgatctataacggcgaattaagtatcatccaatgcgccgttctggaaagtggaaaaactatttctgtctttcctgatggattagcaagagggtttgcttgttatggtgaattacagcatgacaagcctgtaatgattacttatagccttgagtctttctttaagattgcttctagtgggttatctgtagctctggttgtactcaataacttatgtgcttctcgcttagcaaaaacgcttaaggcttttgattttgagcagatccagtttgtcattaatcaattgacacaagctggttttaaaaagctttacctacctgtaagacctgaatatttcaaaaatgatgcctttcagaagctcgagcagaatacttgtgttcgcttaattaaccagtaccagaaaattgatgagaatgagtttctaattgaactgactaaagatgaagatccgaaagaagttgcagcatttttaaaagaagccattgccagacttcctcatactgaacctttaccaaaaggccatttggccaagccatttaaatggggggatggacgctttcatcttttagaatctggattgtactttttagaaacgaataacaagggagatgactataagcgttatatttctagtccaattaaagtcgttgctctgactcgagataattctagtacctcatggggacggttgctcgaatggtacgatccagatggtattaagcatctacaagctgtttctatggagttcttccagtctgacggcgtagaactacgtaaagcactttcttatcaaggaatgacaatagcgccggacgctaaagcaagaagtctattgcaaagttatttgatgagttatccagttgagcagagggccttatgtgtcgatcgcgtaggctggcatgatgcagtatatgtattgcctcattgtgaagttggccaaagtaaagataacgatttaattgtctatcaggctgttcacggtttagataatcgctatcaacgcaatggttctttaattcaatggagagaagaggtatctaagctcacacagaaccatagcaagttagtttgtgctattagcacggcatttgctggccagcttttaggtccacttgaacaacagaatggagcaggcgttcatttcgttggcaaatcatcaaaaggtaaatcaacagcattatttttaggctgtagtgtatggggtaaaccgagccgtttttatcgtacatggagagcaaccggcaatgctctggagcatacagcttatatgcacaatgatagctttttggctttagatgagattggagaaattgccaatcctaaagagttaggcaacattgtttatatgctagccaatggattgggtaaagctcgtttaaacaagcaaatcacagctaaacctgcttttaattggaagcttatctttctgtcgagtggggaagaaggacttaaagatattatggccaagcatggtcaaaaggccaaactaggacaagagatccggttaatcgatattgatgtagatcagtcagagtatggcgtgtttgacagtattgattttgcttcggatggtgcaattcaatccagaatgttagtagaacgttcgaatatgtattacggtgaagcgggtatagcttggcttgaatatctttgtagtaataaaaatgaaattattaaacacgctcgacagttatgggagcaataccgagagccattgattgatggtcattcagaaggacatattattcgtgtagccaatacattcgcattgattgctacagctggagaactggcaacacaagccggaataacgggttggaaaaatggtactgcatttagtgctatacaagctgtttttaaacaatggttaggtagctttgaccgagttggtaattatgaagatctggaaattctggctcaaattaaagctttctttgaagcacatggtaatagtcgttttgaatgtatgacaccagatgcggaacatctagataaagttattaatcgagtaggttattggaagattgagaacggcgaaaagaaatacttggtttatccggaacagttcaaaaaagaactttgcaaagggctgaatcctaaacgtgtcggcaagttacttatacaacgtggatggctggatcatctaaataatggcaagtctactaagctcacaagaggaattgatggcatgcctaaagcaattcctatgtatgtatttaatgaaaaggtacttacagatgatctggatgaactctag

SEQ ID NO: 70756 - DNA, 318 bp, Acinetobacter baumannii
atgcctaataacaactcgtctctaaaaaattctcatatcgaaatagctataaaaacttatgacgccagtgatgtgtctgatggttattcgttggcctatgaacaggttgctgacctcgccgtaatgcttgattccattcgtagtaaatatgaaaaaacagcagagtacttacaacaagtctatagcgtgccagaaagtgtatttaaggatttaaaacgtcttttgaatattacagatagcatgattgatgaaaatctggagttttccaaagcacaagaagacaagtttcaaaaagaatatgaggagtcacaagcatga

SEQ ID NO: 70757 - DNA, 333 bp, Acinetobacter baumannii
atggaaaagcataagaacctgttacccatatttttaacaatacttcttgcaagctgtcatgtgcctagttatgctaaggacgttcatcagaaagcagatgagctaaccttggccggttatatcgcaaaaggcgcacagtccgcttataggactttttttgtgcgtaaaatctctatgcacctgcatgttatggcggggctggagagggacaccttcgggtgtgcaggtgaccttttgcgcctgtcggccaacccttttcagcttcgccaccctcacttggccgtgaatggtgaagctccaaacttgcaaaaggagcgcattcataatgcctaa

SEQ ID NO: 70758 - DNA, 252 bp, Acinetobacter baumannii
atgaagagttttgttttagcttcttttgctccgcttactgaagaagatgataaagcagatttggttgtgaataatcaagccatgaagtttattgaaaccctcggcataaatggcgagcttcaagaagttaaagatacccgagaattattattgcaaaacccttctgtgcaggacgtcttagttctgcacgctggcagccttcaggtattactcaccagcattatgggagagccgccttatggaaaagcataa

SEQ ID NO: 70759 - DNA, 714 bp, Acinetobacter baumannii
atgaatcaattagttaatccatcaattcttaagatgactagtctggaaatttctgagttggttcaatctgagcatagaaatgtaaaagtctcaattgagagacttatgcaaaagggtgttattcgaaatactccaatgacgaatttcgaaagaatcaataacttagggtttacttcaaaagtaggtgtatatgtttttgaaggtgaacaaggcaaacgagacagcattattgtcgtggctcagctttgtccagagtttacggcgcagttagtcgatcgctggcaagaacttgaatataaagttaaggatgacgtggtggtagatatttctaaccctcatgctttacgccgtgctcttttggactatacagagcaagtaattcatcttgaaaatcagaaccagtctttagaacgaaccatcgacaccattactcaaacaccagcaggagtgaagtttcagcaagcatgcaaaatcttaaatattaaaagagaagtattggctaactggctacgtaaacacggttgggatcgcaaacttaatggggtacgttcttcaacctactatagccaagagcgtggttattgcgaaaccaagtatgaagaagtggcacggattcgacctaatggtgatccatatacttttactaaaatagagttctttatccttcctaaaggtatgaatgttttagctaaacattttggtaaggaggcttaa

SEQ ID NO: 70760 - DNA, 216 bp, Acinetobacter baumannii
atgcaaccaatccgagttacatataaccaagcatgtgagttattgagtattaagcgtaatgctttacgtgagctcaccttaaatgatccaactttccctaaagcgtataaagccggtacaactcgccaggcgccagtctattttgattatgctcaattaattgagtggcataacaaccaaatcaaaagtcaaatcaatgcagaattggaggcttaa

SEQ ID NO: 70761 - DNA, 957 bp, Acinetobacter baumannii
atgaattaccattctgagacattagcttttaaaaagtctgagcttttagctgtcttgcaagctattgataaaaactttagtttcgatcctattaagccaagtgaaccgccattacaaagagtaatatcatcagataaacaggattcatttgactataataaaatactttttaaaaagcctttactttctcagtatgaagcagcatgtatcatatctggaattggtttgtacttagtcctggcattcaatgatgagtttgaagcaaaaattgaatatccaaattggggaggggccttagactatataaaaacatgtataaaagaggggctgttagaaactgaaggctctgttatagagcatattaagcgtgatcatttaaaatcatttttagcttcagaaaatattattattgaagggtttaataataatattaagccagataattttattgagaaagagcaattaatacttcagcaagtagaactaaatgatgaaaaaattaatgtagagatcgcaaatttaagtggactcgtggctaaacaaaaactagagattgaacaattaaaaaaagatatagcgaacgaaagggcgatttctctttcatcattgatagataaaaatgaagcggaaaaagaggttgctaaattacaagaacacattaaacaactagaaagcgagaaaaacttagaaaaatcagatgaaagcgaacttttatctttaatttttgatgaatcagctacagacagatacgcgccagatttagtactttcaataaagttatggaaagcgatctatatagataatccgaaaaatgatagccatagtaataaagctaataattggatttctctaaatacagattatgaattatctaggccatcagctacaaaattaagagaaataactaaccctttagtcaactggtcaacgcatagagatagaaattataaaaaataa

SEQ ID NO: 70762 - DNA, 657 bp, Acinetobacter baumannii
atgtataacgaacataataattgttctggctattcagaatatgctgaatggttaaggctatctgatattctaaatgaatggtgtaaggcagatagaacatgccgagaagtcaagcaacttgctattcttggagcttgtgagaatggtgaaatagcgtatacaagaagtgatggtaaaacctttgatgatccagttatagatcttcaaggacgtgggatactcttaatcaataaaagctcatttaatgagtggaaaaatagaatagagcaaatagagaccacatctattaaaactcagcctcataccaacttactggactttctaaatagtatcgattctgaatatatcagtattggggatgctattgatgctattcataagcatattggattagatcatgatattaataaagctatacaagttttgaatcttgcaattggtaaagcaccaaacaaacctaatatatacaaaagatatgattttagtggatgggaaaaggtaacgattactcagcaatatggatcagttgatattaattggtttgcacaagatcaatatattacagaagttaagaagactaatactattcggggtgcaattgaattagagataagtacaagaagacaaaaggagttagatgatgaattaccattctga

SEQ ID NO: 70763 - DNA, 141 bp, Acinetobacter baumannii
atgtcgaataaaattaaacattccagaaaaattgcgtctgactcagtaaagtctcatcataaaacactcttagatttgctaaatttaattttgaaaatcattcgtattgtgtttgaacttatcaatattttatttctttaa

SEQ ID NO: 70764 - DNA, 636 bp, Acinetobacter baumannii
atgaacaatgttaaaagctatttagaagatcaagtttctgtattaaagtttgatcttgatctcaacgtacaagaattttacgagtcaaaaggagtggaagtttttcactttccatctgaaataatagacgtaataaaggaaaatatcattgaagatggggtaaaagatgaagtagaaattaatagtatagggcacaagtttctatatagagtttttgaaaagaaacatgatgaatctactgaatatttttactatagaatgatgatttcactttctttttgtgaattttatcttgaaagaaataatttaatcaaggttattaggcaccttaactcttttcatttttttaatggtgtaaatacatcaaaaaatgaaattaagatacaaaaattacagcgcattgatgatggccgaaagaagggacaaatagatagtattaaatctcaaaaaataattaaagaattactgattacacgggtttggaatagtcgaagccaattttatatttatgcacaagaggaggtgagaagacatgaaatttctcgttcattgaaatctattgaaaaggactttagtttagttaaaggtcaaattgaaaattacaaccaatactttcaacataaaggaaaaaaataa

SEQ ID NO: 70765 - DNA, 354 bp, Acinetobacter baumannii
atgagcaatttcgtttttaagcgtggtgacactttcaatttaaaccttcagttagtcgatatggatgaagccctgcaatatccacctgatgatgttcgccgtgcaattgatctcactggttatacattcacttcacaagttaaagctttggctgatggtgcagctgtggccacgttaacttgtactgcattaagtcaaagtacacagaagggatggctgaatattaaatcaggtacaagcacagcagcatggccacttggtttatgtcagatggatattaaagctgtagttagtggtactacgcagcacactgaaactttgactttccaagtgattgacggggtaacagcataa

SEQ ID NO: 70766 - DNA, 408 bp, Acinetobacter baumannii
atgattagcacagattacgttcctttatggcatatctcaccattccaacatgttcattacacgcttgctagaaatcagcttcacatggatctgttattcaaggacatgaataaggtcgatccgttcttaactaatgaaggagcagcggctcaagtcaattactattcagacggcgcgtatgcagttgttcagttgggcgatacctcagaaagaaaattgatagagatctatggtttgcttttacatgaagcagttcatgtttggcagaaggtaaggaaactcatgggagaaaaagagcctagttcagaatttgaagcatattcaattcaagcaatcgctcaagacttatttgaaatgtacgaagaaagtgaggtaaagcatgggatggaaggggaaaaagccgactag

SEQ ID NO: 70767 - DNA, 699 bp, Acinetobacter baumannii
atgttactaaaaggaaataatgctgaaaaaattgcaacaacctttattatttttataattttactaatgatttacattttgatcagtttagcttttcgatcaatcacacattcatctgtagaaaatatggtaaaagatgggttggggtttgcagcaagctgcatagcaccaattattgctattttattattcaatgactggcgtgagcagcataataagcaagtaagaaatgaatttgcattaaaagttttcaaccaatatgagaagtttgctaaagaggtcgaacaagcgggttatattttgattgagatagaatatttattgccagaagaatcaagagataaaaatgatccaaattgcataccaattccattgagtgacccaatttatatagaaaataaagaattatttttaaaattttcaagacaagaagagcaaatacaaattgagtttagcagcttattagatacttttagatattttggtatagtaacgaatcaaattagaaatatgagcccatggcttaaacaaataataagtgaatttgaaaaaattcatgatgaagaaaatcaaacttatggagaggtattacagtttattgacatatcaaaccatacttataattcatatatagcaattcgagataatattgcagttaacatcaatcaaaatattctagaacaacttcaagaaaattaa

SEQ ID NO: 70768 - DNA, 1866 bp, Acinetobacter baumannii
atgagtaagaaaagtgaagtaaggacaagaaaaggtcagctaatccatacttttggccctggagccatgcaggttaataaagatggtatttctattattgcttgtggcttagatttttggtttacaaaatcgggaatgacagagcctttagataaaaaattaatcaataagtatatttttaatgatgctagattagctaaaagattgaatgtggatcattttagaatacctcccaactcagttacattagatggagactataaagttgattctcctattcctggtattcgttttccatattggcatatttgcagtaatacctattgtcagctacttattaaagtttcgtcgattgatgaaaaagaagttaaatgtccaaaatgtacgtcaatagcttatcagtctagattcgtaagctgttgtaataatggtcatttacaagattttccgtggatccaatggttaaattcacataataattcaaattgtagtgaatcttgtgaaatagctttagctggtactggtagtacttcggtagctgatgtaaaagttaaatgtctaactcaccagtcaagatcagttcctcttttaggtatttttaagattgaaaatagcaatggaattataacctcaactctacaagaaaaaggtattatgtgttctgggcattcaccttggttaggacaagattgttcagaaccgtgtgatatgcctttagttggtgctttacgtcaagctacaaatatatatttttctaaaacagagtcgtctattttaattccattggagggagagactaaagatttagaaattgaggaggcttatgaaaagttatcaattaatgataaaaatttaataaatttatgtggtgaaatagataataaaattaaatttcttatgatggctttaaatcatgaattttcagatgatgaaatacgttcatatttagaaaaaaaggacaaagctacttttgaaattgatcaaaaaacaacagaagctgaatatagatttcaagaatatcaaaaatttttccgtaaaactgaagatggagtattggtaactaagcctttacctatcgaatcttttaaagtatggtttggggaatatttttcagcagtaacgcaagttaaagagttgactgttacgaatgccctatatggatttgatcgtatccaagcgcagaatagtcgtaaaattgaaagttataaaaagtgtttacgattacctaatagtactgaggcaaattggttacctgctgttaaagtatatggtgaaggcatttttttagagtttaacccaatcttaataagaaaatggtcattaaatttcaaaaagaatgaatcatttagaaaacttagtagtaaattaggtaattcaactctgttccagaatttagaagagttaatccctgaatttattttgatccataccttttctcatctgttaattaatcagcttatttttgaatgtggttatagtactgcttctctaagagaaagactatatgtcaatagcgctcctgaaatggaaatgtatggtttacttatatatacggcttcgggagatagcgaaggatctcttggagggttggtacgtatggctaagcaaggaactcttgagttaatcattcgaaaagcaattgaaagttcaaactggtgtagttcagatcctatctgtcgagaagtaggaaataatggtgggcaagggcctaatggtatgaatttagctgcatgtcataattgtgcattgttaccagaaacatcatgtgaatgttttaattcattacttgatagaggaacaattacaagtacagatttatgcggaaatggatactttgatcttctaatgaattatagtggtgaataa

SEQ ID NO: 70769 - DNA, 3702 bp, Acinetobacter baumannii
atgatcaatggtgcttttgtaagagatcaaataatatttaaaactttgcaagaagaattattagggccttgtagctatggggaagaattagatgtacaaagtggttcaaggattttaataaagaatgatacaccttttataactaaacatagtaaagaagagatacttaaagtgtatccagtacaaagatatggtgtaggggtcatatatccagcagacagtgataaagatttaataaatgatcaaatttcatcgaatcaaatagaagataataatatagatgattttatacctgaggatattgaacattattcgaaaaaattaagttttgataaaaaaacgatatctagtgatagtgatgattttgatatatcccttgctaatactagagttccttctagtgtaggcttatcatttttattagaccctaatcaatcaaatcaattagaatttattatttcaggtgcattttataaagattttgaagtccaatatgaaagtaaaaaaaatattgataagtggtggtatagaaaaccagttttaatatcttttaataaaaaaataaatgagttagaaagtatttttaagtttaatctttttgtagagtctggagattcttctgaagaattgttaaaaaatttttatattgaaggtattgttagaaattacaaagataaacttttaattacagtagcattagtaaatcgttcaccttccagcactacctttattgctaaaaataaacatagtttttttcaaactcagttaagagttagtgtttctgaaggtggggaaaaagctattttaccttatcctgaagcgataaatgaaactcaagaagatgtaagtaatcagctattatatagaaaggctccggtctttggtaaagggcatggtgtagcttgtaattgggatattccagcttattgtgaagttgatggtgtgaactcagtgtatacagaggcgcttcctacttttgaaacaccaagtatttcatctgaggttataaccgaggataatggtaagcttgaaatttcaatggctgcattagctgctttcactttacaaggagaaggtgattatcagttacaatccatgatagaagcgtatgaaaaatggattagaaaaaatacagaattgattgatgaatcgattctagatagtaatctaaaaattagggcacatgaacatattcaaaattgtaaacttacgttagaaagaattaaggctggttatttattaatttgtaataatatggatgtacaaagggcattcaaattaactaataaggcgatgttggagcagcaaaaacatgctcctaaaacaattagaactataagctttaacaaaggttacccttttgttgaaactccttatatgtcaaatataaatataaaaggaatttggagaccgtttcagattggttttttattaatgtgtattcaaggtgctattgataaatcacatgcagaccatgacaaagtggatcttatttggtttccaacagggggagggaaaaccgaggcatatctagcattagcagcatttaccttaattttaggacgaattaaagatggagaaaatgccgatggtgtgcaagtattaatgaggtatacattaagacttcttacagcacaacaattacagagagcggccactttaatttgttgtcttgaagtcattagacaagaagaaaatctaccaggaaaagcttttagtatcggtctatgggtagggggaaagaatactcctaatacgagagataatgcattaaaagcttttagaaaattaaaaaatggggttgaggctggtaaaacatataataaccctttcttattagatcgatgcccttactgtgcaactcagctaggtattgtttccactcaaaatcatcgcaaaactgtggttggctataaagtagatagacatagtgagacgattatattttcctgcgttgatcaaaattgtaagtttagccaaaagattccaatttttttaattgatgaagatatctattttgaacgtccttccattgttatagcaactgtggataaatttgcaatgctagcttggcaaccaaaaattagaagtatttttggcataaatgaaaaaggaaggagattttctttaccaccgcaattaattattcaagatgaattgcaccttatttcaggtccattgggttctatggttgctctctatgaacctcttattgaagagctttgctcggatagtttagatggttctttcactaagcctaaaatagtttgtgctacggcaacgactaaaggttatcaagagcaaatcaaaagtatttatggtcgccaagatattagtatatttcctccggctggcattgatgcagaagattctttttttgctagatatgctagagataaagaaggtaaattacttccaggtcgtaaatatgttggtgtctgtgctccaggattaggttctgttttaacaacccaagttagaacgcattctgcattattgttagctgcaaacagggtagaagttgaggaaagagatccttgggtaacattactttctttttacaatagtattcgagaacttggtggtgcaatcacattattccagtctgatatagtaagttacttattagaacaaaaacggcgttatcctcgttggattttaccgagaagaaatattcaagaacggggcatggagttaactagtcgtttaaaagatgatgaaattcctaaagctattgtagctttagagaaaaaagttgaaacgttagagttggacactaaattttataaatctttagtattagaactaaaagaaatagaaaaaattaatcctgaattttcagaatcaacttctcatttaattaattgtattgagttgaatcaaaagattaatttagaaagctatatccattttgaaaagataagtgcaggtttaaaaattaaaaactctaaatataaattacctaagaattttaggaagttttatagtttatgtcttaatagtaatgtacaagcattttgtttagcttcaagtattattgaggttggagttgatattgatagattatcagtaatgtcaattattggacaacctaaaacaaccgcacaatatattcaggtatctggtcgtgttggacgtaaaaatgaagaaagaccaggattagtggttagtatttataataattcgaaaccacgagataaatcccattacgaagattttcgtggatatcatcaaagactttacgcaagagtagaaccttcgacagttacccctttttctagacctgcattaaaacgaggattaggagcgattattattgcaaatataagacaattttctcatctagaagcaagacctggagaaattgataaggcagttatacaaaactggattaatagattccttgaactaagaaagcatactatgagtgaagatgaatataatgatattaataaattttttaagagttttgtggataaatgggatagaaaaaaggttgtttataatgattggggacaactgaaaattgatagtgagccaaaactgaatgatctattatttccattgggaattgctgggaaaagagataataaaattccttgtccgacaagtatgagaaatgtagatgcagaatctagtttatggattacagatgtatatgaacaaaatcatttaaatatggaggattgggatgatgagtaa

SEQ ID NO: 70770 - DNA, 1731 bp, Acinetobacter baumannii
atgccaaaaatgattcccagagttttttactcagataatataagtccaggtgaaagagatttttttgaaagaatttctactgataaaaatatcaataattgggtggttatgcactcattaaatattgcacatcatcaaaatagattaatgggtgagttggacttccttgtaattattcctcaatatggaatattagctatcgaaattaaagcgcatcgtactattaaatttcaagatggtatatggtatttaggtaaaaatgatataaatggctcactaagtccttttgtgcagttgaacacagcaatgtttagtgtacaaaaatttattgcaaataatgatccatatttaaaaacaattccgatatttcctttggtaatatttacacattgtgaaattcaaccaaaaagtatcgaaattaatagaagtaattttatatcttgtaaagaatatagagaaaataaactttctactttattggaggcaaggataaaaaaataccgggaagaagcatttaataaagaatccttaaaatggttgtctttaaattctaatcgtcctaatgctagtgatattttaagactaatcaaaattttacggcctaatattgaacctattatgttagctgaaagctataatacaattattgataaggaacttctaaaatttacatcagaacagtatgatgctatagattccttggctgaccattcacgtgtattatttagtggggctccaggaactggtaaaacatttattgctatagaatctgctattcgtgctgcgaaagaaggaaaagagatattatttgtatgtatgaataagttgttaggagattttttaaagagaaaactaataagttggaaaaatattaatattactacttttcatgctttaatgaagagttataatattaataattatacgatagatgaaaatgataataaatattggactgaaactttaccagaaattgcttatactagaatacttgaaaaatctttagactcaatatatgacttattaattgtagatgaagcacaagatattataggaaatgatctctggcttgattgtcttgatttattattaaaaaaaggaattacacagggttgttggtatttttttggagattttattcatcaaaatatttatactaaaaaattattagaaaatgattttttaattttattaaaaaagagaaaccctgactttgttcactttaaactaaaaaaaaattgtagaaatattgagttgtcagtacgtcataacttaaatcttattgcaattgattctccttatttaagttatcttcgaaaatcttctcctatattggattcaaaattctatatttattcgaatgaagttgagcagatgaataagttgaaaaatattattcagaattgtgtaagggaaggctttaagtattctgatatcgtcattctttctaagtgtgctgaatttaagagtttagtgcatcagaatattagtcagttgaaggcaagtatttatgattttgatttagattgtttgagatatacatcaatttataaatttaaagggttagaagctccagtaattattctgactgattttgatgagattgaaacaattgaggctaaaaatttactttttacgggtgctagccgagcaaccgattcagttcactatctttttcataaaagtgttcaaaatactttactttcatatttaaaaggaaataagtcatga

SEQ ID NO: 70771 - DNA, 1365 bp, Acinetobacter baumannii
atgagtcatttttttttagattttgatcaagtaaaatttaattttgttccttatcactatgaacctttatctttgttttttaatgaaataaataaaataataaatcttactcatgaagaatatgagataagtagtattttaaaaagaataaaaaaagtaataaactattatattatagggaaagaaatcctagaacaagagattgaagaaataagaagtctatgtagaaaatatctttgtagatcagatttaatcgaaagtgcaaaaataatatataaagtaattttatatattaaaccaaaaattataatagctgagtgtttggagaatttagttctacttaattcttttgataaatatggactattagtagaaaatgaaaaacaatggaaatatattgtgaaattgctagaaaataatgatttattgggttttttgcaaccagtttttaaaaatcaaattcgcgaaaaatacttcgatattcctataataactttttttcctatttcatggatttatgaaattatagtgcaacctatcactgaaaatttattttttatacaaccggacttttcttttaagcaaagagaatcaaaaataaattttaaagcacctgataatagttctattgaagttgcatgtgaagaatttgaatttatttatggttcattgataaatattgaggcatgtggtgattttaatagtaagtttattttaaaaaaagattttacagaaaaattaattttttcagaagatttttataattgttcagatagacctttatattatattgagtttaatgataaattcggtgttactcataatttagaatataataagcaatatataacaattttgaatgataataatgttgaaatacttgtgtttgataatgaggaacaagttcgttgtgttaaatatattataaaagatattgatacctctaatttaacatcagaaaatttaaaacaagcaaaaaatataattatggaaaagtggaaaaaacctttaagggaatattctaatttagatagactggtaactgaattaaaaaaacttggttcaataaaggctacattacaaaatgttaaaaactggtatagtcaggatactatagctccaagatgtatagaagattataaagcagtacttttatttgcaggaataagtgataaaaaggaagtagatagatttttagaaatggcacgaaaaattagaggagattcaataagtgatggtcatgaaaggaaagtagtcggacaagaacttattttagattatctgaataagattaatacttttgaaaatttagaggggtattttaatattgagggaataactttttcaattattgctttaggttga

SEQ ID NO: 70772 - DNA, 858 bp, Acinetobacter baumannii
atggatttgaacaaattacctaagcaatatagattgatttataatctttcagagcaactatttataaagaaaaattttaagtgtgtagcacttgtgtctaagacaccatatttaacagcattaatagcttgtcatggggcaaaaatagaaattgtaccacctttttctacaggaacctgtattttactgccagaagaagacttaagtaagggatattttcatgcagtaattgatgagactgtatactttgataatgagaaattctattattttaggcgacataaaaagcgtgaaaattctaatgttgcgccagtaagaatagcgaaaaaatcttcttttattgaatctgttggaaaggtttttcctaatcaaaaagaacatgaatggctaggaaagcgtaatatacatttaaaaaatttaagtaatctatccaactctctatttcccgttatagtagggaaaaagtgtaaatcaaatattgattattggttaaatattccactaggaattgatttctcacctgatttatctatggcaaatattattaacacaggaggagagggaaaatatttagaaaattttaatattcaaaacccttacagtattaatatgaaaaattttgaagagcagatttggataaataatgtaccgaaaaatattaatgaaggaaattttttaataattttgtcgccttatactagcaattttgatgacttgacgatagaagtcaatgacctttatgcagagaataatttgacctatctaggaattgatgaagtaggggaagaacttagaaaaaatggtataggaaataaagcaatatttactgggactataatgaaggagaaaaataaatga

SEQ ID NO: 70773 - DNA, 1542 bp, Acinetobacter baumannii
atgaaaggtaataatattttagtaattgatctcttctctggtccaggtggtctaggagaaggatttgcatcatttctaaatgaaaataatatttcccctttcaaaattggcatgtctgtcgaaaaggatcaaaatgcgcataagacattgacgactagggccttttatagaattgctaagaaaagtaattctttagaaggatattaccaatatttagaaggaaaaatttcaagagaagaactttttgaaacctataaatcgatatctgaagcagctaattatgaaacactcaatgcaccacgtgaactgggtaaggataaccagctaattcatgaacgagttcgtgagttgattaataaacatactggtcccaaaatattaatcgggggtccgccttgtcaagcttatagtttggctggccgttccagaaatgcaggtaataaaaattatgtacctgaaaatgatcatcgtcattttctctataaagaatatttacaggttttatcaatagcacagcctgatatttttgtaatggaaaacgtaagaggtattcttacagcaaaaatcgaagataaattaatatttccacaaatacttaatgatttgcgtaacccttcaaaaattacaaaaggggcagaacattgtccttcatacaagatctattcacttgtagaaaaaactaatgaaaattcagaaaataattgttctgaaaaaataaattatttaattaaatccgaagaatttggtattcctcaagcaagacatcgtgttattttacttggtataagagaagatattaagcagattccggatattttaaataaggataattatccaaaagtttcagttaaagaagctattggagatttacctaaattaagaagtggtttatcaaaaaaaattgactcagaaagctcttggaaagaagtgattttaaataatatagaaattctcaataaattgaataatatcaattttaaagataaagatctttatccctataagaatttgaaaagaaaagaaaaaattcataaaaacaagcataaaaatcaattaccgaaacatttatgtgactggattcttgattcacaacttaataatttagtattaaatcatgagactagaggacatatggaatcagatcttcttagatacagtttttgtgctttatatggccagaaaaaaggagtttcacctaagtccgaagattttcctcatgagcttgctcctcaacatcaaaattggaacacaggtacacataatgaccgatttcgtgtccaaatttcatcaaaagtagctactactattaccagtcatatttcaaaagatggacattattttattcattacgatccaaagcaatgtagaagccttactgtgagggaaagtgccagattacaaacttttccagataattatattttcgaaggtaatcgcactaaccaatacatacaagtaggtaatgctgttccgccttatcttgctctacaaattagttctattgtctattcattattgaaaaaacactatattaatttataa

SEQ ID NO: 70774 - DNA, 447 bp, Acinetobacter baumannii
atgattgatatagttgatacatctactcgaagccgtattatggcaagtataaaaggtcgagatacaaaaccagagatattaattcgtaaattattacataaaaggggattccgtttccgtcttcatgtaaaagaacttccaggtaaaccagatgttgtattaaaaaaatataaagcagttatttttattaatggatgtttttggcatggccataaaaattgtcatcttttcaaacttcctgctacaagaactgatttttgggaagaaaaaataaataagaatcaattgaatgatactaaaacgataaaattactattagataatgattggcgagtttgtgttgtatgggagtgtagtgtaagaggtgcaaaaaaagatttaaatatggttattaatagtatttctaattggttgttaagtgatagtgtttttactgaaatatattaa

SEQ ID NO: 70775 - DNA, 168 bp, Acinetobacter baumannii
atgcaggtttcttttatttttaaagtctcattaaaaaaaataaaattccttcaacctttcactaaacggtcaaatatttcattaacttatcatcaaaacgtcaaagcctcgtcacattcacaaactaagctcatgaagacttttagaacaatctctttatttacttag

SEQ ID NO: 70776 - DNA, 984 bp, Acinetobacter baumannii
atgactgatatcctacttgaattattaaaaatattgactagatataacccattaaaaattatgcttttatttttagcatcttgtggaatttatttaatttcgctcaaagtaataacaggtaaagacttaaacccgtatctttctgataatttctttctagtgttgatattagtagggttagcccttgtagcccttagtgctatcaggtatttagatagtgcggcagacgaaaatgaaaatatagaaaaaaatttcagtggtgatatcgaaagtataatttcatcacgcgtaaaaacgataatggaagatattcaaagagatacaactgcaagtataagcgaagaggaaaaggatgccttattaaaagatttaagaaatcagtttgaagctaaaatttctgaagaatactatcaagatattacgcaaaaaataaaaaatgagtggcttgaaagtgaaatagatttttcagtaagtactataacaagtagattaaaaaatgaaattaaaactctaaagttaagaagtaatctaaacttagtaataggtatgattttatgtttttccggaataattgcattatatatttttttacaaaaaaatgccggaatgtatgttatatcttttaaaaatcataatattaatgaaattattttaactttgataccaaatgcattttttgtattactaatagaaattttttcatatttctttttaaacctctataaaaaaagtatagaagaaataaaattttatcaaaatgaacttaccaatttagaaagtaagtttttagctttaaaaactgcaaaaataactaaaaatcacaaactccaatgtattattttagaagaaattgttaaaaccgaaagaaatttcatacttcaacctggacattcaacaattgaaattgaaaaagaaaaaatttcttcaactaattcaagtaatgtcttaaaagcggctactgatttattaaattttaagaaataa

SEQ ID NO: 70777 - DNA, 972 bp, Acinetobacter baumannii
atgggattatcaaaaacccagaaaattgttttcttattagtaatggtaattcttttactttgggtttggagcatattcccagttatttttaattgggtaatgttaggagttaattcaaaacagacttctttaaaagatttaggtcctttaggggatatttacggcagtcttaatactttatttacttctgcaaccttacttattgttatgtattctgcctatttgcagagacaagcaaataagcatacaagaaaagcgatggaagaacagcttaaacaggctagagaggctactgctgaacaacttaagcatgcaaaagaagctactgaagaacagcttcaacaagcacgagagtcaacaaagcaacaattagatttagctaaatcaactcatgatgcccaatataaggaaacagtatattcaaattttctaaatacttttaattctttaataaattataaactaactaaatataatacgattcaaggtttcgttaatggacgcatttggcatgcggaagaaatctttgcagaaattgcattgtattttttgggtcaaaccgaaatttttgaattacataaaacacgagaacaaatcggcgacttatattttaaagctttaagcaaaattgcaggaacggaaaaaggctttaatgaaattaatagttattttctattatatgaaagtatatttgatttaattaacaattcagaaatttctgaaaaagaaaaaattttttttaggaaagctacgtcaaatacaatgtctactcatgagcagttaactttactatgggctgctacatatatagtagactgtcatgaattagtaaaaaatactggtatattttcccaattttaccgcgatgatctaatgccatttttcgttaaattttttgaaaaatcatgttttagtcatccagatattttaagtaattgggataaatacaaaaatagccaaaacccagcctaa

SEQ ID NO: 70778 - DNA, 231 bp, Acinetobacter baumannii
atggtgtcgggtttaaaacttgacgaaaaggacaagcaaatgaaaacattcgctttaaagaactcccctactcaaaatttcattctggaacatactccaattcacgacctagacgcatacttaaagcaaaagcgtcgtcaacaaaaacttaagctcctcaagcgcgcctttgaaggtggtgtcttctcaattattattatcttaacattttccataatatcaggcagataa

SEQ ID NO: 70779 - DNA, 1320 bp, Acinetobacter baumannii
atgatgctttttaatgacgttgaattaaatgagctgacatattttaaagagtcagcaattgtatttaataatatatttatatattatcaaaacaataatatggattctgttattttaggtactaccaacctttcaactgattatttttttaaacaaattaaaaataatcttaattatattgattctattttcaaagttattcaagatttagatccagataaacgattatataaaatgtcggctgaattaaatagtattttaagtcagtattggtcatcttattcaaggatgtttttgaatcttgataattttatattgataataacaacttgtatatataatttttttaatagaatagtggaatatccactattgcctgtagaggaggataatatatatactttatctgaagattttaagcattatgtttcttacttggggagtttgttaaatgaagtaaatactttgcatcaaagctatgatagtagattaattacattggaagatcgacttaatcaaatttcaaatcagcatgttattcattcatctcagtttgatgttaaagtgaatgaatttatttcagaacaaaaagaatcatttgataaagatattcagaatatacttaggagttttagagaaaatattcaatatgtatatgaaaatgacttaaaagaaagaaaatcctattttgccgtaactatagctagtgcacttatcattatattttctgttgtaagtgcttttaggggagtgaatggttattacaatcaatatgtaagtacagaggcttgtgataagaatgaagtagataaaacactaggaacgattataccgcctgtaaagttaaaatcatacgaagaatgtatgaaggatttaaccatcaagcgtgaggcaacgcaaaaatatgcgtttaattatcttattttcagattaagtttctcattacttttatttttagctgttatctatgcaagtaggattgctatgcgagcctataatcattggcgtcaaagtgaaaacatgtacctaaaacttaatacattaagtccatttataggtagccttgataaatcggtacgtaatgatgttcatcttagcttagtcccggactactttggtaaagacgcgggtatggttgaaagttccaatgatgcagtaaaagatcttccaacaaatatttcaaatattgcaataaaagcaattgagcaagctggtagtactatcggaagtaaattaggaagtgataaagaaactaaaaattctgatagtgaatcaagtacagaaaagaacaaaaagaaatcagaagatgaatcacaataa

SEQ ID NO: 70780 - DNA, 294 bp, Acinetobacter baumannii
atgaacgagaaaattgtttatcaatacaatcaagctggattattcgtttgtgaaacaacagcggatgaatctccacgagagcctggtgtttttttaatgccggggaacagtactgatacttcaccccctgaagaatggccagaagataagtggccacggttcaatggtaaaggttgggatttgattccaaaaccaaaagtaccagagcctatttctccagagcagaagttatctatttttctgcaagaaaaccctgatgttttaaagctgattgataaggacccaatcttgtaa

SEQ ID NO: 70781 - DNA, 1365 bp, Acinetobacter baumannii
atgaagtataaatctattcatacaactttgggcttacagctacttgcacaagctgaatcaactggtacacaaattcgtctcacccatatggctgtgggtgatggtggtggccagcctattaaactaagccctgatatgacagctttggttcgagaacgatttagagctgtagtaaaccgtgtctatcaagatccagaaaatgatttgaaatttactgctgaactgattattccagctgctgtaggcagtttcgttatacgtgagatcggtatttttgatagtaatggcaatttatttgctgtcggcaacttacctgatatcacaaaaccagttgcacaggatggtattacaaacgatacggtttttcgcattccattttttgtaaaaaatgcggaaagtgttgaattaaaaattgatccaaatgtggtgattgctacacatagctggatcatcaataccataaatacggctaagcttttacctggtggtaccactggccaagttttaaaaaagaaatcaaataatgatggtgatgttgaatggggaaatgcatctgaagtaaatatttttgttgattcaattgaagaagagcaagtactggcaacggatcaaactcatgtgatctggtcaacagttaacacgaatggtttagctgtttacattaacggtatacgtttacatcaagcagttggtgcagatggctggacagcaaatggagcgactgaaactgttttaggaaagtcttatccagctggtaccaaaattttaggtgtacaaaatgatccgcttggatctgccccttatcctttggccaaagatcaaaatctggcagatgttccgaataaggttttagcccgtcaaaatctgaatgttttcagtaaagaagaatccaaagccaatggtttaccagctggagcaattgtttactttgcaatgaataaagcaccaacaggttttttaaaggcaaattttgcagctgtttcaagaactgcataccccgaattatttgctgcaattggcacaacttatggcgctggagatggagttaatacattcaatgttcctgaaggcagagctgaatttccacgcggtttagatgatggccgtggaatagatcctggtcgattaattggaagctggcaagccgattctatgaaagcccatcaacacatgactggcttagatcatgaaactgaaggtggcgctggagtgccatttggcaaaaaagaaatgtcaggcaataaacgtacagaagtactggatgctctaggttatatatcaacgagttcatctctaactgaaagcattggtgggactgaaacacgtccacgtaacgttgcttggctctgctgtattaagtactga

SEQ ID NO: 70782 - DNA, 2301 bp, Acinetobacter baumannii
atgactgaaattattggccaaccgcgctggtccccagttcgtttacttgaagaaaatgaattggcatttgggggcgaaaatggaaatatgaatgaacaagctcatgcgctggcagacagaactgagctattaatgcaaattaaggctggtatagaagatattattcaaggtcaatttagctttgcgactattgcagcttttgaagctaagaaagcaacgatcccaattgatagtactgttatcattgatgaggctgggccaaatcagggcacaaatacttgggatggcaatatattaaaaaaatcaatttatgatccggtcgagacgattaaacaattcctcaatactttaggtattgttaatcctaaagtcatagtgaacccaattgactggaacaacctccgtgaacgtggtttccactattttctaagtggaactacatgggataattgtttaaatcgtccaccaattaataatcagtgggcttttgcttttgtgatgccaatttcagatgctgtttgtggtcaatttgtttggtgttttaatgctcaaaagttagtatttagattctcaaatgcttcttcggtttggcctttagattggaccgtttttagtggcgattccgctattactacaattattaaggccgcggtgaatgctgaccgagacgctacatttgatgcccgtgcaataaacagtatcactccaatttttgaaagcctgtctaagaatttctttgacaaaaatgctcctctgcttgtcaactaccgaataactgacaaaggtatccttgagtatcatctgaatagtgttactacgcctttgattagtgttgcgggaatgtcttcaattgctgtaagtggtttaacagctagtgatattgcttaccgtgcttaccgtttttttgataaagacaaaaagtacatacgaaatgaaccgatagatccgaataagactggcaaagtaatttctgttcccgctaatgctgcttggttccaaataacattgaaagacggcattgatacatggacgttaaacccgggtactattcagtttgaatctggcactgttgcgacggcttacaccccctatgttcggggtaaacttaaaaatatttatggtacagatttttatgttgatcctgttcaagtttattcgatagttgaacctgtctttgaaaatctatctaaaaatatttttgataaatccatccccttattaagtaattctcgaatcacgcaatatggtgtacttgagcaaaacttaaatagctttacaacacaaccgatttttatcaaaggattaacatcgttaacagttagcggattaacagcaagtactaatgcttatcgtgcctatcgtcttctagataaagacaaaaacaagattggtaatgggtcttttccattaaataccacaagctttactgtaaacaacatacccggcaatgcagtttattttcaactctgtttaaaagatagttatgacacttgggcgttgaatttagacactattcaaatcgaaagtggttcctcagccactgcatatacagcttacgttaaggggaaattgaaagctattttcggcactgagttagctggttctggttcaagtggaggtattgtttctaaagcttttaattgcagttatttaggcttcggcgattcaattagtcaaactagccgcgttgacctaggtatttttgactcacttgataagccatttccgaactttcccacatatcttcatgacattttagaaatcgctgaatttaataactatgcatatagcggtgcctcattttatgaatatggacaagatccttggcggaagatgtcttatcaaattaaccaggcgattgcgaatggggttaacccaaatttaattatggttgcaatgggtacaaatgacataaacggtactctcggtgactatgaaacagcaatgtcgaaaacgacccctgaagagttggatcgaactaaaactttggaagctgcacgttgggcattttggacaattagaaagaattttccgaatgctgtgtgcttctatgctaatccgcttcaacgagcttctatcgaatcttctacttttgccccaatcgttgatggtttatcaaaaatggccttgcgatatggctttactcttatcgatcaacatcatgagtgtggaattattcgagactttgaactaggtgatcaacatttatatcttgctgacggtttacacccaaacaacgctggtcgtctcttacaagcacaatatattgcaagtaaagttatcgcgcgtatgacctattga

SEQ ID NO: 70783 - DNA, 603 bp, Acinetobacter baumannii
atgtctaaattattacctccaaactcaacgatatttgagcatgcatttgaagatgcattttcacgtatatctgaagtgcctacacctgcacgtacttttaatgatccttttgaagctccagctgtggttcttccttggctggcttgggaaaagtcagtcgatgattgggatatatcctggtcagacgagcaaaagagagcggtcattaatgcttcatacaatgtccattgccacaaagggactttaggcggtttagaagctgcattaggagcattgggttttactgttcgggttcaagaatggttcaacatgcagccgcagggcgaaccgtacacattcaaaatttttattgaaacaaatagcgcggaagtatctacagagcactacaaaaagttattcactattattcgtaataacaagaatctacgttcacatcttattgactcaaccctcattgttacaagtgaacttcaagccgaaatcgctttattcactctcgtcggcagtgaatatgaatattcaaattatccaggctctctaacacttgatggaacttggagaattgatggcacacaaaaattaaatggtataaaggcgttttaa

SEQ ID NO: 70784 - DNA, 903 bp, Acinetobacter baumannii
atggctggatctctcactgctattgatttgtctcaactacctccgccagaggttgttgagcagattgattatgaaatcattttaaaagaaggcttagacgaatttcatgaacttatgaggcagtctggtagcgattatcttgcgcttgaatccgatcctgcctacaaacttgctgaagtttttgcataccgtgaaatgattttaagaaagcgtgccaatgactcagctctggcattattacttgcttacgcttcaggtaatgacctagaacataaagctgctgaaagaaatttatttagaaaagtaataaccccagctgataattcgactattccacctacgccagccgtaatggagtcagatagttctttgcgagaacgcactcaattagctccagaaggttatacaacagctggaagtgaaggttcttatatcttccatactaaaaatgctgatgtccgtgttaaagatgttgagccagtttcaccagacaaaggtattgcagcaatatacgtcctttcaactgaaggtgacggtagtgcttctgaagaactcattaatattgttgatcaggctttaaataaaaaaatcattaggccacttaccgattatgttcaggtctattctgcaagcattattcagtatcgagttgaagctgtattagaaattgagaatggtcctgataaaaatattgttcttcaggatgcgattaatgaactacaaaattatgttgattctgttcataagttgaatacaaaagtttcaatgacaggtatttcgagtgccttacaacgtaaaggtgtcattgatgttgatttaatttccccactttcaaagattgaacctgtgtctggtcaagctgcttactgctctgacattctcgtcactattaaggaggaataa

SEQ ID NO: 70785 - DNA, 351 bp, Acinetobacter baumannii
atgatgtcacgttcaacgggcaaaaacattgttgtagatctagatcatatctaccaatccattcaagacattgtgactactccagttggtacaagaataatgcgtcgagaatatggatcgctggtttttcagttaatggatggaccatttgatgacatcttacaaatgcaaatttatgcagcaatagcaactgcgattatacgctgggaaccaagagtttcattagattctgtctcactaagcattgcagatccaggggcttatgttctggatcttaatttcacacttgttgataacaatcaactctcttctcttcgcgtccctttatcttttggcgcagcaacaagctag

SEQ ID NO: 70786 - DNA, 576 bp, Acinetobacter baumannii
atgatacggatgataattaagcctttagattatataaaaattacttggaaatctgaaacctcagctggtaaaagttataatgcaaagaaatgggtagatatttatttacctctactcttttcaaccactattactttagtaatgatattcttactcgttttgtttaagtttaaaattttttttactagtgatagtttctctttattgacaagttttttgcaaaccttaccgggcttttatattgctgctctagcagccatagtttcttttaacagtccaaaattagatgaaatagatttctctgatagcccaattgacatcaataattacaatatgagcttccgtagatttcttacaaatacatttgcttacttagcttggataagtatttttcttattttattttgccttattattaaatatatttttgaatcaatatctccaataaatattgatatttattttatagttgtatattcacttcttttagtgcctttaatgttttttgtgagtcaactttttagtattactgctatgtcattattttacctaggtgaccgaatccataggaaataa

SEQ ID NO: 70787 - DNA, 291 bp, Acinetobacter baumannii
atgtcaaaatattttgatttaaatactgcagataaagaacattttgaaaatctagcccaaaaccgcatgaggggacttttagataaaaaccatcaatttaaaaaatacaattatatgatttcttcttatcaggagggctctaataaatatgtgtcgataacttatggaagcgcggtaacaattgaaggtaacttagaatatcttaaacaccctgttaaagatacttatatccaggatagagatgtgaaaaatggatttatttggaaaattcacttcttaaatgatgattaa

SEQ ID NO: 70788 - DNA, 2262 bp, Acinetobacter baumannii
atgactgatttagttatcgtagagtcatctaataaggttgactctatacagggctatctagatagcctttttggtcgaggtaaatttaaagtttcatttagtaagggccatatacgtgacttacccaaagactcactaggattaactgccgaatatacacctaactatgtgtttaatgattctggtgcaagtcgtgtaagagagctaaaagcattagttgagaaatcacaaaaagtatatcttgctacggatccggatcgagaaggtgaggctattgcatggcatcttaaaacggttctccggcttaacgaaaattatggtcgagttacatttcaggagattacaaagacagcagtagcacaagctatgggtaacgagcgtaagttaaatatgcaagttgttcaagcacaagaaacacgaagaattctagaccgaattattggatacattggaacaccggcttttactttaatatgtggtgaaaaacagattgctggtcgagttcaaagtagtatcgtatggtatctagtcgatcttgaaaataagatcaaacaattctcgtcagttttgcattttggtgtaactttcaattttggttctgtagatgagtcttgggaagcaaaatgggatacatcaaatttcataactaagttagatccttttgtaattgatcgaaagcttgctgaagaagtttcaaaattacgtgaattcactgtagaaacttttgaagaaaaaccagagaaaagctctccaccggctccttttacaactcctacttatctacgggccgcacacgttcaattaaaacttaaaacgaaaagagcaatggaaattgctcaaaaattatttgaagatggccatataacatacattcgtactgacagcccaaatttaagtgatgatgccattcaagctattcgtgaatttgcactgaagaacaaattacctataccggcaacaccacgaaaatttaaatctaaagctttggctcaagaaggccatgaagctatcagaccgactgattttaatcaattaaaagtatcagatgattcaaccattcaggcggtatatcaaatgatctggttgcgttcagtggcttgtcagcttgatgatgcgacattcacagcgcgtattgtccgtatgaaaggtcgccagttagtgcaaggtcgagaagtctttgttaaagctcgtggacgtaaactaattgatcaaggctggttacgacttacagcaaagctaaacttttctgaagacgagaatgaagatattccggaagacgctgcacaagagttgaataatccagtgccgttattacaaaaggcagggaatttagttgcattaaaatcagatctgaatgagaaaagaaccgaacccccacgtaggcattctgaagctagtctcattaagttcatggaagatgtgggtataggtcgcccatcaactttcgtaagcatcgtttctaaaattattgatcatggttatgtacacttagacagtaaaaataaaatacatgctactgatctggctcaaagattggttgggaaaatttcaaaccaatttgaattttgcaatctcaaatatacagcagagttagaaggaaagttggatctcattgcacatggtgaaaacattggtaagaggctattaaaagagacacatctcaaaattgaaacccaagcaaaagagtctattaaaaatttagatcaaggtggacctaaacaatattgttctaagtgctcagaacaattggtgaatatgacaagtgcgaacggtaagccttatttcaaatgtacaaatttgaagtgtggtcacatgatgatgaatcaagatgggatagcaattgatagagaatcgcttacatcagaatttaagtgcattgtgtgcgagagtggcctaatttcgcgttcaggccaaaatggtgagttctttggatgctcaggtttcttcaagaagagaaataaatgtacagccagttatcaaaagaaaccagacggtacacctgactatcaagcattccttgccaaaagggagctgaaggaatctaagcaagaacaaggtgaaaaacctgttcctaaaaatacagagaaaaaggaaaaagaatttaactgtccggagtgtaaagctctactccaacaacgtactggtaaatcaaaaacaacaaacaagaagtgggagatttggtcgtgttcttcccctaattgtaaaaatgaatattggggtgagcgaaacaaaccaattttcgataaaaagatcgttaaatga

SEQ ID NO: 70789 - DNA, 1104 bp, Acinetobacter baumannii; identical to SEQ ID NO: 57843

SEQ ID NO: 70790 - DNA, 1377 bp, Acinetobacter baumannii
atgattaaaaacaatgacttggataatctaagaaatttgaatagaaatattattcaaaataaacctaattctgctccagctactcctcaaaggcttttcgtttatcttgatggtatcgcacaaaacaacgatggccatgattatgcttatggaacaaacgtcctaaccaatgaaaaagtgaaagttagactaacaacaattgatgaaagaattgatgacttagttgactctggtagagcaaagaacagacaacaagttgcctctcaagtaacaaatcagtatcaaaactctgccaatcctcgtcaatctttaaaagcgcgactgaacagcaatgtagttgtacttagttttgatcaatcttttgaaataaagagtgaagataattaccggtcatatcgtagccattgggcagaatcagtaacaagcaatcctagttcacaactaattacagctcccgttcatatccaatttgtaaataatcaaagacctttcggacgtgtcgaaattttagaagagaatttcaaaatagatataggatcctcaaaggaaaatataaaagatgcatttttaaaatctcttgtacatcaagatgagttcagcgctgaaagatccggatctttaaattatatactgcgttataaagatactaatgaaccaatctatcaaggttctttgcaaacttttttacaacaagtatctgtaggtcctgaccgatctatccggataccagcggatattaatactactctcaataatttaatgaggaagcctttaaccacgcaggatttcacacctgacgatagtatgatgtttaatcatgatttaaatcgaatattggtaaatagatttcttggtgttgaattttctcaaaaattagaaacttctaatccacaattacaagataacctacgtcttatttctggaaagttgaaaaagggtgaaatttatcttgatgcttattcaactcaaaatatcttttttggtagagatacacttaagacatatcaagcaaaagcaaatagaaatagcagtccattaaaaatctatactgttactgatatgcacaatgaacaaccagtttatcaaaaaggttatatacattctttagttggcattgatagacattcagacactttagctccttttgtcacatttagttctactactgatccaatggcagtatcaaagaaaattcaagatttaaatattaatgaggaaaatttaaagcgaaccatttatctaaaagaagaattccaaaagcatccattacctaatagtgctgctccagttgtggataaagaaagagcaaatatcaatagaattcgggaagaaatgcaaaatcaatctaataactcaataaattttaataatatttaa

SEQ ID NO: 70791 - DNA, 5961 bp, Acinetobacter baumannii
atgagcgttttagataaaaaaggttttatttgggttaatttagaatcttttggatatttaactagaccatcacgacgtaaagaaaacaaccaaatcggtattgaaatagttgatctcaataatcaactagatatcgataaattaagatcctttaatgttcatgttgaaaaagtgaataaatcaagtgttcttgatgtttactggtcaagcatttcaattaaggacttttctaattttattggtgttgataacaacaatattccctttcaatccattacattgactcagcttaatgctgagttcaataactctgttcgttctcttgcccaacaaagagttgactatgccattagacatgcgacattaattggtcaaaacctgaataaacaatatgtttatgctacacaatattcacgattttatttggatcagcctttaactgaaattgctaagaatggaacaatctcaattgatcccgcgcaatttgaagcacgattacctcaagaagattattggaaaatacttaaagttggcaatcagccaaagtttaagcgagctaatatggcacattgtgcaaaaagctttgctagtagcatagttgaaggaacaacaaacattcatgattcagatgttgagttgtttttaaaaaaaatattaaacgacaaccatgatagatcttatttgaatgaaataaagcctacaattaagcaatttttctatgaacagcttgaatgttgttttaatagtttaagtaatcaatttaacgtacataatttcaattcttttgaaaaaattattgaaatccataacaaacaaccagttaaaccgatcattggtatttctgagctgcaactgcaacaattttcaactcctataacaatttcagcaatatgtcagaaattattattcaatcctgaaactctagatactggaaaaactctacttgaacctactattggtaatggatccttagttgctcatttcataaaaaaaccgcaacttaaaatcgttggtgttgaaattgattcgaatcgggtgaaaaatacccagctctttctcgatgcaaacattgaacattcaaatctaagagtaattgagggagattattcaaagattaaattgaagcaattaaacaataatgaattatttgattttactatcgcaaatccaccttttggcaaaatcgataaaactacacttactttgaatcaagcgggatcattagaacgtttaaatttttctactcaaaggttagatcataaaattttattagagacactttctttgagaaaagacaaaggaagaagtgtttttattattggttcagacagcttttatgaagctggcgtagtcaagggtggaagtaaaaatttattaaattatctctatgataattacaatgttgaagcggccgtagagctcgacgggagtttatataagaaacaagggactcgcgtcaatgttcgtgttcttgtcattggtgatcttctggaaaataaccgtacttatgaagttcctcatgagttgcccatcataaataatgttcaagatttatggagatggtcggaaaatgtcctacagaaaagattacaacctgagttaagttacgatgagccctccccttctattaatcaaagtgaatcagtcatatccgaagctaatttagaccagaatttagatgtggtagacgatgctgatttcttaacaagtgcattggattcatatttaaatgatcaaatagttccggatgagtccggtaatgttggggacttgaataaacctgatgatgacgacttctttggtaatgaggaagaagatacggctgttaaacctctttctactggagatgaacatcagaacaatgagattcttgatctagaaatagtagaggatgaatctcaagctcaggaaattatttttgaatctaaatcattgcaagttgcatatgtgccagtttcacaactaagcttgccagaaacaatgttgccagcagatcaagcaatacttattaaacaagcgcaagataatcagattaagaagatcctgcttttagctgaagtaaatcatgaattgcaaaaatctatcgatttagccaataacaatcctttcgacggctttctactttacaagctacagtattcagatctttcatctctttctaaagctttcagtgctgaacaggttgatgctgttacttccgcaatattaagcattgaaaatgaccgctcttatattcttggtgatcaaacaggtattggtaaaggtcgctctttagctggcatgttgcgttattctttaatcaatgggtttagaccagtatttttcacaaggaatgcacaattatttaatgatttatggcgggatatcgtagatacaggaacagataaatttatttctaatccttttatctttaatagtgatggattcattacgcataaagacaaggttgtttattctcctatgaaaaccagtgatatctataatctagatagaattggtaatcagtttgatattatctttagtacatacagtcaattttctggtagaagcggtaagaaagaaaatctttttctatcaagtattgataagaataccctattatttttagatgaatcgcatgtggctgcaagtggcgaatcgaatattagccggttcctttcagtcgttaaagagcgtacaggtcctacttatcattcttcagcaacagatagaaagaaagcaaacaatctacttttctattctgatattttccctgcatcttttaaagggcaattgaaaagcttaatcgaaaataaaccatctaatgaattactagaagctatctctatggctttggtcaaagacggtgttttcttaagacgtgaacatgatttttctaaacttgaattccggacatatcacgcatcgactcagtatcaaactgcttcacgtgagttatccgatcaattagctcaggtactttcaaaaatggcatacctttctggtgatgtagaagagaaagttgccaaaatgaatagtgagattaaacataatcttgagcacatgaaggagggaagttggcaagagaatcgtatgcaagtgaattcgatgaactttgcttcaagaatgcacaatataagccgtcaaatccttctctcagttactacccctttgattattgatcaagcacttgagtctctcaaagaaaatcggaagccggttattggtttggaaaataccggtgaatcgttgcttaaaatgttgcttctaaaagattcaaaagcatttgagttgctggaccagattaatgaactcaaggattcttcagattatgatcgagcactgagtgacctaaactcagggaaaatgaatcaaaatgaatttgatcaagagccaattattgtaaaactaaaaaaattagaacaggatctagctcagttcaaacaagaagatactattcttgcaaaacctccgacgatagctgacttacttgagaatatggttcataagttagatattattcaagttcgtgaccgatatggccaagtacgaagtgaaaccattgatgacgaaatctattctgatttcaaacaagacatcttggataatattcggaaattaccagacattcctttatgtcctttagatctgataaaagctgagctggagtctcgtgggtataaagtcggtgagatttctggtagagagtatcagctcaaaaaaattgattctaatcaaggttcggtttttaaagttgaagtacgtcaagaaaataatccgacagcaaagacgaaagcttgtaatgaatttcagtctggcattcttgatgcaatgattattacgagagctggtagtactggcctttcattacatgctattcccgttaatgatggtagtcctagccaatcagatcatttgaggcaacgtgagttccttacaggccagtcacctcaagcaattgatgaattcctacaaatgattggacgtgttgatagaaaaggccaagttagtgcgccgattatttcccaatttgatacggggcttccaattcaacgcaaatttctaatgatgcataatgctaaacttgccgaattatcagcgaatgtcacaagtaaccgtgaaaatgttaataagcaggtaactgacgtcgatttacttaatagttatggtgatgatgttgctctggaatatctagtccagaatcgttctgtagctcaaatgcttgtcataaatttacctaaagaaaatgataaaaatggcgctgaaggtatggttaagaaaatctttaaccgtcttaattttgtttccatttaccagcaagagaagattatcgatgatttaacttttgcttataacgaaaagattcagaaacttaatgaaatgggaattaatccattcgtagttcaagtatgtgattggaaagctcaaactatctctaaacaagagttacaaagtggcttgggcattatgtcgcatgtttctgatagtgcatttttcgaaccggcttatttccaaaaagttagctataaatctgaaacaaaaccttttcatggcgatgatgttatctctttaattgataagtcgagacagcttacacgccagcaattgttcaagcatttatgtaattttgatgataattttgcttctactatggaaggaaaggatcaggagctatctttatctagtttaattaagttctacaatgatgctcaaaaacagattctcgaaagagaattaagagagtcaattaaatactcagcttcgcaatcttttttcaaatctaaaattgataaatatgaatttaccgagattgaaaactttattctgaataaacccaatcttgatgaaatcaaagaattcttgaaaatatctgctgaaaataataattttcttcatatttatcaagggttaaataaagctttaactgtggtggaatttgtagaaaagcttcagatcttagaagaacatcagagctttaatataaatttcgcaataagcatgaaggaatcactttgggatcagcattaccatcgtgaaacaaatgaaaatgctttgatacgagttatgttcccgaaattaggcgcttctagtcttttagcgagtaattatgaaattcgttacgtttatccaagttcagattttgtacacagtagtaagctcaaatatttaatagaagatgctgctttaactcctactctattacggaatgttggtactcatttatttattgatggaaataaaaaggaagaagagttttcatttatgaaaactttaaatgaaatagagtacttaaaaactaatagtccccttttgctttctttcgataagtacgaaccaaccgctattgagcgaactgcaacccttttaactggcaatattatcaatgcccttaatgctgcctcagtagctaaattatcttctcaaatgattaattacaccgatgctagtggaaatagacaacgagcagtcatgctatatgacgactgtgagttggaagaagttttagacaaagttaaaggtctttcaacaatacaagaggcgattacttattttgaacgtgtacatgatgctatagagatgaatgaaaaacctactcttccggatttctatattgttcgttcaaattcaaatgggaacccaactattgaactcaatctaaaacctctaaatgaagaaacatataactttgttattactggtagcagaaaacatataaaacaagttgctgagatggattctatatttgtacaagctggctcaggaaatagatcagatagtttgaatttagtccttaagggagatctttcacaaggaactcgttctagccagacagttcaggtccctattgaaaaagtaactaaactgctaaccaacctttccactgaattttctactgtgaaaattaataatcttgatccagacgtcttagatcaacttaaaccgaatacgtcgaataaacttactcagaatctcatgtattag

SEQ ID NO: 70792 - DNA, 2052 bp, Acinetobacter baumannii
atggacaataaagaagaaatgaaagcagctccacaagctttaaacgaaatagactggaaagatgaaatcgtctttgatgagctactatctaaagtaggtcccataacaccaccagacaccactttaaaatcgagtgatttggaagcttacggttatcaaagccaagtgatgctaccagttagcgaagcaagagccaaagagctatatgaaaaaattgaattatatcgattatatgaagatggaacagaagcgttagtagaagatcttgcagaccttaatagtcatgcacaaaaagatggactatttggtgttcaggaaaacgattggagaaattatcaattaaaaatagaaaaaagcaatgattccgaaaatagtaatgatcttgaaaactttcagtatttttcgtatccagctttagctcaatctataattaagcgtgaaggtgaccaattttttgcaaattatgaactatctcgaagcttgggttctgatgaagatataacgattttgaataaagagttttacaaagaacacaaagcagacttagacattttgttaaacgaattaactatatctgagcaatatgaacatcaaggctatgctgttttatatgcaaccaagagtaatttatctgccctaaatagtgatgaagaaatagaagcagaagcaaatgagattaaattatttttagaaggaaataatgatgatccaaaatatgcttatgtatacgatactctttatgaattgagcgcagaaaacgtgttcaatgaatttaaggcacttgaaactagaattgaaagagacatggatttagaagaaggcaattttgatttaccattccagcatgctgtagaagagactatggaaacttttgataataacgcccctatttctaaccttccctttgatagtttaaaagagcccgaaggatttatggaagatatagagcagtactcttatgcagaggatcaaaattttggttcttcattacctatcaataacgaagaaatgatccaaaaatctgaagtaaaggaagaaaaagaaaaaattgatgttaacgatgtgggggtgccagaacaactcataatcaatggtaaagagttcaactttgaacaaatagatcctaatgatatagaaaagcatgagcaattaagagcagctttgtcgcagttattgggtaataccaatgcttcaacttttcaaagtccaagccaaataaatccagttacttccactcctttgattcctccatcaatgccagattttaacgaaaattcggcacagccttctactgttaaaaattattcgctttttcctagttttgcgaatcttaaaaaggcgactccggataatgcattatcgttattacaagctgaacaacttctacaaacatcacaaaatatacaagcaccagcttcagaaaattctggtgctcatatgaatacacaaaatgttcaacatatgctttcaagtcatttagcaagctcaaaatataatgatttggtaaattcacataaaaattattcagactcaataaatgagttctggaaatttgacaaatttgaggattttcgtggaaccctaattgaacgtggacaaaaagaaaataaggatttgaaaacattgattaatgaaatgaatacagatcctaattcaccatatcgcaaagagtttcaagatcttattgttaatgttggtagtactgagaaaggcaaagctttattgagtaaattgaataattcacatcaagactttttgtcgcgctcagattcaatgtttgaagttattcaaaaatcagagctttcacctgatgacaagacaaaatttgaaaataagctaagtgaggttgttgaaaaccaagctgaattatcctctaccctacctaattatattaatgatgacggtgtacgtattagtcttgcggatgaaatgaagaagtatgcagaaagtctcaagaaggctctacaagttgttgtggactttgttaaatctaaagtgggtttatctgtagatggccctacagaacagccttctagctcaccgtcaccttaa

SEQ ID NO: 70793 - DNA, 396 bp, Acinetobacter baumannii
atgaacatgagcactctcccctaccctaacatatatgaagatggttgttttgctggggcagcagaaatgaactggctaaaaccaatttttgaaaaacagatatatgttaaatttaaaaaaaattccttttctcctttttttcttgataaggttaaaagtgattattactgtgaagcagacatttctgaaattgagaaagatgaagtttatattgtctatataaattatggagaaacaaagctttatgagaaggagaatcaatatagccttatattaaaagtaaaaatcattaatggacagtatagggaatatgtagaaggttgctcactcaggggtgaacagacgccgcttgaatctataaattatagcttgagggcaattttcgactttaattga

SEQ ID NO: 70794 - DNA, 651 bp, Acinetobacter baumannii
ttgaatatagtcgaaaaacactctaaaattaagcctactgataatgcaaatacccctgcggggatttgggataataaaatggaaagtttagttgaaagaagtgccaaacaagatttggatactttcttacgttttatatgcacatatgccttaaatgatacatatgtgtctaaagatcttataacggaaagtcttaaagacttaccgcaatccgttgtgacgtttgtatacttacttgagttttctccaaacgatcagatcagttctatcacttctatctcagatagtgttttaaaaacattgtcagagcttattcataattttagaaatgaaagaattaattcaaacggctactcaataatttttgattttttttccgcaaatcctttcagttatttcatttattttttacgtaatgtgattacagcaaatattgatgagttaccacttgttgttaatttgaatatcacagatttcttccagtttttactagatcgtaaaagttcagtctttcactcaagaattttttattttatacgggcttggcaaactgtttctgtatataacgaagcaaatatcagcgagctaaaagaaacaatgctgtatgccagtcaaaataaagtctttccaaacatttcagtttcatcttga

SEQ ID NO: 70795 - DNA, 1047 bp, Acinetobacter baumannii
atgcataaacgtacatcagctttaaataaaaatccgcagaaattaaactctgtagaaaagaaacattcgtttaaaccaaaattaggttttacaacgggtattgttcttggtgtgtcctcagcaattgcattgtcgaccactgcaagtgtcggagatggtttatcaactattcaatcctcattgaaccaaacttctaatacctctacaaacattacgaatagttatacgaatacaacaacttctactattccgaccttatcagcttctccatttgctgctagtagtaatgctactgctgcccaatctgcaattgaagcttctagcgtgggttgtggtgatgcttcacaacaaggttcaattgcttggactcaacaagaagtaattaaaaatcgtcagattttaaatacggcaccagttgacatcgatgcattgttcaacggatctaagggttcttcttctggaagctgtttttcagatatcacgaagattattgacttgagtgtagcaattcccgattggggtggtatgcgagctgctgctattgctgctttacgtcaatatgctcaacgtaaagtatgtactatggttaatgaagcaaccaaaaaagcgttggagccactcaataatgctattgatattattaataagaatggaaacattgatttgaatggagctgtacaaggggctataactggtggtttgggtaagttagatccagatttagcaaatatatatcaaacacaagcacctcaaggcgaaactgttaacatttttgattctaatcagactacttttaatactgatgttgctaaagttcaagatcaagttaatggtgctattaatcaaattggcacaatcggaacgaataccggtagtactggttcaacgaatcctactggaacttcgggtactacatggtctaataatacatctacgcaatctataccaaatttgagcgcaaacacttctaatcaaacacaacagaaggctcaaccacaagaagcttctcgttcttcaatttttgatgcgctttttggcggtagttga

SEQ ID NO: 70796 - DNA, 762 bp, Acinetobacter baumannii
atgagtaagcttgttaaagttgccttgagtactgcgataacaatgagtttaattggttctagttatgctcagattgctcatacaacgtacaaccaaaatacgagagatttaacatctgccataggtgttttgactaagcaagaaggtctgagcgcccagcaacaggcagaatccgcaatgatctcttctaaagcactagctactgcaattggtgcgataaatatgtctgatcgtgtattacgctttattgttgacgatgctggaagactcggtagtacgcaaaccactacttgtactgtttttgctgaacagcaagcggaaaaaataaagattcttcagtcatctattaatgcggccaatatggttagtaattatatgaaagttatgatgtctaattcagttgagtctgaaaaggacaaaatacttcgtcatgaaaattactgttctattgccgaagcagcaatgggtacatgcacacttctaccaaatggtttacaagcggctgactcaaattatgcattagttttctcaaaatctaagcttcaagatgacacttttaatgcggctacagattatatagcgaatattactgattcgcgtttttctgctcaagatatctgttcaaacactcagtgtatgactaaacaaatcgattttttaaacaagacttcaggtaatagtcttgcagcgtttgtattgagtaatcaagttagtgatcgactttcttattcattgaatgctaattcatctggagctaactaa

SEQ ID NO: 70797 - DNA, 1128 bp, Acinetobacter baumannii
atgaaatataaatatttatgtgtggttgctgccctccccttcttgggtcttagttttaaggcatgggctgcggcagatgtattgtatggaagtgttgcacctaccttccatcaaaacgttcaaacacttaatagtaagatggtttcagaattcgcttctactcaagcaaatttgttgaatgcaattcaagaaaatactcgtcaattgcagagtgcacttagtgtttctattgctcaatcaagtgctggaacaacacaagtaattgatgcacgtaaacgagctggacaagctctagcaacggcttatcaagcaattgaaatgcaagataaagtgattgatacggtattgaactatggatctactggacaaggttacaatacatgtaaagtactagttagtaacgcaacactgagtaaaggtaaagaagtttcgagacaaactgctgccaaaatggtgaatgaaactagtactggtactggtcgtgtagtacatgatttaaaccaagttcaaaaagaaacggttcaaaagcaccgtgagttattttgtacccaagctgaggcaagtctaggattatgtacggtaagtaagctggctggtggagatactaatgcggctttacttttccaacctgctaagcctaattcattagaggctgaagcgagacgtacattaagaggaaatatcttaggttcaccagatgtcgctttaaatgctgttaatggtatgacacctagaggtcaacaatatttatttgctttaaaccgtaaaacagctttacaagccttccctgcttattcattggctgctattgacgcagcaaacttacaaacaatcaagaatgaagctggtgaactgcgatcacctaatcagatgattgatgagactattggccgttattacggtactgacgaagccaaaaagtttcaggcaacaatgatgaaccagtcagctcgtggattgctagttgagttggcaagacagcgtggtgcggctatttggttacttaatgaggactatgaacgtggtttacgtctagaaggtaatttagcctcacttctcttaattagtgctgaagaatcaaagtcgaaaatgcgtgattcttatcgcacaatggctggccggagctaa

SEQ ID NO: 70798 - DNA, 1134 bp, Acinetobacter baumannii
atgaaaaagaaaacgacgtttttactattatcagtttttagtacttcagtaattgctgcttactgtcctcctttttcaaatccattgatactcagagattttataagcggttttcagcaattaaatgcgacattcacgactggacttaatactttggatcaaagtgttagtgcagctttaactacagaacgccaattacttttaaatgcaattgctttgaagacaacacaagaagcaatgaatgcttcctcaattgctcatgcggaccaagaaattgcaaaggcgactgctaatgctattggcgctgttaaacaatcagagcgtttaaaagaaacagctattgattttggagctgctggacaaggctataacccatgtaaggttctaaatgaacgtagaacaattactgaaactcaagaaagggataaagaaaatagaccagatttaatttttaaggaaatttcagcgggaacgggaaaatatgcaaatcctgtagttgctcaagaacaaacacttaagcttcatcacgattatttttgtacatcagaacaagtatcagccggcttatgtatgagcgtaggtgaaatgtctggtgcaaatttgcaagcctctactttatttgagtattcatcagcgaatgataagtatgctattgcaaaaactagcttcattaacaatatggttggtttgccggatgcacccttatctgcaaatgcagccaaaacgcctcgtggtaaagaatacatgagacagaaagttgaaaatgatgcagttatttcaccagctattaatagtttaatggcaatcaaatctgaatttactgaaaaccctaatggtggtgagtttggtcaacctgttaaaccattgcgacaacaatatcgggaacaagtagaccgttatcttggtcatggtgaagaatataagaattggaatagaacattagttgctgcacctgagcgtggggtacttgtagagattcttaaagaaggtgcattagagcttgcaatcatgggaaataaacatgctcaaaacgaacgtattgaagcaaatttagcttctttagttgcattagaaaataaaaaggcaaactcgcttaataaatctaatatagctggttctgctaaagctaaataa

SEQ ID NO: 70799 - DNA, 3735 bp, Acinetobacter baumannii
atgaaatggttgaatttatcagaattcggactgcatctagggtttcgaaaagcaacaagctttagagataaagttgccgtactgactgtcaatgatttaaatactttatcacggttcattcatttaaatgattttagtgaaaaactacaagcggtaggatttaaccgtgtcaattcagatgacgggaatgcaaaatttgtaaaagctgataattcaatcaatccaaaacaattggcttcaatattgccaatcacaaataaacatttacaagatatgccggagaatgatgctagagcgaaatttcatgtagataagcaagcatggatagatttgactgcaaaactagctcaacaaggttcagtttggaaactagatgaaaattattacaatgaagcaggtatacattggaaaaataaaattagtgaaaactacctagatctatctacaaagcaagatgatagatacataaatttagcttttgaaagccctttaccagtaaatatgttagaaacttataaatatgattcaagagcattgggtgtactaactactaataaggaaatactgataagaaaaggcttgccagaagaggcttttacagaagtacaattaaactttatgctgccattattatcattggaagatgaagtacatatagttctaaatgatatccgtgaagtaccagaaatattagagttgcatccagatatatggcgtcaatcgatcaatagttttgaatcctttttaacaagatcaaaattactagaaaaaataaataaccttttgataaatgatgaactcttggaaaaatctaatgaaattgtaaatgatataaaagtgttttacgaaacgtataacaattgcttactaagtaaagaagaattttcaaatgatgatgatttaacaaatcaccgtattcagttgttgaaaaaccaaattataaagctcgataaatttggtgtgattaatgaaaatttattaccaaagcttgataacatctatgactcttcaattgaagatactgtactagaacctgaaaaggaaaataagtcccttaatgaaagaattgaggactatggagaatatgttttcggagctagaaaacatttttatcagaaatctaaaaatgcacttttcgaagaattgaataattcaaaagacctatctttagatgttctcatagataaattccaaaaacgaaatttatggtcattcaaaaatgaaaccatgagccaaattgaagacaacaatgtgatctttttcttagctcaatcagtctacaacatgattccttctaaaatctctttctccaaagatgagagaaaagactctgaagaatgcattgataagttaaaaagctatatgtattcagttaaccattttaaagaaatggtccatacggctatagaattagacaaaaatgaaagaatgcctatagctaattttgtcaatcaaatggttaactatagaaacgtcttaagaggttatgctcaggatcctcagcaattcttatttgatgaattagatgaggaccgtttattagcagataggatatataaggttgtaaaaggtacgactcttagaggaagtcctttatttcaaattatgaataatttggatactgtcaaaacacagtattgcaaaatgatgtttaatgaagtctatccagaaactaaagaagtctcatatgatcaatttcaagactatgttgagtccggcggtcacatatatgatggtagcgcaataaaacaatttatagacgcagctaatggtaagttagattacacatatctttcgcgccaatttgagcgtttagaagatagcttgggtcaggaattattcctaaacatgattgttacaggaaataagccattttcagatgctttatttaaaaatgttgaaaagattttagaaagcgataaaagcattaaaacacctttagatttcgaaaaagatgattctaaacttaattatctactttctttatatcgttttaaattcgattcaaagtattcaattcctgatatctatatcaaagatgaaaaccaacatactcaagttatcactgacttgagttcaactgataaatttgatggcttagttagaaagatattaaaagaccaagagcctaatcgacttgatttacgctatccatcaattgtatctggtcttgcacatgagacatcaaaaaattttcggcatggtgaaaatgtaaatccagaacaatttagtaatgtatttggttttcgagcaatacagtttggaaactgggtgacacaacaagaaagacagcatttattgaatatcacatttgatggtctaagtgagctaagagacgctctcggatttgattcaaagaatatttctttaaatggaactttagctatcgctttcggtgcgcgggggcaagctggacgaaatgcagcatcagctcactatgaatatgctagcaaaatttttaacctaaccaaacaaaatggagcaggttgtttagcacatgagtggttccacgggcttgatgcatatatggcacaactagtaagaaaagatgtagagaaattgatttataaaagtggaaattttgaatctgtagaaaacaactattttttaacacatttaatgtcagacgttgactataaaacatgtaaaacagttatagataacaatccattattgaaaagtgtttatgagcttcaattaaaactgaatggaaagatgcatagagatgaaatttttagtgaaaatggaaaagagttaatagtaaatcgtatacatgagctagttgatagcaatttaataaaagtaaatgtattaaaagatgcaatttcaaagtctttggaaaagcaaggtcttagtagaatagcatcattgttagatggagtgacaacaaaccatgttgacaatgtaaaaaaattaaaaaatcacgaattaacaaagaatattaagaattacttggtagataatgatctgcatataaaaagagaccaaatgtatagtgcggtgaaaacaatctttaaagaattgcaaaataacaatgcgccagttggaaaatatacaattgcgaatccaattacccgtgaattcaattcattggttcgtggttcacaagtcaatgatgatcttgcgaaatcagagaaggaaatattgaaacatctaagatcacataagattattaaagaaatggaaaagttactgcatgaatcagtattctatttagtacaaagacaaacattacctttgtttatagatcaagtgaattctataggtggaaataaaataagcattctaaaaggggttgcgctagatcactaccagtcttatatggaaaaatcatttcagacagggaaggggatagcaaataaacttgatttagaccttgtctttaataataacaattttgcaagccagtcaaaattactggataaagacaagaagcaatatttttcattagttgcagaaaggttcgcacgatgtggagaagcgctggtaacagatttacttgctgaaaaaagcgtacaagtagattacttagtaacttgcatggaggatccacaaacagtagggcaacgagctggtatcactccatctggtaatgaccgaactgaaattttaaaagcttttaaatcagtgattgaagcttgccgtagttatgcttttaatctggataaagatatcaaagaggaaaatgaagttaatcaaaaattgtctactacactgtcatttggagctaattga

SEQ ID NO: 70800 - DNA, 402 bp, Acinetobacter baumannii; identical to SEQ ID NO: 56911

SEQ ID NO: 70801 - DNA, 654 bp, Acinetobacter baumannii; identical to SEQ ID NO: 57774

SEQ ID NO: 70802 - DNA, 543 bp, Acinetobacter baumannii
atggtaatcagtgatgaaaaaacttttttaaattatctaaatttaaatcaaagttcgggtttgtcatcaaatgaatataaacagcttcttgaaattaaatcagtaattgataagaaaaatgataaaataaactatgtttatacttccattttgaaagacaatttcgttaaaattttaacccctttaaatgataatatatttcaggatgtaaaaaagcagaaaagtgtgaaaaaacatattagtctcttttttaattctgaggtgatgaacacattatttatcaataaccttatagatgagttgttaaaatttaaatttgtagatctgttatcaatgactaatacatttatgagtaaagtattagattctacaaatacgtccggaataagattaaagatcgaatttagttatgagggggaagagtataatttttaccttataacaatattacaaacacttaattacctcatcgaagaccagaaagatgtttcttctcttaagaaaatgattcttctacctgaattcaagctcataacatattaa

SEQ ID NO: 70803 - DNA, 492 bp, Acinetobacter baumannii
atgaaaaaatcaatgagtaaggctgattttgaaagaattagagctcatgactttgtagttctaaagggagtcaacaataagcttattgttggtcaagtttcggttgataaaagttgtatattcttatctctaacaaataacgaacttagtcgtttagctataattcctgaattaattttagagaatttaggtagtatcgttgaactcatgaagaaatacaaagaagttttttctcggttaaatgatgttattgaaaagtccaatttgcctgaattaaatgagtataagaatgattcactatttaaaattaaagctttatatgctttgagagaattattggattctgctgaagtgaacgaagatgtaacaactgatacattagaaatagcggtcaaaaaggcattagaagaatgtgtttatattcaagatgttcagtttacactgtcttactatattttaaatcgacctaagcaaaatacacaaatgatgtag

SEQ ID NO: 70804 - DNA, 1494 bp, Acinetobacter baumannii
atgcgtatattcaaatatgagctcgaagatgctctacaatcgcttgataatagtgttagttatgcaggttttattaataaattatttccaaagtttatatctaaagatgttgataacatcaataccattaccataaacattattctgaagaaaattcaagatttattatcttctggttattactccgtatttattaattataaaaactatatgaccaatggcgagagggtatggggtttacatcatttttgtatgtgtatttacttacatgaaaattttgaaccatttggtacttattcatgggatgcatcttcacatcctcaaatgatattagatttttggtccttgacatcttcaaataaatacgaattacatgaagtgggtttaacttataatcaagttaacaattcagatcatacagaaaggatgaacatcgatattgaaatggcttgggaagaattagttatattaaatccaacttttaattttcctttctttaggaactttttttacttaagttgtttatcaatttttaatatttcggagtaccaaaagtttggcaagttgctttcattaaattatagcattgatcatttacttgaccagttgagacataatttatttaattttttagacttacttgatgactatatgcttaatatagatttaagtgagtcaacatactcttttactgatagcactagttttacaatgtttgctgaagtaagtgaacaggacttactcaattatgacttctcgtttgtttctgacagttctagttctgaagattctacagctcaacagagccaaacattttctacatcagatacacattcggctccttcacgtgtagacagctcttatctatcttttctttcaaagcaagatattcacgaagagatcacttctaactatgttcgtgagcttataaaacagttcttttataattattctaaagtcagcttttctattcataatacgtcgataccaagtggattcgtcgctgattttcttgattacttaaaccgatcactagagcaaatatttattaaggttgaaagtttaaaagtcaattatttgaagcttcaatttatttaccagacttctcatactttatcgagtatgtatttttataagtatatagttgataactatacttctatttttatcaatatttctgtaccggaaagcctaaaaaaagaagttttagttaaggtgagatctttatcaatttttattaaaaataagattaataaattaaatgatgttctcgttcatgatccacttttcataaatgtttactctttagtctttttttacctagatagtttttcacaatctttaaactatattcgatgttctggaggggagctagacaaagatagattagatttaatatataataatgaattggagtatatcgatgctttggattttaacttttttcaatacttggcgcgaagattaccacgccaagtatatagattgccttaa

SEQ ID NO: 70805 - DNA, 498 bp, Acinetobacter baumannii; identical to SEQ ID NO: 56762

SEQ ID NO: 70806 - DNA, 570 bp, Acinetobacter baumannii
atgtatagtagcacaaaatcgtttagcaatttgtatgcttctattgttcatatgcaagagcaccaatctcttgaagaattacaagcgaatcaaatcattaaccatgcaatgaagaatggtcctgatcacaaactgaatcgtcttctagaagaccaaatacttaatggtgttaaagggttcaatattgaaaatatgggaatgaagcacgaaatttttaatgacaaagttctaatgaatcttaaaagagaacgtgccactctccaagacattaacagcatcatcattgatacagcattacaattttcgcgcaatccggatcaaatcgaattgaatgaagaaaaattaaagagctctctaaatacaatcaaaaatctgcattgcgaacgttcgctaaaaattgatctaatccggaacatgaaagaaggtgtacttacgtttgttccagaagaacaaagaaatgatattgaacgagtaataattagtaagcaacgtgaaattgaacgtacagctactcaatcaaataaagtagtattagaatcaaagattcctaacagcttcaatccaagataa

SEQ ID NO: 70807 - DNA, 2649 bp, Acinetobacter baumannii
atgagcatattttgcccttcgcagactgacagtacatgtcaaaacgatgcagcaatagacctgctgggaaaaatttttggtgatgggtttattcaagcattcgtgctgggtaagtccgctgctgcaactgcacctgctacgggtgaattaacgcctgtactctttggtgcattaggtcatttagccttagtgtttgccgcttttctttttctctttctagtttttacttccgtattacacactgcacgagatggtgaagtctttggtgctggaaagaaaaaacattgggtaatacttcgtatcttgatgtctggtgtcatgattctacccaccacatcattatattcagtttccagtgtggtacttatgatggtggtattagcctcgaatggtgaaactaacaaggcatacagagaatttttaaatactgttgttatgaacccatcgccatcctttgcttcagtagacggtttagatccgtatggctttcgcgcatacgcaatccaaaagcttcggcaatacacatgtgtacgtgttttgaatcagaattttgcggctgaaggtgtttctgtcggtgaaaaaaaatattcggatggccaaacttattatgtttctaatattggaggagaaagacaatttaacagctctctagttgacagaaataatgtcttagatcagggatatttcggagcaatatgtggtacatcctcttacattgtagctaatgctgactctgttgattcgaattttaaatatttaacatctgaaaatccggatttagaatcatataaagatttcaaaaaacgcttattactcaatatacaaaatcttaaatttcagggtattgttcgattaaatgaagcagtacttgcatatgtaaatagattgccatctgaagcgattagtcctgaagagtatgcacgtaattttaatcaagcttttaataatgaagaatttgataaaattattactgatgaaattagacgaactgatgcgtctattaactcccacttacagtcaaatcaaaatagttatattaataaaacaattcaatattttgctgaacgtggttggacacaagtagctctcactaagaagaaacttggtgaattccagcgtgatatttatgaggctcgcgcaaaaaccatttatgaaggtacgaatccagacttacaacgtcttaacagagaaggcgttgccagtgaaaaagaacgtatgatttataacgttctagtcacacagatggactctactgtaaacaattacctcaagacacctcaagtagtaacaaccctatcaactaacgatattcagaatttaattcctgaagatataactaattcagatgtttcatttaagcagatctctaaagatgttgaagctgcaaataccacactagtttcaaataccatgagaatctttattgagacttttactggcactggacaagctgatggcgtagatgctgtaactcgtatgcagaacacgggtaatgtacttcacattgctttaacggctgtagatactactctaactggtgtgagaactggtttatctgctgctggcgccactggtgctgttttctcagataatatcggtactgctgctgaaattgtcattgggcttgttgactattattctgaaaagctaggcaaaatcatggtgatgggtaagctcgttgcttattatcttgctgtaattatcccgactttaccgtttgtattcttcttcttcgctgttattggttggattattcatatcattcaaacgatggttggcttaattctttggtcagtaatgcatatgatccctgaacaaagttttgtcggtagccagacacaaggttacttaacggtagttgccttattctttaggccgatgctatcgctagtcggattcttcttggcttttattatttctgatcctttattaacatttactactgatggtttcttcgcaatcatgggagctgtacagttcactaataatgggtttattgctgctttagctcagttcttctggctaatgggttgggtaattttatattgcttaatccttttaccaattatttatttgatttttggattacctagttcgcttgcggatagtgtgttagcttggttgggtactaatttatctcgatcacttggcgagacaaatttaggtcagaatgtaggtcgtgctgcaaatccggctgctggttactataatacctctggtggtggacgaggtggctctggcggtggttccggtggtaacggtgggggtggtagtcctgctggtggcggtggagccggtacacgtggtgatggatcagtattgatgaataaagggcagcctaatgaacaatcatcgggagctcaaactcacttacctaatgctaccccaagctcaagtaattctaattggcagtctgcggctgctgctggagctagagagggcggtataggtggtgctattgcttcgggtgttagcttcgcgggtagacggggtcttcagaatgaagcttcggccggaacaagcgtcctttccgatgtaaatgctggtgctaatcaaacaggttatgttcctacagaatatcgtattgttccagcaactacctccggtgcaaatagcgttgtaccagaaccaaaagatcctaaacggtag

SEQ ID NO: 70808 - DNA, 360 bp, Acinetobacter baumannii; identical to SEQ ID NO: 56765

SEQ ID NO: 70809 - DNA, 1836 bp, Acinetobacter baumannii
atgatgtctgctgctgttattgcagatttacatgcttcggccaccaactttgaatatgccaaaccgtctggtcaaactggtaaaccatcaaatttagatgccggtgattttcctttaactggtaatcttctcgttacatcacgttttggtattactcgatttcgatcggatggatcaccgcggtcacattccggtttagatatcatcaactcaaatggtaatcatagtctgtacgcaattgcggatggtgtcgttattgcgaatggatggatgaccggtggtggtaattatattcgcgttaaaaggaaagaaaataatgacgtatatcagtatcttcatttagctacgcgctcccctttaaatatcggtactgaagtaaagaaggggcaatatttagggacaatgggtaataccggtatatcgttcggtacacatttacattttgattatgcaattccacaaaaagaaggatcccgtgccagaaatgcatggcttggtagtccaaagggaagcgctaatgcgaatccatatcagaatattcagacaataggtctaagtaagaatggaatcgaaggatactacgtaactgatccgacaccatatttaaaagatgatataaaaataacggatagtacctataaaaactatctcggttctactattagacaacagtttaatatcctctatggagctaatttgccagtaggagctggtgcaacacagccaaaatttgctggggttcagtttaagttacctcaaggatatggagctactgatgagcaactagcaaaagtaaatatttctgtcattgaggctagacaaaaagctcttgaaaatggtgagatcactgaagcacaagcttacgatccaaacattacttatcgagaagtagaagatatttttaaagattcagggcaggtggggagttctgaagaaactaaacttgatattggtgatgatggatcagtaaaaggccacattgaaaatttagctttcaaacgtttcgcttctgctggctgggctcaagatctggtaaaagcttcaaatcgatctttatgggtcgaatttttaaatattgaaattgctaaaaaccatcttaaaacacaacttttaaagcaaaatgaacgcattgaagcactttttgcagcttacgcaattgcaaaggcacgagtcttacaaggtaagattgaagagttaagacaggctattgaaaatggccgtaatattgctttaatcagtcgcctagagcttgaagatcttccaccgattgcttcagatactgaagtaatgaatgcaacagttacaaaacgtaatggaagttatggtttaactgctgataagaaagctgcaattattgcagtcgctcaggcaattggtgcaaaccctaatgacttagctgctgttattagttttgaaacggctggttcatttagtccaagcatacgcaatccaaaagggtctgcaaccggtttgattcaatttatgcagtatacggacggaactggaaatgataagacgccgcgagatcaatgggattattggggcatgacacgttcacaatttggatcattatcatttacagaacaaatgaagtatgttgaaaagtactttaaagatcgtggattacgtgaatctaaaccagttagtttagcgacactttatggtttagttatgggcgtgccgaagggaggatatacgattgcaagacattcggctgtcttcagagataacccagcatgggatgtgaatggagacggtgttatcacggctgctgaagctgtaaatggatcaaaatttaaagctcatattcgagtttatttccctgatttcccataa

SEQ ID NO: 70810 - DNA, 342 bp, Acinetobacter baumannii; identical to SEQ ID NO: 56767

SEQ ID NO: 70811 - DNA, 396 bp, Acinetobacter baumannii; identical to SEQ ID NO: 56768

SEQ ID NO: 70812 - DNA, 225 bp, Acinetobacter baumannii; identical to SEQ ID NO: 56769

SEQ ID NO: 70813 - DNA, 1659 bp, Acinetobacter baumannii; identical to SEQ ID NO: 56770

SEQ ID NO: 70814 - DNA, 651 bp, Acinetobacter baumannii; identical to SEQ ID NO: 56771

SEQ ID NO: 70815 - DNA, 1047 bp, Acinetobacter baumannii; identical to SEQ ID NO: 56772

SEQ ID NO: 70816 - DNA, 498 bp, Acinetobacter baumannii; identical to SEQ ID NO: 56773

SEQ ID NO: 70817 - DNA, 1296 bp, Acinetobacter baumannii
atgaaccacacaaacaaaatttttttactcgttgatgtcaataatatgtacacctcggtagaaacggcttttgatccttccttatcggggcgtgcctgtgtagttttgtcaagtaatgatggaaatatcgtagccagaagtccggctgcaaaaaagcttggaatcaaaatgggtgaaccattatttcaaatccaagatttaataatgagaaacgatgttattgttctttcaagtaactatattatttatggggaaatgagccggcgttttcataaaatattagctgaatacgtttctccagaaaaccatgaaatatattcagttgatgaagcatttctggaacttacaagttatagggatatatatgatttgaatcaatgtgctaaagacattaaagataaactaatgaaatttttatctttgcccgtttgtgtggggattggacgcacgaaaacagaggctaagtgcatgaatcatatagcgaaaacctatccacatttgaacggtatttgtaatatttttgatattgctgaagtaaaagattctatttatcgtaatacggatgttggagaggtttggggggtgggctggcaacaaaaaaagaaacttcagcttatgaatattaatacgatctatgacctaatgatggctccaccatcgcatatacaaagtgttttttcagtggtattaaagcgtactgttctggagttaaatggcatatcatgtattgatatagagcatacgcctccaacaaaaaaacaaattgtctcatcacgaacgtttggccagagaataacaaaaattcatgatttgaaagaagcaattattaaaagaacacaagaagcgtttacacgtgcgagaaatgaacaagttcttgtggggtgccttattgtgtttgggtattcaaatccttttgataaaacaaagcctttttataaaaaggaacaaagcgcatcttttgctgtacctacggatgatttaaggttactggttcaaacagcaacaagattaatggatcaagtctataaggccggaattgaatttaaaaaagccggagtgattttgacttgtctcgaaccaaaacatacttacacctatgatctgttaactgaccatcaggatctggagaaaacagagcaacttatgaaggctattgaggatgtacaacagatctttggtaaaaacaaaattggatttgggggaagtatgtttaaaaaccggatttggaaccttacagcaaatcatcaaactagaaattattttagttttgatggaatgataaaaattatgaattaa

SEQ ID NO: 70818 - DNA, 879 bp, Acinetobacter baumannii; identical to SEQ ID NO: 56775

SEQ ID NO: 70819 - DNA, 885 bp, Acinetobacter baumannii
atgaacgacaagacttcacaaattaaagatgccggtatcttaactattggtaatggaaaaggtggcgtcggtaaaagtacatttaccgtacattctgcgtactttttttctcaacatggctacaaggtaattgtcgtggaccttgataatcaaggcaacagctctggtcatttattaatgctcaattcaaatacagtattaccagaatatgtgacgcgaccaacctcacctgtacataacttaggggacgcaatttctctttttcttaaagataatcataatcttaagtgcgacttacaaaatggctcaattggcgtttttcgaccaactaaagcactcgctaatataaacacgagtagcgatgttgatctagttactatttttaaagataatattagtaagttattgaaatataaaacagttattatattcgacacaccccctactctaagtaatttaatgcttctacctttatcagtatcaaatgtagttttaattccgacaatgcttaaacaatacgcatcggatggtattcgagattatttgtcttttgctaataaaattaaaaaaacgaacaaccccaagttattaattggcggtattgttcccaatatggttaatttaaaatcaaatattcaaaagaatgaactatctaagttgttggaagtggctgagcaaaccaatttgttctaccaagataaatctaatatggcatatataacggataagaatgttatagaagaagcagtcacttatggcactgcttgttggcatattaataaaacatcatcacgtgatgtcaaacgaacatttaccaatatattcaaacaagttggcactcaacttaaattatctgtgttcaatacatctggtaaaggagaataa

SEQ ID NO: 70820 - DNA, 648 bp, Acinetobacter baumannii
atgcagctttctctagaattacttgaacgagtattccgttcaaatcagaatgatcctaataaatttatgagtagactcaagcaatcacctaatccgaaacatgttttagatgttgtggcagcctcagaaatgttgcagaaagctaacttgctgatacatgatttgatgtcgaatggtcaaaagcaatcacatatttttaaagaaaaaaaggaatatgagagtaaggatcaaatcttcactttaagatctgatgacgatccaaataaattttatgtatacgttttccacttaattcctgaaaactctcttactgtaaagttctcctactgcttaggtacgctaaatgcaccaaatgtttttggtcctgagtctgctttaaaactaaaaggtgttttactaaatatttttgagcttcacctcaagcaagaatttattttcccatcttggtgtaatgtgttttatatcaacaacttaacctcaagagcaatgccaaatattgccctctcttctattgaagatcagttaagtaacccattggatttttttccagatgcgatagaaacattaaaaatgtattctataaatatcaaaaacattgatctagaaattatggatatgtttgttagttcgaatcaaatgtctaattaa

SEQ ID NO: 70821 - DNA, 609 bp, Acinetobacter baumannii
atggctaaaaagctacccccacatatcgttgacgctcttgaagcgttggaagagaatgaaattgaaagtgcatctttaaatgcacttcgattaagagcatggttgtatttcatacggttcttaagttcttttcaaacaaactatgaaactaaaaacccttactctagtattcaatttacacatcaccaagcaagtttgtttgcatttggaatagatgacaagaatccagaaaatttcttgttattcgctcaagaaaatgacttttggtggttaagtgaaattggtattgagtattttacatttattgaaaaatacttgattatcaagtttttaccgctaaattatgtcaatttaaatttatccagtgagaataagatccggattccaagcttaactattagtattccgttaagcgacatgtactatgatcatcttcagcaatatattccagcattcaaaaatgcatatatcggtaagattggaccttctccggctggtattaataaatggaatatttctgagttcagtaatcttcctatacctgttcgaccacaattgactccaattaatcgtcaacacgctttatccaacaaaacttcattcctttaa

SEQ ID NO: 70822 - DNA, 969 bp, Acinetobacter baumannii
atggaaagtaaacaacgtttaaatttctcactagatgagtactattcggctattacacatctgatcgcctctaaacctaaaaaagaggcttcggacttttccatcttagaaaacggtttttttactgatgacaaagaactgagtttaaaaataactcgtggtgaaaagtcgaacttgcataaccctctttcatcttcaaataagcaatatccccttttcaatgacaatcaattagccgatctcattaatttctttgatactgctatttggactgttgaacgtcgtttacctgtacagagttattgtcgagcgatttcacagaactttgatcttattgttgaccttaaagctgaatttgtgattgctttatcaatcctaaacaatctcgaattctctaaaattcaaagtcagttccatattgatggtacttctcatcttattgataaaacgcgccaactttcacggttgatttgcgatatcaatgatccaaaagttcttcaggatatcgttgctcaatgtaataagcgtatcgatgacttggatactgcgccatatattgaacgaatggttgtaactggccatgaccacattattaatagtcttcagctttacagcaaagtaaagccgtatgcgaacatggttcaagacggcaatagtgatttttcgatcggtaagactcttgatatccgtaaatgtgatgtaaagcgcatccgaaagatgtctaatattgaagggctattgaatacagataatcgttcagcaagaagtcgtgcacttaaaactgatattgagaagatccttgatactccatcatatagttgggttttagagcaatcacagacacacgggatcagtgaacaccaagctcttaagaagattattaaagaacataaaaagttcactttgaaatcgaatctagattcttcagatgaagatgtgattgaaaacactggtgaagtaaatggctaa

SEQ ID NO: 70823 - DNA, 855 bp, Acinetobacter baumannii
atgaaactgtttaataaaaaagtgtcattacctgatacgactcatttaccttcagtgactagcaatgttcacgaaaaggaagataaaagttttctgacaattcaggtacatactgatgataattgcacaattcacaatcgtgctcccaaattagtatcaattcaacttccagaactaccatcatttaattacgctttagactttgaccaaagtacattgaatgcagatccggtacatacctcagaggaagtaccttataaaattgtcaaattcaaagcagttctagaaatctcaccttcctttaagaatgaagctgatgaaactaagacatatgaaattgctgatatcgacttcaaagtctatccaaacgattatgattctaaagcagataaatatttctttaacacccctgatgaaattaaagagtatttaaatggccagtgggaggatgcatttaatagtgttatctcaacttataacttaaataatagaacttttggcaatcagaataacggtggatatacccctatcacaccttcaggtcatgcaactgtatcaactgtaagacagccaagaaccttttcaatatttggctatgagttttcacttttacagctcttcctagccgctatcgttttacttctacttgcatttatctcactatctttatggggccattatgttaattcaaaaaatggctatgcaaattcttcacaaaacccgtattcttcatcttcaattgatcaacaagttcaaattgcagaagatgtggtttcgcgtgttcagggcaagctaggggttccagctaccgccaaaagcaatgatctaggttgcttacaagatagtttaaattaa

SEQ ID NO: 70824 - DNA, 945 bp, Acinetobacter baumannii
atgaaaaccaaatcacttggtaacagcaataaaaaatcaagctttaaatttccccatgttgctttggcaactctacttggctttggtgcggctggaggatggatttattacgattcacataatgttcctacggttgtaacttcaaacagcacaaacctttatagtgaaaatctttttgctcaaatgagtaagctaggccaagtttctaacgttcaacctatggctggtgaactacttgcttggaccatgctaatcaatggtcagccccaagttgtttttacaactaaagatgaaaaagtggtcattactggaaatgcttttgatacagcaacaatggatagtgtaagccttcctattttgcaaaaagctcaacaaggtggtgctccagctaattcaaccggagtagctgcaccgactggcggtaatgtaactgttgattttgcagaaatcgtagggaaatgggataaagaagttcctccttctatcactttactagataaattaaaaggcgcaaaagaaggtaatgcttcagcggttgatacactgtatatcgtttttgatcctcgttgtccaaattgtcatgaagccttccgcgcaacacgtaaatatgtagaaaaaggcttttcgatcaaatggattccaacaacactacttggtaaacacgaagaaggcgctaaattggcggctgctgttcttcgtgatccaaaacaactcgaaagagcgttctcaagagatccaaatatagtggtcaatcctactcctgaagagaagaaggctcttgaagaaaacgtgcaattccttactgaagcaaccgtacaaagtactggtagtcaaactattgctgttcctacagcattttacttaaacaaaaaaacaggtgagccaaaaatgacaactggcttatcagatgaaagcattttagaaatgattttcggaaaaatctaa

SEQ ID NO: 70825 - DNA, 1371 bp, Acinetobacter baumannii
atgtcaaataatcataatgcaagtcatggatctactgatgacacactcattttgattggtgttttatgtgtaggcatccctctattagtttttgggggatggaaaattggtaaagtggcaattatcacaattactcgaaacgtgtacgggttaattgaacttccattttattaccttcaattatttattcagaaaataactggttctaacgctggttatctggatttcacaactaatgctattacaaagctatgttatccggatccaaatcatgcaatgaatccgttaatgcattgtacagcgaatttaaaagtagttcctttttccttttactctgaaaactgcattttcccaactattcttattggagctctcttagtcggctggatctggtataaacatgcaattaatttgaaatacttacccgacacacgctatgttcaagaacatgatcttgaatcattaattagagagctgggatcttatcagccacatttacgctatatacaacgttttattcaatccaactatgcgaccgacaaagggttttatagacttcttttatcgccaagagaatttatcaaaatacataatcttgtttatggattcagaaaatacgaaattgaaaatgccgaagattttgatgattttaaaggctcaaattctccaaaagatgatgcttatccattgctagaccaaagcaaatttgaaaaattgatgatgcatcaacttggtcaaatgctagataaaccatcccatctaagcgatggcgaaattattctttatgcactttttttaccaatggcttgtgctacagatgaacgcatgtctgataaagagttcaaaaaaattaaagctcaaaaagatatgttacttcactacttttgggacaaagccattgagcacttaacttcagaaaaagcttttattaatcctaataattatgagccacgtgaatttaagtattttgaaagaaaaagattacagaaaattgtcgagaaatactggaatcaccctgtagctaaagaagttttttcaaagcatgcatatgtacgtactgcccttattgcactgatctataaaaccagaacgttaggggtacttgctccatgtgagcttcgctggttgagaaattatgaccgcacgctttgggctcttgttcagaatgttggtagacctagtgtttatgtagaacaattagcggcattttcacactacacctctgaagcttattaccaccggagaaagatttctccagatttcagctatggatggaatgggcttttagaaagccttaaacaatatcgctacgccgatcctcatgtttatttaccagcgcctccgaaagctaatgagatcaccgtcaactag

SEQ ID NO: 70826 - DNA, 750 bp, Acinetobacter baumannii
atgcctcaaaaacaccggttaagaatctctgttagtttagccaagctacctaagcgccaacgtgattttctggacaagtttaagaatataaaagagattgatgtgcatagcttctatgcacatctcatttcatatttcttttttcatcctactaaatcacttcagttaattggagccgttggaaaaaatgagagcaaaattgcccttaactttcatcatgaggcgattgttaaaacactaactggtaaaactcaatatcaaagagagctttattgcctaaccgctttatatgaaatgtccaatatgttggcatacaaactttttatgtattacacgtatgttaccaataggaatttcaacgaactggcagctcttgagaatcagttttttgaattgggaatctctgcattccttgatgattttattgagcttacgaatgaaacgaaatttttccagaatattcaaatcatggcatcaagcttcaatactgaaagcaccagagcctttgcacttttagaaagttatgttcatagcgaaactatggttactgcaactagtcatccagactctctacagaaacctatcttagacgatctaactaccaattctctttcacccaccactgaatacactttagcttcaccaaaacaagaaacgattgatcaaatccaaaatcccgttgatcaagagtctttcgatgaacaatcaagttcaactattgaagactggagccagattcaggtcggataa

SEQ ID NO: 70827 - DNA, 1059 bp, Acinetobacter baumannii
atgaaaggttataaaactttaacagttggcgtcgatgatggccatgacggaatcaagatttattgtggtgaagtgggtaaatcttttcgtctaccaagtcgagtcgccaatggacgcaccattattggtgataccgatgaagtaaacaaacaaatcattcacgttaatggcaagtattttactgtcgatgaatttacaaaagagcatattgatacacgtactgaagattatccgctaagtgatgcgaatgtcgcacttgtgcaccatgctcttcaccaagcttttgatggccaataccgtaaatttaaaattgcgactggcttaccattaaaccggtactacggtggtaaagacaaagctaaaaatgagaaattgattgctgacaaaactcaaaatctattgattaataaggattttaacaaccctactgtttacaatctttatgagcacgacaaaaaaaatgatcctttgcagattttaaaccatatcgttctttctgaaggtcaatgtgcttattttgatgctctcatggatgataatggcaaacgctcaagtatgtatgaagatttatgggaaggaggttgtgcaattatcgatattggtggtcgcactaccgatattgcaatgattaatccccgtggcggcaccatgcaagcttctcgctgcgacactctagatgtagggataattactttaaaaaataaggtaagtcaaaatcttaaggagtttttcgggctttcttcaaatattacagattggcgactctctaaagccttgaagaccggcatttataatcatggcgggaaagatcacgatatttcaaaaatcttaaatgctgcaaaggttgaaatcactgatcagattgaaaactctatcaaagtgaatgtgcaagacggtcaagatctaggagcagtgttgctcgttggtggaggttcaatcacgcttggtgacgagctacttaaacgattcaactatgataactggcaccttgtaaaacagcctgaatttgcgaatgcacgtggcatgtataaatgtgcaaagtatatttccaagctttga

SEQ ID NO: 70828 - DNA, 255 bp, Acinetobacter baumannii
atggaagacaacaacaatttcattgattggggtaaagcttcaaataaccctagtttaaaaggcattaaccctatagccctatttcttatcgctttcggatgtttgttttggaatatttcaaaaattccgataatcgtcggcatctttgctgtcccgatatgctggctaatcgagaactatttaaaaatgccatacaagtattttttccagctcattatcggctttttcttcggaaaaattaaatctcccaaataa

SEQ ID NO: 70829 - DNA, 1290 bp, Acinetobacter baumannii
atgaatgtttatgctagagataccgtcgctgaagagcccaaagctgaacatccgtatcaaatgttgcgacatgaaacaattgatttggataacatcagcataaactctgaagaagatgtgcgtaaaatcttaactgttgctaatgcttttaacgcgagtgacgtattgatcaactccggtagaccaatactcattcgtcgctacaataagctttatgcattaaccctgaagaatcttaaagatgttgagcttaataacttcttatccattatcaatggtaatgaggctctaagctcaattaaaaaagcaagaggtttaaactttgcttataactgtagtgtttatcaagatcgtaattcgaaaagtggtaaagggtttactactactcagaatgatgagagttggttacatgtagatgcagtggaaaaagagaaaatcattttccgctgtaatgctagtggttgtaatgacagaagtggcaactcttcttttcaaatcgttcaacgtattattccatctgatccgcctagatatgatcaaattggcctaactgaagagttcgttctaaaagccattccgagactaggcatcacttatgttgttggtgaaactggtcacggtaaatccacaacattagcttctatggttcgttacgtatatgaagaagatacacatattcagggtaatattattacgcttgaagaacctatcgaattcagatacgacggtatcaaaagtaaacattcaatcattgttcaaagtcagatacctgaacatttcatgacttttggcctagctgtaagagaagcaatgagacgtaaaccggcactacttttagttgctgaattacgtgaccaagaatctttctctgccgcaattgagctttcaaagacggggcatcccgtaatgtcaactatccatagtaacgatgttgcaaacgtactacctcgtatcatggatttagtccctccggatcaacaacatcgtaaattaactgaaaccatttcgacagctcatgcatttattgctcaacgcctagtggaaacacctgaaggaaaattgataggtgtacgtgaacacttgttctttacaaaaaccattcgtaatgaacttttagatctagctattgaagctggtggatatggtctcgtaatcaagtacatccgaaatatgatgaatgacaatccgctaggtacagaaaactcatcaccaaattttgaaaatcaggctcaagatttactgaataagggactcatcagccaaaaaggctacgaagcccttatagcctaa

SEQ ID NO: 70830 - DNA, 819 bp, Acinetobacter baumannii
atggcagatttacctaattaccaatattacttgcagcaatcaccaatcatcatttctcaagatgactctgcaaaacaagctgaaagctcagcccgacttgaatcaatcaaaacactagtacatgaagcagctacacgaaatgcattacgtgctcgactgactgaaattgataaagtcgtttacaacccaaacaatgtacgcaagcttgattctatttacgactttcagcgtttaatgattaatactgttgttgttccccctgtcattgttcaggcaaacaatattagtgatgttcaaaaccctcgtacactttcagtgcttggtgtccgttatgaaattaaagaaaatgctcgtttctcacataccccaccaaactggcgtgactttttacagtttaatgtgaagagctatgaaatcggtgtggacgcattacctaacgagttaaaacctaaaaatagtgccgaagaacgtgcttttaaagaagcaatgaataaaggaattgaagatggtgttcgtgaagcagacgctattttcaagcatcaattaaaccgtctcaaccaaacatataaaggaatgattgcattccatcgttttgtcatggacgggaaaattacgatgcctgcaattgctcgtcgtgatatcgcccttactggtaacggcaatacgcttatgttaaaccagactaactttgaaataacatctttacctcaatttgtgaacaacactaaattgtggaatagccgaattttaagcattaaagaacgttcagtcgttaaggatccggttgaaacacctgttgcgattgaaactcaacaataa

SEQ ID NO: 70831 - DNA, 471 bp, Acinetobacter baumannii
atgaaaatagtaccttcaattcgtcgttcactcactgttctttgtatctctgttgccactttgactggatgccaaagctactactacgttccaagccctaaatttgatgttgaatcgcctttaggtattttgagtcaagcggctcaagatgctgtagccgaacaacaaacttatgccttagataaaaaagcctttaacgaagatttagctttacgccaacgtagctttagaactgacgttattcgtgttgactatgtcggggaacctcagaccctccttcaaagtgcagcttatcacttcggatatcgctttattgaagctggtaacattcatcagctcccaatcgtaaacttcagcaaacgcaaattaacgggatttgatctcattaaagatgttggcttgcaacttggtaactctgcaactgttgctgtagatgaaaatgataaaacaatcacattgatccatcgttaa

SEQ ID NO: 70832 - DNA, 1905 bp, Acinetobacter baumannii
atgaaagctggctcggaattagaattcaatgcaaaaaaatatccaaaaagtattaaaggcttggagacacgtgtatttgattattctgagaaaacaataatcagatataccaatgtttggaaaaaactattaaaacaatatgggttagaagatcaagttttggttaatcccgaatatacgttggaaacagtagtaaataatcttatttctgaatatggaaataatgaattgcgaaactctacttttagacactatcgatctgcacttattcatcgtatgggggtgatcttgagtgaacaaaagagggatggtgagaagcttgtagcattgcctaagctggcaagactttttgaaagtttgaaagctgttgaggcgactgatgataaaaaacagccgaaccgttctagtagttcgaagctcaagtactttccaaaagatctttatgaatttgtgttaggcagcagttttaatttgaacaggtctaatttgggattgatgctaaagctgtttatagaagcaaatactatgattggattgagaccagtggagtggcaaagcttaaggttggcatgtgatgttgaagagagatgcttatctcttgtggtcgataatgcaaaaaatactcagggtagagctaacggcgatattaggattctcaatatgattgagcctgatccaatcaagcttaagaatcaattaagggcaatacttgggtttaagagattgctcgatttagaactggaggcaagagctagaaagttcctaattgaaagaagtagagagactaatgaaacttataaaatctacatcgcaagtaaagagccagacagttttgaatttgagttcattcattggaaaggttcccacaccgttaactgtatagaggccgtaaactttattaaatccgagagcgatattggagaaaccgtaaactggatttctactgaaaacgaacttgatcaaaatattgaaaagttcccaaacggcgttttaaattccataaatggaccagataccgtaaacagaatatcgtccggacatggccagaatacgactgacggcaataaagctggcggtagtgaatttaattatgagcgagtgattgaagacggcgctcattcttccgtaaacgggataaataccgtagacagaataaagaccgtagacggaataaataaagttgatggaagtgatcacggcgcattaccttccgcgaacggaccagataccgtaaacggaataaaggccatagacggaaataatacagttgatggaattaacgccgttgccggaataaaggggggtgggacaaatcaagccatttctactgcttctactgcgccagctccagagttgaccgacttcggatttaattcagttgccggtgaaatacagcaaacgggtagaaataccgatcacggaaaaatggctgccttattgggtgcttataacgccgtggtaattgagagttatgttgatcgttatggcacgattcaatatgcactatgtcaaagtgtgatggattcattgcaacgtaaattaaaagatatgagcaatgaattttatgaaaagaaaaagtttggtttacctgaagagttagcttcaaataaagcaaatgctacgatttacagtacacgccatcaagcggtagccaatcggaaaaaatataagtggaaagaagaagaggtcgcaggttggtttgggcatgcaagtgttcaaacggcgtcaagacactatggtgtggctggtaagggttggggtgataaacctatgtttagaacttcaaaatttagtctggaaaaagtcagaatgagagagcaacaacttaatcaaaccaaacagctcactgaagaagatgtattaaattcggttttatcagataaagatttagatgatctgttgtaa

SEQ ID NO: 70833 - DNA, 333 bp, Acinetobacter baumannii
atgaagatacccctaatcataattgtggttttatgtactttgtattttttaaatctttcattgaaatcaaatatgaaagacattcacaaaaaagagatcagcgataaagcttattttcgtctgagtagcgaatatgactttgttaaggcaagtcatgctggagatgagatgcggtcaaaaatcatcaaagcattatctgatggcataatagatggcaatgaatatgtatctataaccggagaagagcctgactatgatcttagtactgatgctgaaaaagcaacatacaaagaggcaaaacaaaaatttattgatgaatttaaaccttcataa

SEQ ID NO: 70834 - DNA, 327 bp, Acinetobacter baumannii; identical to SEQ ID NO: 57804

SEQ ID NO: 70835 - DNA, 303 bp, Acinetobacter baumannii; identical to SEQ ID NO: 57803

SEQ ID NO: 70836 - DNA, 327 bp, Acinetobacter baumannii; identical to SEQ ID NO: 57802

SEQ ID NO: 70837 - DNA, 192 bp, Acinetobacter baumannii; identical to SEQ ID NO: 57801

SEQ ID NO: 70838 - DNA, 366 bp, Acinetobacter baumannii
atgtttaaaagtgaacatgtggtgaaagagcaagatttagataagctaattaaagaaaatccctatactcaaaaaatagtccagcatttgaaagattttgaaaatattgaaatagggattgtcttatttatgggtttaccagttgctgaccacgattccataaataagctacatcttaagttgcatggatatattgaatgtttattggaaaatgagatgtgtacgcaatcacagtgcgacctattgaaagcgtcattagatgaaattcattttaataaggtaaagccacgttcatcttcaacacattcaaacgacgtgtatattacggatgaagatgtgcgccgttcaggtgaacttggtttttaa

SEQ ID NO: 70839 - DNA, 294 bp, Acinetobacter baumannii; identical to SEQ ID NO: 57800

SEQ ID NO: 70840 - DNA, 717 bp, Acinetobacter baumannii
atgtctgaacaaaagcagaatcagaacccgaaaactaaacctcgttttccaactacaccagaacaggttaatagtgggttggtcgaaatggccaaaaagaatgatgaacttgaagacaagattaaaagtcaacgtcgtcaattattaggctgcattatcggtattggtgtgttgggtacagcggttgcagtacttggtggcattattggattgatgccaaaagtcgaatactttcagaccgtcaataatgaagtaatttgtaaaatcaatccgaatgacaatcctgcatttactgacgtaaatgttgctgaatttgcttcggaaggtttgctaaatgcctattcacttgattatcaaaatgccgacgctgatatcaataacactttacgccgttacttcacagatcgtgggcgtgaaagcttcattactacgctacgtcaatcaggtttgattgaccagatccgtaacaatttcttagttcttagaacttctaagctgcaaacacctgaagtcgctaaaaataatggcattgatagtcgtggcaatcgattctggattgttatgcaaccagttcgcatggactacttcaacggtaaatctcaaccggctgatactcgacaatatatggctgaaattcgtgttgaagttacgccacgtgatgtctataacccgaaaggtttaggtatcgccagtatcgttttacgtgcaaaaaattaa

SEQ ID NO: 70841 - DNA, 1131 bp, Acinetobacter baumannii; identical to SEQ ID NO: 57798

SEQ ID NO: 70842 - DNA, 1632 bp, Acinetobacter baumannii; identical to SEQ ID NO: 57797

SEQ ID NO: 70843 - DNA, 855 bp, Acinetobacter baumannii
atgtcaaacgaaccacaacaacctaattatgatgacgattttgactatcagacacagacacaacaaccagttgattcgactgatagacgtaataagttcattttaattggcgcagttatcttcgctatttgtgttcttacgttcatgtttatttcaacaaaaatgaaaaaagcaccaccgaaagatcaaactattgaagctccagctccagatcaaacggcatatcaaccaccgccacaaccagtgcaaatgcagccacaacaaccggttggatattcgcaaaattcaatggtggccgtgccagaaacgatgccaaagtctactgatccagtgaacggtacagtgatggttaaagatatgactggtaaagacgttgatgcttattccgtggacggacaaaacgccattattcaattcaacaatgctaatggtttacagccgatcccattgaatatgccagctccagtagcgccaaatatcaataatcaggcgaataattttaatgagcaacgtgtgattacgttagagcaagaaaattcacagctcaaggctcaaaacaattcactacgtacattggcccaagatcagcaacttaaaattgggcagtatcaagcattgattaaaaatgcacgcgcaaacaacggcgcaaatattgtgcaattacgtgaaactaaaaaaggtgttgctttgaataaagcattaccacgtggacaagaagtagtagcgactgtaggcaatcgtgtttggttatctgacggtaagcaatataactcatatggagtaggccaacgtttaccaacgggttatcgcgttcttgatgtaaatgaaatggctggcgaagcttcatttaagtaa

SEQ ID NO: 70844 - DNA, 579 bp, Acinetobacter baumannii
atggaaactatagatattttgcaaaatatgggtttcttcttcgtagcagctaccgaattgcttcgatacttctttgtagtgtctggtttttacatatttcttcatgcgctggttgattttgttcaaatttcacaaccagctttagcaggacgatttatgactcaaatacgccgaccaagcgcatttggggcatcgatgaaacttattatcgcagcgtttctttgtacgttgggtttaagacttcagttgctagacatcgttgggtcactcattagtgacacaacaccagcaggggtaacttattacgattacacacagtacacaggcagctcttatacagacgagctcaacttagcagtattggtaatcatcggggttttacaattttttggattattagccattggtcgtggtctatggatctggcgcgataatgctgacggcattgccaaattgtctgtaggtcaaggaacaatgttcatgataggaggaatgttagcttataaagttgaagttgtgcacgcatttttagcgtcgtggtttggcttagactttttcaaaatcataggcttaacctag

SEQ ID NO: 70845 - DNA, 420 bp, Acinetobacter baumannii; identical to SEQ ID NO: 57794

SEQ ID NO: 70846 - DNA, 759 bp, Acinetobacter baumannii
atgataaacaaaagcattcaactcgataccataggtgatactgagaagtttttacatgctttaaaaattgattcttcttcctttttcaaaaagcatgaccatcgttgctatttttgtgattttcgggatcttcgttttcttgaggtccaccatctagatggaaatcacaacaataataatgagtcgaatcttgtgccagcttgtactttatgtcatcgagcgcatcatttagcttgggtgctaacagatcgttcggggttgttaggtatatgtcatgagttggaccagatcagaattaatcatctacaacgttttgttctggttttagctaaccatccggatcctaagctgaaggcattttttatcaagggtgggatgttccagaccgtacttgataatattgcaatggagtattaccgtccggatgttgatgagaagacgattcgtgaaagtatcgattctgaattccctcaagcaacgattgatttaaaagaatcactctttactgaccgtattaatgcaatttatgtgagacagtctctatcatcaaatgatgggttagaacgcctcatttatgcaattaatgaggttaagcagagtaataagacgatagcgccgaatgcgtttttcccgtttgttctgttatataaccaaaatatcttttctaaagagcaaattgattattacctttcattagatgagtttaatccggagaagtggactcagctttttgaagaacaacttcttaaagccggttaa

SEQ ID NO: 70847 - DNA, 1008 bp, Acinetobacter baumannii
atgattgaaagtaacctaaatccatttctgtttagagctctgccaaatatagagcatgcttgtattggtaacgcttacgatttaatggccaatcaattcgaacaagcgcctataaatgttcaagaatggtttcacttgcataccggctttatagataccggcttagagcttactgacgatgttgagacggcttttgtaacgatactatcgaaccaagtagtacgtttactggagcaaacacgattgcctctattcagtactccggatcctgaattagaaccatttattgccgatagtatggatgatgagctctgtctggtatctatttcactagaaaatctgacggcgcaacaaatcaagattcgtactttattaggttttggtcctcaactcgttatattgaagtcaaatagtgatttttttgacatgcatgggttcgaactggttgttactgattctttcccttgtacttcatttcgattgtttattgagtcaagtaagcggaatttattatctacgttcaacaaaacttttatgcttcagcaaaacactattgcaaatgaacttttaaatggtccagcaatctatagtgatttatttaagcaagcattacgtcaacaaatctgttcaaagctgtgtgctgaagatgatttggaaatatcagtacatgacaaggaactttgtgatgatgctggaaatttatattttcatattggctttaatcaaacttttaagcatcagttttttcatttggtatctaaaaatattcttatttctccttttcatatcgaacgtctaattggcgaaggaaacgaacttcttgaaacaccggctgcggctcaatcgaatttagaaagtttagttacgttcatgttggtgtacatggccatatatgaaaaagaggctctagattcaatcaattcaacaaatattaatgatgatgatgttctaaatatgattatgtctaaattggaacaacattctaataattacccaagttttagttaa

SEQ ID NO: 70848 - DNA, 3273 bp, Acinetobacter baumannii
atggtaagcactgcgactccaaaaagagcagatactagaagtactgcgaataattctaaagcgaacaccaagccaactaaagtgaaaagacgctcttctttagtgtcttcacttgagctgatactcgtatcgcttgcgaaaatgtttaaagcttcagcaaatgactattgtgaaatagaaacggttgatggtcgtttcaatttggtcatgcaagacggtacgatggttacgatcttgaagtatgaaggtattcgttcaacaattgattatcaccaaacatttatgggtgaaattgaccgcttaaataactatctgaagaataatttaaatgcagtaaacagccataagattatggtgttatttagacgtgatgatgcagtaaattcagaattaaatcgtattgttgatatccagaaaaatacagcacgtaaagtcaatattcgtctggattctttcattgatgaaatgcgtgatgtttatgcaccgtatatttacgatgaagagatctattttgctttaatgaccaatccgaaaattttggataaatccgaaattgccggtgattatagacgaactgctgatattgttaagaaatacaatattccaccgatgtcagatgcacagaaccttttacatggcttgtcttcgttaaaatcaattcatgatacattcgtatctggtgtgattagtgaacttgaacatcaagactttaaaggggttgtagataagctagatgtaagtgctgctattacggcaactggccgtatgatgaatccacgctactttgatccaaactttaaagcatttttgccgaatagtggaatgcctattcctttacgttggaaaaaccgtactgatcctcaagatctgtctcacgttttatatcctcgtatttctgatcaattaatgactcagacgattactccattaaacagtaaagataaagccggagacatcactgttccaaaaagtgctgttcaatgcggtgatatggtctatgttccaattcctttaaaaacacctccatcaccaagtttctcaggcacatcttctgtaatgcctacatttattgatttcttcgaccgaatgaatcaacaaacaactgaaacatcagatggttcaagtcgtgcaattccttatgccgtctcatttatgttatctggcgatgggatggcatctatcggtatcaaacgagccgtaacggcggtagtaggctggcaaggagctgcaaaccagcaaattaaggccgctggtgattcattgcagcgttataaagattatggtggttgtgtagtcggtttacaggtttcgctcatgacttgggatgaagctactccaagaggtattgagcgtttacagattcgccgatctaaactttggcgtgctgctcaaaactggggacatgccgttccactagagcgtacaggagatgctgttaaagcttatttaactcattttcctttatctactatgcatcatgcgccactttgcccagcacctttacctgatgcattgcatttacttcctcttgaccggccagcttccccatttaaaaagggtacaatggtacaacgtacaccttgcggaaaattaattcgtatcgagcacttctctgaagagctggcatataactacaccattatttccggtacgatgggttccggtaaatcgatgcgtatgaacgatgagctgtttgaagcttgtttggcggccggtctagaacgtttaccttatatctttatttcagacgttggtgtgtcatcttcaggtctggtttatggcatccagaatgctttagatccttcacgcaaacattggtgcgtgtataagcgaatctcgaagagtgctaaggacgcaattaacccgatggaaactgcggttggtcttcagtatccattatcaaacgagtttgatcagatccgcgcattccttgtaacgcttgttactccagcggaaaacgaacatcctgaacctgagatgagcgcggtaatctctttgattattcgtgaagcatttaaattctttgctactgataatgatcaaagtcagccaaagatctatcaaacaggtcagtcacatgaattagatctacttttacgtgaattaagaatttcattatctgaaacacttccgttgcatgatctggctttattgtgtcatcaacttgctgaacaaattgtttctaatgaagaaatacaacaagttagaaagaataagcttttacgtgcacgtaatttggcacaccgttatgcaatgccaattttgagtgacttaattacggttgccaagaaagaagaaattcagcgtatttatggtgattataaaacctcacacggcgaaaatattcttgatgcagtaacccgttctctttctcaagcagcaaacgattaccctaactttagtacgtttactcaatttgatatttctgacgcgcgtattgcttctgtggatctgcaagacgtaattgttaaaaacaaccgtaaaaataactcattattcttccagatcgtgcgtatgttctataaaaaacgtatcgcatacagtgaggaagacttaacccgtggtgagatacctaaagattatcttgactattacagcaatttagttgcagagctgaaaatcgataaaaaatatatggttttcgatgagatgcacaacattaaatctgacaactttatgattgctgaacttgagcgtgacagtcgtgagatccgtaaatggggtattgcttactacttaagttcacaatatatcagtgactttggcattcttaccaaagctgccagtcgttttgttgtatgttctcaaggttcacctgaagaacgtaaagacattgtgaaatacttacaacttactccagctcaagaaaaacgtttaacttccattgtgggtttacgttcatctggtatgacgtacctttctaaagtgattaatgagcgtaatgatcaatatgttcaattcttcacctctatgattgggcctaagcgcctttggttattaacgacgaatccggaagatcaggccgttcgaagcatcatgcgtaaaaaacatgatctggagacatgtattgatatcttggctacagtgcatccacgtggtgtgaaaaccattgtaaataccctgaaagagcaacgtgctcttgaaatcacttcttcagcagctttaagtctggaagaggaagagaatattaagctgggtatttataccgaactggtggatgaggcgattaaaacttataacttcattcaaagccaaaaactcagagtcgcataa

SEQ ID NO: 70849 - DNA, 411 bp, Acinetobacter baumannii; identical to SEQ ID NO: 57790

SEQ ID NO: 70850 - DNA, 2739 bp, Acinetobacter baumannii
atgatggctacaccacgttttaaaggtgcatcggatagatttaaaccgaaggaccagcgtgttgatacacgggatatcatcactaaaatacacgtagctcttcaaacgtcagaagggtcgatgtattttgccataacgatcacaattgtagtttttgtaagtttcttttttcctttattactcataattgcaacgccaattgcaatattgatcacacgtaaatatttaataccccagcttcgctatatcaatatgccttatcgggtgccgaagcatgcaaatatgccagatggatcattcgatggtgtagcgcggaaagtaaatttaaggaaaaaccctgaaaaagcttatgggcagggtgtttattattacggtattgaccgtcaaaatcatcagcaaatctggaaaagtgatagtgatgaacgtgtacatgacttgctaattggtacgactggtgctggtaaaactgaaaccattaagatggttttgacgaatcctttacttcaaaattctggttttatcttatcggatgcgaaaggtacgactgaacttgtagccgaacttatgtatttactgacgcgattcatgcgtcaagatgattatctagtcacaaacttcattactgctggccgtgatttgctggtacgccaagaagataaaatgacaaacacatttaatcttatgtcgtacacttctgctgcaatgttgagtgaacaactcgtctaccttctcgcggactctgagggttctggcggtgatatgtggaaggaccgtaccattacctatttaacggccacaacacacttattaacttttttaagggatagaggattattattacttgagccaaaaacatatgttgaataccaagagctcaatcaattaatacgagcagcttacggcgaagattttgatgataattataaaaactttggtgagatttatattacggccgtttctcctttacgtgcttatcttaaatccctagcaggcttcgatgaagggaaactttataaacaacccgaaaaatgtgttgaacagcatggttatgtaatcatgcaatttacacgtgcaatttcggatctaagttttaacttcggccatatctatggaaccaaatctggcgaaattgatatgttcgacgtagttctaaaccgtcgttgcttgatcaatgttttaccggcattgcagaatgcgccccctacgatccggatgcttggtaaactttttgtaggctctattaagcagatgatggctggagcgctggggaaccgtatcgatggcatggtacgtaatgtcattgaagcgaaaattacggcttcagcgacatgttttaagattgttctagatgagctggcatatcaaatcgtaaaaggcctgtctgtgatcccagctcaagcacgtggtttgacattcagcttaacgttttcagcgcaagagcttaaagatatcttcgttgccgatgaagctgaaggtgaagcgattgtagctaacaccggtactaaaacttttggacgtatcaactccggtacggaaggtttatcgatgcagcgtttacgtagtctggtggaccaagtgacacagtcagtagtaaacggctacaacattgcttcttcagcaatgggaataaattatcaatcttctacaaacgttaatatcgaaaagcaggaccgaattagttatcaggatattgcatcacaacaagaaggtcagttcacgatcgtagttgctaaaaagatcgatggtggtaaagagggcggtgtattcgctattcatgctcaaacaatgtttgtacaaccacctaaactagcaaagatccggttaaatgattttgtttcgattgaaaaagagctgacctattttgatagtaagaaatatgataatgagcttaaaaactttgcttatcagttagcagagaacaagatccttcaaagttgtccaaattataaaaaacatgccattggtgctctaaatcaggtcgatactcaccttgaaagtatcagtaaaatggcgaaattatacgagactgatgttaagtccggtttcttcgcaattatgcgtacaatgcaaaatatgctggattcagttcaaatatctggctttagtgctcctttttatgaagttgttgattcaacttttgcaaatgagatcgatggagctctagattcaatatttactgaaattaaacttgatactgaagaagtcgatgttgttttaaataaaacaattgatcacattcaggatgaacgttctcaggatctattaacaaaaactagcgaaacaattatcgatgagatcgtcgatcaatacctaaatttagattcaagcgaaatagagacaatagaagctgttaatgcatatatcgaagcacttccaaacgtttacgatgaccaactttatagcgaagagtttgcaacaacggttagagagcatttaaagcagcatgatatctatattcaatcgttagacattccatcattcgaagacttattagaacttgatcaatgtgcggccgaagctcaaaagagtatcttcagtgatgattttgaagaagatgatttattttcagatgctcaagagcgatacaactatgtaaccgacttcattaaatgcaaaaacttagtttttgaagaaaaggaaaaggaaatcgaatctgaagatcaggagatcttgagcaagctggagaagtatcacgaaattgtatatcgcatgattagtgcgaagcttaaagataaataa

SEQ ID NO: 70851 - DNA, 228 bp, Acinetobacter baumannii
atgaatataaaaaatctccctctatattttgcatcatttgtatcaatcttaccccttatgggtattatatttattgtctataaaatgcatgtaattctagagaatcctagtttcaatctacttcctaaaattttggttatatttgtcttagttcttccattttcattttgtttatatatcatctttagtatttatatatttgtaattaaaataagggtaaatttatga

SEQ ID NO: 70852 - DNA, 225 bp, Acinetobacter baumannii
atgacttttgaagaaataacaaataagattgccgcaagcgttgttttactttcattaatttcgagttttccctacatgggatataaattttatcttgttgcaatggatgactcacgtcactttgtaattaaatacgccgtattagtatttctctcaatcctttttttactagcagtaagaatatctctgaagttttttaaggttttatggaataaaaaggattaa

SEQ ID NO: 70853 - DNA, 402 bp, Acinetobacter baumannii
atgaatagaagtaatcaactgagtttagatcttccggaatacgaagtagaaaaagaagaatgttatgcaaattacaaggggaaatatactgtcgatatttctcaaatatacaggttttatattgctgtaaattcaataggaacactcattaaaacaaaagaaaaaattaaaggttttgattttattcttgagtgtgatgatgaaaaaattgcagatgaaatattagactgtgtacctaaagcaaaatcaagaaagtactttaaagtaccaaactttaaacctttactttattcaggtatcgataaatcttcagtacaactatggatatcagccgtagaaagaaagatgggtttcaagaaaagcatatactttagagttgtaaatagtagatgggattattaa

SEQ ID NO: 70854 - DNA, 294 bp, Acinetobacter baumannii
atgactaaaaagccaacacgatatttctacgctcttttaacaagcaaagatcttaattccacagtaaaaggtgaagcatctatatttgcttttaaatgccctatacaccgaactaactggattgatgaaatgaatcgtcgatcacatgtatatcaggctcaaccaattgtaagtaataaagcttatcgttatttatctggtaaaacttcagatctagagtttcatgaaatttttgacggaagttttaaggtttatggtgttaaagcttatcaaccaaccacaccaaagatctaa

SEQ ID NO: 70855 - DNA, 630 bp, Acinetobacter baumannii
atgaataatatcgttgctgacatagttaacagttatgaagtcaaatcttttgaacaggttaaagaattcattgctatcgaaaaattaaaatatagcttctataacaaatgttttaaggtggtttccttactaaaccttatcggctggcccccttttattgtttgcgtattagttggtttagcagctttttgtttttctaaagcagaattagtattcttctctacatcattagtttattttcttcttctctattgccttattgttactgctttatggatgtataccgcatcaaaagcagataaagaatcggatctattaattaagaagaattttccgaactattttaatgtatacggacatcatgatttgctggatgaagagtcattaaaatatctgctttcaacagaagttactttagatgaatataaaattataaaatcactggctgaacttagtccagaattcaatataaagcttaaagaaattatgaagtttagaaatggagtttttacaatttacgactatcgggtacttaactgcaaacgacttctaagtatatctgagaaagaaaacaaccgttctaaagaacaagctgaaatagatgaatttaaaaaggaaataattaaatga

SEQ ID NO: 70856 - DNA, 516 bp, Acinetobacter baumannii; identical to SEQ ID NO: 61519

SEQ ID NO: 70857 - DNA, 267 bp, Acinetobacter baumannii; identical to SEQ ID NO: 61520

SEQ ID NO: 70858 - DNA, 441 bp, Acinetobacter baumannii
atgaaagcaattacagtaaattttgtacaaaaccaagctgtactggagactcatgttattcacttaactgaagcgagctatgagcttatcaaagctgaaatactccctatcattaatcaaagctcaagtattttgagctttcttaaaaagctcaacaacgccaaaaatattattcaaattagctctgcatttcgacttaagaagcagcttcatactttgttgtctgcaaccggacaaattaaggaccaaaacgatttagcttcgcttcagcattttgttttgatcttaggcaaagtttttgatcgcttagtaaaccagtaccatgagccaaatttatacattggagcttatgtactctcagttacaactttacctgttctaaacctagctttagatactctagaggttgatcccgattctctaggagcattacatgcctga

SEQ ID NO: 70859 - DNA, 252 bp, Acinetobacter baumannii
gtgaaaaaatataatgtaaatatatttgatggtaataatataattttaaataaaattgtaagagctagatctctggatgctgcatattattgtgaagatattattaatgatcttaaaaaggaggtaggtgtttctgtattaaatttaacttacagtactatttatgaatttcaaggaagtgcagaattatggctttcaaatactaaaacaggtagaaaaatgtttaggttggaagctataatagtttcgtaa

SEQ ID NO: 70860 - DNA, 348 bp, Acinetobacter baumannii; identical to SEQ ID NO: 61527

SEQ ID NO: 70861 - DNA, 1851 bp, Acinetobacter baumannii
atgagattaaatatttccgaatatgatgcacgtcaaatttttgccaactatttaagggaaacggctgaattagacatcacagcggatcaactaaaagttgatggcacccgccattacgttaaatgcttaaagcgatcgcaaaagaataagcactcaaagtctgggtggtacagattaaatttcgcttttgacgtgcctagtgtaatttggggcaattataataccggcaataaagaggtatggcacctagatcccaaattgttaaagaaagagtccaatctatcacttcaagaactcagaaaattggaaagggaaaagaaacaatacgaaattcgaatgcgtagaaatcatcgctttcagagaaccttacaacgcattgctaagacatggtcgcgcattgaatacaacagagcccagccagttcagtccatacatgaacacccttatcttaaaaataaagccgcatttcctgaaggatacaacttagaccttgttcgcattattaaaaagcaaccattgtttgctaaatcactccatattgctattagccgagtagtaaaaaaagctgaagcgaaaggtttaaatattgactatatcaagccgaaatattttcagcacgcatggttccaaaatcatcacattagacctaccttgattaacgcatattacgacgttgatttaaaaatccagaattgccagcttatctcagcactacaagacagagagaccggtaaactaaaattctttaaagggaatttaactcatggccggaaagatggagttttttgcccaattcacagattgccagcgcaagatgaaaaaatatttgcactcactgaaggttttgccactggaaaaagttttgcaaggatctgtaaagaaaaacctaatactatcgcagcttttgataaagagtcattaatctcagtagcaatagcaatacgaaacaaatggccagataccaccatatatattgccgctgataatgatttaaatgaacaattaaatggcaaaaccaagacaaatggagggttaataaaagcatatgaagcaactcaagctgtatccggatacgtactaatacctcctatcaaaaaggatgagttaacgctctctgattggaatgatcttgaactgaagtacggtacacagcattgccgagagatcattaaacaacagcttatcgatatcgcagaattcaaccaaagccgtaatatgtcaaattttaaaatgccagcaatggcatccgcaaacattcataaacctcaaatcaatattcagaaaacgacagcagctctagatccggcaatctttacttcgtggttaatacacctcatggagaatcagaaggaaaaggatgtcgatttaagtatggccaaagatattgttcaagctgtttcaagcaatgaacaaaagcaagtcctaccgatgcttaaagtaatttgtcagaaaaatggatggcacgatctggatcaagcattaaacctgatgagcgataaagttgagataagaaataacaatgaaaaagaagctctaaatcgggtaaatatgactttacaagcaatcttctatgcttctaacaacaccactatagatgcttctaaaaaggaaaaagcagaagaaatgcttaaaaacaccattgagttcattggatatctacccattagtagagccgaaaaagtaaacatctacacaaatattaaagataatatatttgaagcaacagatgaagcggaaccacgatggagcaaaacattactcaagctttgtaaagaaacaattagcgaaatggaaaacaaacaagttaaccagtttgaaaatcaaaaatcactaagttatgagagaacttaa

SEQ ID NO: 70862 - DNA, 426 bp, Acinetobacter baumannii
atgggcgaaaaaagaaagatttccatttcatcagaagtttcgaactacatagaaagtttggctcgtacaagcaaagaaaatgaccaagatcaaatttcttggtctatgcatatcaataaaatgctttgtgattatatttctattgttcagagcaaccttccagagtcactatcaccccaaatggccgatgcactagtttttatatgccaaaattatattgatgacctctataaaattaattatagggatgatctaaagcattatttatataacttttattttaatttagaaaaagaaagtcaaataccgccatacataaaaagtgagtttttagatcattttatggaaatggaacttacccacattgaagccctctctattcttcactttttaaaaaagacactcgcaaaacatcatcgaaattaa

SEQ ID NO: 70863 - DNA, 495 bp, Acinetobacter baumannii
atgaatacagccctgttagttaagatcttaaagatcatatgcttaataatctttataaccttagtcgttttgactttttggatttgtgctatacgagatatattcttcattccagtacatgctggtttttacaaatgtgaccgcccctacattggagttgtgactaacaacaatgaagtcaacacaactctaaccagcaaggactattgtgttgacctctatattgattacaaaaacttaagagggaatagtaaaatctcaccccaaaagaacgaaaaacttattttggatttttctaatttatacaccgtatctcttgcaaaaaagcacagcttctttacatcttcctctaaatcgtatgatcatgagttgaagaatgttgggctcttttacctatcttatcagcagaattggagcagcactcaatcagatcctaagactgtacaacctcaattaatcattaatgactttaatctcaaaactgcacttttttaa

SEQ ID NO: 70864 - DNA, 222 bp, Acinetobacter baumannii
atgtttctactttacggaatattggctttgatagctcaagcatttttaatttactttccttttaaaatcaaaaggtttttccctaatggcccatccatttttcatggttttttctttcgttacattcttctaatttctcttcagattttgctttataagatcttagggttatctggatttataaattactttcaagaactgttaatagaaaaatatatctaa

SEQ ID NO: 70865 - DNA, 732 bp, Acinetobacter baumannii
atgctgaagaaaattggtaaggcttttgtctatttgtatgtgacgttgccattgaaaggtatagctggaaatttaggttataaacacctgaaaaatgactatgaattcaataaacaacagtataaaagtctaaagaaaatacattgtcctgcatgcttcaaaagcattgttcaaacatcgcaaatcaagctaactgataatgaaattgttgagcacaaagcaccagcaaaagcggttaaagtcacgttaaaatgcgctaatcctgaatgttcttttgagaattcattcatttcgggacctagtaaaaaagaaattagtgaaaagactaataatgcaattttggcagttggccgcgaaagtgctaaacggatctttgaagtaattccggttggtcaagtcaataattcaattaaagaacattatgaaatggcgattatgttaagaaatataagtattttttgcgtaatcggttgttttgcatttactttttatcagatttttttcaaggataactcattatttttcactgccttatctgccttctcgtggctggttatagggttaggtatatttcttaatgcccttaagtattcacataagtcatggcaagcacagactttaaaggtttttgaacagcagtctcagttttatttttggtttaaaaatcatgcatggttttcaaaacctaaatactggcgtatcagtggagaagggaaaaatgctacaaagtaa

SEQ ID NO: 70866 - DNA, 828 bp, Acinetobacter baumannii; identical to SEQ ID NO: 69628

SEQ ID NO: 70867 - DNA, 330 bp, Acinetobacter baumannii
atggaattaatccgaactgaaggttatgaagataaaatggttcaaaagcatatttctcaaaattacatctttaagaaacttgttcacttaacaaacctaaatgatgatattgaaactttgataacactgtttaaagagaaagatatcgtggttgattcagctttgattgaatcgtggttaagcgaagaaggtcaatctaactttaaagaaatttcagaaaataatttattttccttttttgagattctttttagcgttaaaaaggaagctctatctaaagatataaatttatttgatttaagttatatttttgaagatatcagaaactaa

SEQ ID NO: 70868 - DNA, 510 bp, Acinetobacter baumannii
atgattcttgaggtaatttcctcaaaagattttagagatataaaatataatgaaactgtatttgattcaataaatgatggaactttttctcacgattctcttataaaagtttcatattttcttgcagaaaaatatagcttattttctaagattataagtgataagtttgactatatttttattgatgaataccaagatactgataaagttttagttgatttattgttgaaaaaaattgcaacaaataagaaaactactattggtttttttggtgactcaatgcaaggtatttatgatggtataggtagccttgatgattatattagagattttaatctaatttatatacctaaagatgataattatagatgttcacagcaagtaattgattttttgaatataattaggaatgatgatattaaacaaaaagttgcacttaaaaaaggtgagaatttagattcacgacaaggatcggttaagatatatattaataaaattcaaaaagtttaa

SEQ ID NO: 70869 - DNA, 948 bp, Acinetobacter baumannii
atggaattagcaacaaaatttaaagttcatcattactttaatgataagagtcatacactagatgcattcattaaaaataaagcagaaatagaattcttatcaattgtctcagaagtggcaaacatattaacaatatcctgcaaactagaagctgaagctgtcaaagaagggggctttgttgaaatatggacttttttgggggaaagtgctgaacagataaatcttcttatcggtgttttaactcttatattgacaatatctcagtcagatgacagggaaacaagtgacttaaaaaaagagaatttaaaactttctgttgaggagagaaaacttagaataaatcgtttaaaaaaggaaattttagtatctaaagagaaaaacgtacaggaaagattagtagatgatatcctccatacaaatcataaagtagttactcgtcgatctaactattataaaaatatttcacatgttgaaaaaataagatctgtagccttttcaaaactagataaaacctcgaaagagatatcaaaagaaaaaaatatttatagagaaaatttcaaagattttattattgagaatgataacctacctgcagaaatccttgaaagagtagagttagaaattgtagcgccagtactaaattatcagaaaaatgcgaagtggagagctatctataatgaacaaaatattagcttttcaatgaatgataatatttttaaacaagatgtctttaatcaaaaaattctgtttacgaacgggacgatattagtttgtgatctaaaaataattagaaaagtaaatgagttgggtgaaattattgttgcagcttatgctgtagaacaggtacatgaacatataacaagtggtattagaaaagagacgcgttctgctaagacaaatcggcaaattaagaattttaagaattctcaaggcgatttattttcttaa

SEQ ID NO: 70870 - DNA, 156 bp, Acinetobacter baumannii
atgtttgttatcttgttcggtatgatcgaatttattgcaaataaattctttgacaatgcagctacgaaagatgcatgtgctgactctggaggggcgtgggatcatcaaaaagatacctgccaatttggacctaatgaccctagaagtaaaaaataa

SEQ ID NO: 70871 - DNA, 291 bp, Acinetobacter baumannii
atgaacaagttaagttttctaagttttgaacatatatatttaataggaagtgtatttgagttaaatttaattcaaaatgatgaggctctgactatcattatggatggagaggaaaacgaatctgaagatttagttttttttaaaataaattttaatacagtagctacatgttattatgaggttaatgaaatgtggcctgaagaaattgaaaagaaatatgatatgagtatatttgaaactactaattggcaagctggtgtttataaagttgagaatacggataaggcataa

SEQ ID NO: 70872 - DNA, 150 bp, Acinetobacter baumannii
atgaaagacatcgaaattttagagatcaatgaagttcatgaccatgaagaaggcttatcgctattgttagaagattctgtaaataacggagccttcgataggtttcttagctcctatagaaaagaacgaagtcttaaattattggcgtga

SEQ ID NO: 70873 - DNA, 462 bp, Acinetobacter baumannii
atggaattaagtatttcagactggattgctatattttttggcgtgccaacaattctaggactaatctatacagttttgtcaaaatggtatgaaataagagaaaacttaaaaattaaaaaaagttttggttttataaattatggcaataaactttcagatgaatactatttattcttggaatgcatcaatcatggacaaaagactgtaatcttatcctcatgttttctaaaacttccagataagaagactatcccagctttctacaggaatcctttaggttgtaattttccatatgaacttcatagtggaactaatttccaatatttatttgttgttgatgacttagaagctacattacaaaaaaatggctataaaaaaaatgtaaaattaattccagtttttaccacgcagactggtaaaatttttagtggaaaagcttttgatttagtaccagatgcttaa

SEQ ID NO: 70874 - DNA, 129 bp, Acinetobacter baumannii
atgatatgtctagctacagttatttcaattataggaaagttgctaattatagaaaatcattacttatatcaatatgtattgaataaccttaattatttagggctttcttatgttgcttttctaggttaa

SEQ ID NO: 70875 - DNA, 396 bp, Acinetobacter baumannii
ttgagagactttaattctggtgatatacatggagatgttcaaatcaatgataactccaataatactaaatataaattgcttattcactgtacacctgaggaattaatacaagaggaatctcatcgaagggctttactttcagatgagcgctcacggaaaaatagaactaattttagattttttggttttgcaatatttttgttttctattgcttttttttggtatttgattcaaggggaaattgatatcgcctcattagtggtaggaatggcaagtgtatttgtcgctgtgaaaactctccatgccgcagatacacctactgattttgaaaaacgacagctgctaacacttcaggagatcagcactctgctaagagaaagaggtgtgcgtcgataa

SEQ ID NO: 70876 - DNA, 1170 bp, Acinetobacter baumannii
atgttaaaatggagaatcaatcttcttcttggcggagctttatctacactttcacctcatctttttgcagatacattaaaatttggtgatgcaaatactgattctggtgaagtcacaatttccggttggttacgagctaatattcaagataaagactattctgataatgagcacaaactaaagtttgatgcagcaaaaatagctattaaatatgatgctaagaatctattcggaaactttgaatatcggtgttatcaattcgatagattatgcgatttttcatcacttgttgatgctaatttaggatacaagtttaatgaaaataatagagttacgttaggtgttcaggaaataccttttggtcctgggcgtggttggtctacgagttggtatggtggtgttttaattaatgctggtttagaagatgtacataatctggggatcagctattcaacaaaaccttttgcgactaccaaacttgatgcagcatttttcgcacgtgatgcgggaaattatacgggtaatagtaaagattcttcccgttattcagctaattatgttaatcccgataatgacaatgatccatatgtacaagaaaaaaatatgtttattgtacgggtacaacaagaagttcctttatctgtgtatccagatttaaagttaaatgtaggttcatcttactggtattcagacattgaaaataaagataactctgaaactggtcaccgaaatgcttgggctctgtttagtaagataaattataagaatgcaaatattacgctaaccgcaggcaaaaataaggtttccaatcatgatgttttaggtcgtgattattcggtaatcggttcatttgatagttcttataacttagctaatgaaggcgatttttataccgcagacatcaattatgtttttaaggatgtactttacggttggtctctaaccccctatgcaacatacagtgctttgcgtaaagaccctaaagattttaaaacttctacccgaaatatttttggtgttcaggcagataaagggcatttttctgtcgcggccgaatatatgctcggaaaaaatgacccgtttataggcggaaatgcagactcttttgcccaaggtaatgaccaagggtggagtagattattgaatcttttattcttctataacttctaa

SEQ ID NO: 70877 - DNA, 1515 bp, Acinetobacter baumannii
atggaacaattaatacataccatagtgggatatctatggagcgatacgctagtttatttggcgcttggtgttgggatttattttacgtttattactcgaggcgttcaatttcggtactttcgcgaaatgttccgtgtaatacgtgagaaaaaagaagatagttcgggaatatctccaagacaagcactatttatggcattagctggacgtattggtgttggaaatattgcaggggtagctttagctgttggtatgggcgggccaggtgcaattttctggatgattataatgggattccttgctggcgcattagctttcagtgaatcaacagtcgctcagttatataagtttaaagaaggggaccaatattatggtggtgttcactattatattgatcgcggattaaaacttaagccttttgctgctattgctgcaattgtcttaatcatttcttataccgtcatgatgcctggtattcaaatgaatactattgcaactacctttaaatctacattccatatccctccatatatttctggtattgtggtgactcttggtattggcttaattatttggggtggggtaaaaagtattgcccatgcagcagaaaaaatagtaccgaccatgtcaggtttgtacgttttagctactgtagtcttattaattgcacattatgaccaaattcctgaaacttttgttttaatcttcaaaagtgcttttggtatggatgcggtttttggtgcaattattggccaagccgttaactggggagtacgtcgtgcagtattcgctagtgctgctggtgctggtgaatctacttttgcttcagctgcagcgatgacatcgcatcctgtaaaacaaggtttaatccaagcattctctattttctttgaaacagcattaattctcactagttcaggattaatgattttaattacaggtatgtataatgttacgcctccaggaagtgcgactccattagttgaacatgtacctggtgtagctgcaggtgcagaatggacttctttagctttacaaacagtctttaatcaagctggtgcttggttgatttcgctagctattttagttttcgcttttacaacgctcatgacttactactatattgctgaatcaggtattgcatattttgatcgtcaaaataaatatccgatttttaaaacgatcgccaaaattgcaagtcttacggcattatttatgggaagtatttctagcactgaaacaatgtgggcattgggtgatattacttttggtagtatggcatatgtaaatcttatcgctctagtgttattaagcaaacctttattgaaagtattaaaagattacgatagacaacgtaaagcagggaaagatccggtatttgacccgagagaagtaggtataaaaaatgcgacttattgggaagaatatgcagatcaaaaaaaagcttctctaataacacctccacttaagcagtctgtttctgtaaaaaaaaacagcagtcgtaaaatagcttaa

SEQ ID NO: 70878 - DNA, 249 bp, Acinetobacter baumannii
atgagacaaaatctactatgtttaaaaagatctagagcagggatatctggtggtacaaccaaacaagaccttcagtctttttcaaataagaatttatctatatgtgcgaaagaatacaaaaagcgattattaaatttaataattacttttaatttagttaatcgttcttcaaatcaagtaagtacatctgcaaaagtcttaagactattttgtcatagcctaaatctagaagagtatttcaggagctaa

SEQ ID NO: 70879 - DNA, 714 bp, Acinetobacter baumannii
atgaatagtttagtaaaaaaagaaacagacggggtaaagaagagacataatggtaaatatgtctatgatcaactccgtgaagaaatcttaactttaaagctaagaccgaatactcaacttgacgaaatttcacttgctgaaaggtttgaggtttcacgttcgcccgttcgtgatgcgcttgcacgtcttgttgctgaaggtttagcaatgactctgccgaatagaacaactattgttcggccgtttaacttacaagatttttcaaaatatattagtgcattagatctcttacagcgtgctgtaacacgtttggcagcagctaattgtactgaagatgatatacaaagaattaaagatgttgatactgtttatgtgcaagcagcaagagaaggtaactatcaactaatgcttgaacaaaataagcaattacatcttgagattgctaaagcaggacgaaatccattcttaattgaatattatgagcggctattagaagagggccaacgattattctatttacattttgatcatctagctaaatcgactagttttgataacttagaaagtgatcatttaagtttaatagaagcgatagctaataaagatctggataaagctgaaagcgaggcacatgctcatactttgctgtttagagatcgttttatggaacatatgaaagaaaacttaatcgatcagataagtgtagcaacttaa

SEQ ID NO: 70880 - DNA, 1023 bp, Acinetobacter baumannii
atgcgttgggaaaaaacgattcaacttgtagatgttcactgtgaaggtgaggttggaaaagtgattactggaggggtattaaatatcccaggtaatagcatggttgaaaaagttaattacttgaacgaggtggatgatagtttacgccgctttgttatccaagaacctagaggatgtttacagatctctgtaaatttattgctacctcctacagttcccaacgcagatgctgcttttgcaatttttcaagcagataagactcacccaatgtctggtagtaattgtatttgtgtgacaactgcattgcttgaaatgggtatggtaaaaatgcaggaaccagtcacaaatgttgttttagatacagcagccggattagttactgcaagagctcagtgtaaagatgggcgctgtgaaagtgtcaccttagaaatgatgcctgcatttgtagaacagttagatgctgaaatagatgtcgaaccattcggaaaaatcaaattcgatatcgcttttggtggtgtttactatgcgcttattaatgttgatcaagttaatctaacgattgtacctgataatgctcgtaaattagccacactaggtatcgagcttagaaagctcattaatcaacagtttaatgttcaacatcctatttattctgatattaatgaaattgcatacgttatgtttagaaatcgattagatgaaaaaacagttcagacgtgtacaactttaccaccaggtcgtgtagatcgctctccttgcggaacaggcagctcggctaatttggctactttagcaaaacgtggacttgtccaaccaggggatgaattaatttcacaatcaattattggcggacagtttaaagtgaagtatgcgagtaatgtacaaattggtgataaatctgcgattatccctaatattactggccgtgcatggttatatggtattcatcaacttggtattgacccaacagatccattatcagaaggttttatggtaagtgatacatggggagaaggtatataa

SEQ ID NO: 70881 - DNA, 1479 bp, Acinetobacter baumannii
atgtcttacgatcaattatatatcgatggaaaatggactccgacacgaaaaggaaatactttccaaagtatcgatccaagtactgaagaagttattgctcatgttgcttgtgcttcggtagaagatgccgagcttgcagttcgtgcagcgcgagaagcatttgataatggttcatggtcgaagttatcaggtaaagaaagagcgcattatctaagagcaattgctcaagaaattcgagataatctaaaagaaatttcgtctttagaagttaaagataatggtaagccttacccagaagctgagtgggatatcagtgatgctgcaggttgcttcgatttttatgcaaatttagctgaatcactggatgaaaatagtgaagagaaaatagagctgagtgatgatcgctttagttgcgtagcaacaaaagaaccagtaggggtggcatgtgcaattattccatggaattacccactattaatggctgcatggaaggtagcacctgcattggctgcaggctgtacaatgattcttaagcctgctgaagcaacctcacttacagctgttgaattagggcgtattgctgaaaaggtaggtttaccgaaaggtgttttaaatattttgactggatatgggcgagaaattggtccgtacttaacagaacatcctgatattgataaagttgcatttactggtagtgtacctgtaggtaagcaaattatgttatcagcggcttcaaatgttaaaaatattagtttggagctaggtggaaaatctgcatttattgtatttgatgacagtgatattgaagctgctgttgaatggatcatgtttggtattttctggaaccaaggacaagtttgttcagcgacatcacgagttttggtacaagaaggcatctatccaaaacttatggaaagattagtagaagagagccaaaaaattaaaatcggaaatggttttgatgaaggcgtgaagcttggcccactcgttaaccaaaaacaatatcaaaatgttgtggatgcaattcagagcggtattgaagataacatcactcttttaagtggtggaaaaccgcctaaagatcttacgaaaggttattttatagaaccaaccatttttgctgatgttccagaagatcacccattgtgggctgaagaaatttttggtccagttgtgagtattcgttcatttaaaactgaagaagaggcaatcaagtctgcaaataactctatatttggattagctggtgcagtaatgtcgaaggatttagagcgctgtaatcgtgtggctcgaaaactaagagccggcattatctggattaattgttctcaacctacttttaccgaagctccgtggggcggttataaacaaagtggcattggccgagagttaggagtctgggggcttgaaaattatctagaagttaaacagattacgagttacgacagtcaagaaccatgggcttggtatattcaataa

SEQ ID NO: 70882 - DNA, 1257 bp, Acinetobacter baumannii
atgtctatagaatctaatttgaaaaatactgttgtaattggtggcggtatagtgggtatctgttgcgctctttatctgcaaaaaaaaggttttaatgtcactgttgttgacccatccgaagctggtgaaagcaccgcgaagtggagctgcggacagatggccgtgagtgaaattattccgctttcaaaaaaaggaatcttaaagaagattccaggttggttactagatcaacagggacctttagcattaagaccttccgcttttccaagtattattccgtggtttttacgttttttaaattgtgcaagagagtctcgtataaatgagatagcgagctctttggcttcattaactcaacatgtctatgaagactatgcagtattgctggaagactgccccgacaaagatttaataggcacacgacctattttagagctttttgacagtgccgctgatattgaacatgagaagaagtatttagagttaagacaaagttttggtttcaaacatcaaattctaaatgaaaaagaaatttcagacttagaacctgtttttacaggtaaattcaaacacggtttgttatttaatgattggaccgctgtaaaagatactaaaggttttattgctgcactcactgaaagttttattgcaaagggtggtgaaagaatacgtgcagaagttgtcgaattacgtgaagaaaataatagattgcaccaagttcttttaagtaatcaccaaattattgatgttgactatgcagtagttgctgcaggtgttggttcacaactattttcaaaacaactcggtattgatccacctttagcaggcattgcgggttatcaagtcgttttgccaaaacctgaagtcgacattaagcattcaactatctatgcgtcaggtggcttttgttttgcaccaatgagcagaggtctgcaaattggtggaacgattgaatttgctgcagctggcgcaaaacccaatatgaaacgtgctgaaattattttggataaagctaaaaaagttttacctcaattaaataccgaaggaatggaatttggtgttggttatagaccatttttgcctgatacaaagccaattattgatatgagctcacgtttaccaaatgttgccttagcctttggccatgggcagcttgggttaactttaggtgctactacaggacgtttagtcacagagatgctatgtcagcaacctaccaaagtggacctcacaccatttaaagcaaatagattttaa

SEQ ID NO: 70883 - DNA, 876 bp, Acinetobacter baumannii
atgttgcaaggtattcttcctgctctagtaacaccttttgatgaaaataaccaagtcgactataaaacgttggttgatattattgaatatcaattaaaagcaggtgttaaaggtttcgtaccattaggttctactggtgagtattacgcactgactaatgaagagcgccgtcaaattcttaaagtagtaaaagaaactgtaggtgatagtggtattttaattgctggtgcaaatggttcatgtacacgtgaagttttagaacaggttcagcaaacagttgatcttggttatacaaaccttttaattgcacctccttattatgctttaccatctcaagaagaattgattgctcactacaatgcgatcttagatgcttttccacaaattaatattgttctgtataactatcctgttcgcacaaatgtagaagttggttacgaagtacttgaagcttttaaagaccatccacgtgttattggtattaaagaaagtagtggtaatttactacgtgccattgaaattggtggaaagtataaagataactatcagctttcatgtggttcagatgatcaggcattggatttcttcttgtggggcgcaacaagttggatctgtggtccagctaactgtttcccaaacaaagtcgttgaaattatcgagaaatataacgctggtgatattaaaggcgctcaggatgtaatgcgtcaattattcccagttatggcaattatggaatcaggtaaattcgttcaaaaagttaaatatggttgtgaattggctggatttaaagtcggtaatgcacgtatgccattattacctttaactgaagaagaaaaagctgaatttaaacgcgcatttgatgcaatcgataagtaa

SEQ ID NO: 70884 - DNA, 1335 bp, Acinetobacter baumannii
atggatatgtcctcaatcagtcatgtatcaaccatcgataacgatgatgtttacgcaatggatcgcaaatacgtattccattcttggtcaatccaaggcaatttaaatcctttagttattaaatctggtaaaggatcgaaactgtgggattttgatggtaatgaatatctggattttagtagccaattggtaaatacaaatattggccatcaacatccaaaagtagttgaagcaattgttaaacaagctcaagaattaatgacaattgccccttcaactgcaaacttagcaagaaatgaagctgcaaaaagaattgtagaattagcgcctgaaggctttaataaagttttctttacaaatggtggagcagatgccaacgaaaatgctattcgtatggctcgactatttacaggtaaaacaaaagttttatcttcataccgctcatatcatggcaatacaggttcagcaattgtagcaaccggtgatgctcgccgcattccaaacgagtatgctcgtggtcacattcacttttttagtccctatctttatagatcagaattccatgcatcaaatgaagtggaagaatgcgagcgtgctttacaacatttgagaagaattattgaaagtgaaggaccatcaagtattgctgcaattttacttgaaagccttccaggcactgctgggatcttagttccgcctgaaaattatatgcaaggtgttcgtgaactttgtaatgaatttggcatcatcatgatttttgatgaagtcatggccggctttggccgaaccggtaaatggtttgcacttgaacattatggagttattccagatttaattacctttgctaaaggcgtaaattctggatatgtcccagtaggtggagtgattatttctgaaaaaattagccagtactttgacagcaatttcttcccaggagggttgacttattcaggtcatcctttggcaatggcttctattgtggcaactatcgatgctatgaaagaagaaaaagttctagaaaatgtggaatacatcagtaatgaagttttaggacctggccttaaaaagcttgctgagaagcacaatattatcggtgaagtacgtggtgccggtgttttctgggcaattgaattagttagcaatcaaaaaacaaaagagcgcgtttcagctcagactatgaccgaaattaagaatctttgtgcacaaaaaggacttttaaccttccttgcagataaccgtattcatgttgtacctccatgtatcgttactaaagaagaagttctagaagctttaaaaatctatgacgaagttttaacagaaattggttgccattaa

SEQ ID NO: 70885 - DNA, 1503 bp, Acinetobacter baumannii
atgagcgagttgaacgttgttggtcatttgatcaatggtaaaaaaattcacgacactcaaagaacacaggatgtttttaacccatcaacaggcaaagtttctaaacaagttgcgttagcttcaaaagaaactgtagaggaagcaatcgctgctgctcaggccgcttttcccgcatggaaaaatacgccacccttacgccgcgcacgtattatgtttaagtttaaagagctacttgaacaaaatgctgaaaaaattgctcatcttattggtgaagagcatggaaaaattttgcatgatgcaaaaggtgaattacaacgtggtatagaagttgttgagtatgcatgtggtgcccctgaactactaaaaggtgaattcactaaaaatgtaggtccgaatattgactcttggagcgattttcatcctttaggtgtggttgccggtatcactccatttaacttcccaacaatggtgcctttatggatgattccaatggctttagtgtgcggtaatacatttgttctaaagccatcagaacgtgatccaagctcaacaatgtttattggtgaattactctatcaggctggtttaccagaaggtgtttttaacatcgttaatggtgataaagaagctgtagatgttttattaagtgattgccgtgtacaagctgtaagttttgtaggctcaacccctattgctgagtatatctataagactgctgctgcaaatggaaaacgatgccaagctttaggtggtgcaaaaaaccatgcgattgtaatgcctgatgctgatcttgataatgttgttaactcattacttggtgcagccttcgggtcatcaggtgagcgctgtatggccctatctgttgctgtaactgtaggcaaagaaattggagatcaattaattgaaaacctttctaaagctatcggttctttaaaatacggcgcatattcagaaaatagtaacgattttggcccagttattactaaagcccataaagataaagtcgttagccatattacaagtgcagaacaacaaggtgcaaaagttgtcgttgatggccgtgaagcaaaagttgcaggtcacgaagatggtttctacgttggtgcaactttaatcgacaacgttacgcctgaaatggatagctataaaactgaaatttttggtccagtattgcaagttattcgtgttgaaactatggaagaggctttagaactcattaataaacacgaatatggcaatggtacatgtatctatactcgcgatggtgaagctgcacgttatttctgcgataacgtacttgtaggtatggttggcgtaaatattcctcttcctgtcccggttgcttatcacagttttggtgggtggaaacgctccctatttggtgaccttcatgtttatggtccagatggtattcgtttctatactcgccgtaagacaattactcaacgttggccatcttcaagtgttagagaaggtgctcaattctcaatgccaacactgtag

SEQ ID NO: 70886 - DNA, 780 bp, Acinetobacter baumannii
atgaacaattatctaagcgaacctaatttaagtaataatgatatagaaaatatacttataaactacaatacttttgattgttcagaaccaaaaaatggttttggaattttcatctattgttattccaaaaaatcaaatgtcagtataggttcatcattaattcaagcacctccctcatatggtatttggataccaacaaaatatttaaatgaaagaattactatcaattctcaagaatattgtgtcatcaggatccccaacgaattcgctaatacattaccacttgttgtaagtacagttatttgcaattccataacagattcaattttgaggcactgtaaagagaaaaccatttcatcgataagatctgaaaaagataagcacctatatcaagtattgttagatcaaattacagattcagaatattcaaatagttttcttcctctcacaaatcatccaaagctcgcggctatacttcaatatataaaagaccactcttctcaaaatattaatatatcggctttagcaaaacaatttgaagtaaatgaaaggacattaagtcgacaatgcaatcaagaattaggaatgagtctcatagagtggaaacaacgattaaagatcctaaatacaatttccttattagatgagaattcttcaatcgataatattgctaaaaatttaggttactctacaacctctggatttataaccatgtttaaacagtggacagggttaacacctaataaatataaaaaagaaatactatccagattcaactga

SEQ ID NO: 70887 - DNA, 255 bp, Acinetobacter baumannii
ttgattaatctaacaaaatctattgcacgttctttcggaaatgacggtattactgctgttgcgattgctccaggatgggttcaatctgaacctgatgaaaactcaatttctagcaatgaagagcaatccgccttggctgaaattcttattggtgaaatagttaagcctgaagaattagctgaattagtttctttcgttcttataccctcacaacatttctttaaatggttcaactatagatatcaatggcggtag

SEQ ID NO: 70888 - DNA, 756 bp, Acinetobacter baumannii
atggctagattcattggcaaaacagctttagtaactggtgccggaggtggtattggctcagcaactgctcgtcgtttagcagaagaaggtgctacagttatcgtggcagatgccgtatctgagacagcagaaaaaactgtaagtactattattaaacaaggcggtaaagcggaaactttagtatttgatttgacgaatggaaatgcatgccgtcaggcgattgcagatgtagaagctaagtatgggcatatagatatattagttaataatgctggtgctatgcgtcgtggtgatttactgcatacgagtgaagctgattggttgttaagtttagaagtgaatgtgaatgctctctttcacttatgccaagcagtattaccaaaaatgattgctgctggtggtggagcaattgtaaatacagcttctcagtggggtttaacacctgctccaggtcatatcgcttacaatgtaagtaaagcagctgtagtcgcttttactaagagcttagctcgtgattatgctcctcataaagttcgagtaaatgcagtttgtcctggtgaaatacatacaccgatgcttgaaaaaggtattgcagaaaaagggaaaacaattgcggacttagatgcaatggttccatttgggcgcattggcaaaccagaagaagttgcagcgttaatcgcttttttagcatcaaatgaagcagcatttacttgtggtgcatgtgtagaaattactggggctcaagctgtagcgtaa

SEQ ID NO: 70889 - DNA, 753 bp, Acinetobacter baumannii
atgacaaatactactttagatctacaagataaaattattttagttacaggtagttcacgaggtataggcttggctacagcaaagcttcttcataagcgaggagctaaagtaattattcacgcacgttcttcgacatctcatttagatgaactattaaatcagttaggtgaaaatgttcttttagtattgggtgacttaagtagtataaatggtgcagagaatgtttggaccaaagccattagctgcttcgggaatatagatgtattagttaataatgcaggagcttggttaccatctgatatcacttctagccaagcttggcgtgagggatgggaaagcaacattgctattaatcttgcagctcctgctgaattatgccgtttagctttattacacttcaagcaacgacatggcggtattattatcaatattaccagtcgttcagcgcatcgtggtgatgatgctgagcatttagcttatggagcagctaaaggcggcttgcttgctttgacaaaaggtattgccagaggatatggtcgtgacaatattcttgcttatgcaattgcaccaggatgggttgcaacagatttagcagagggtgcaattgagccttctgtattagaaaatctgcctttgggtgaagttactcctgcgagtgatgttgctgaaatggtagcctttttagctactggtctttcccgtcatacgactggagcaacgatcgatattacaggagcagattacgttcgttaa

SEQ ID NO: 70890 - DNA, 1206 bp, Acinetobacter baumannii
atggcagcattgactctagggaaacagtctaatttagacgtgacaaggaaaatcatttcagtcgttatttttacagcttttgcttatttatcggtagggttgccattagcagtcttaccaaaatttattgtaaaagaccttaattttgcaccttttttggttggcttaattatcagtttacaatatttagcaacgctattgactcgccatagtgctggtcaacttgtcgatagaaaaggctccagatatgttgttcttttagggttaagttgttgtggattaagtggagtatttgcttttttagcactatcgttagtttcatatccactagtaagtatttccttactcgcaatttcaagactatttttaggtagtagtgaaagctactgcagtactggtgcaacactttggggaatgcaactagccggccctacagaaacttctcgggtaatttcatggaatggcgcagcaacatatctatctatggcaatcggggctccattaggagtcttttgtaatgcgcagtttggtcaattcggctttgccattttgactataattttagctattgttggattttttcttgcatatagaaagacagcaatacggactgggaatgttcgacctgtaagtctaccaattttatcagtactttctaaagtttggattttcggtttagggcaagctgttggaactcttggttttggtgtactttcaacctttgtagctttatttttcttggaaaagggttggagtaatgcagcactagctttgagcttattcagtattggatttgtaggtgtaagatttatcttctctaataccattcaagttttcggcggtaagaatgtggctctatgcgcatttcttgtcgaagctatcggccttttaacaatttggcaatcaggtgaccgaataattgcttatgcgggagcatttcttgtcgggacaggtttttctatggtcttcccagcgatgggtgttgaagcaatgaaaaaatttaatgaccaaaataaaggtgtagctttaggtgtatttacagccttttttgatatcgctttattattaattggtccaattgcgggcctattaatcccgattacttccgtgcaaaatctttatggagtaatgggttgtataactttattatcaataattcttctatattttttatttcttaaagacactaaacaacagataatttaa

SEQ ID NO: 70891 - DNA, 705 bp, Acinetobacter baumannii
atgactgtagaaaaagtagcgctaattatagctggtggtagtggcatgggggctgctgctgcacgacaattaaataaagatggctatcatataggtattctttcttcttctggaaaaggagaaaatattgccaaagagcttaatggtattggtgtgacgggaacaaaccaatcaactcaagacataagtaatcttgttgatcaagcttatcaaaaatggggaagagttgacgtattagttaatagtgcggggcatggtcctcgagctcctattttagagattacagatgagcaatggcatttaggtctagatacttatctcatgaatgtcattcgagcaactcgattagtgactccaattatggagaagcaaaattcaggcgtaattattaatatttctagtgcatggacatttgaaccaagcgatatgtttcctacatcagctgtttttcgtgctggcttagcatcctttactaaaattttcgctgataaatatgcagcgaataatattcgaatgaataatattttacctggatggatagatagtcttcctgaaacagaagagcgccgcaaatctgtaccattacaaagatatggtaccagtgaagaaattgctgcaaccatcagcttcctggcttcccaaggggctgcgtacattacgggacaaaatattcgtgtagatggaggcatcactcactctgtctaa

SEQ ID NO: 70892 - DNA, 885 bp, Acinetobacter baumannii
atgaatcaggccaatcgtttaccctcattgaatgcactaaaagcttttgaagcagcaagtagacatttaaattttaaactcgcagcagaagagttaaatgttactcaaagtgcaattgctcaacaaattcgcagtctcgaagaagagctaggttcaaaattattcgagagacattctaaaggcgtaactttaactccaaatggtagaagttactctcatagcattactcaagcttttaatttaatttttgaagcaactcagtcatttcgccattcaaataaacatattactattagcgtaaccccgacatttgcttctaaatggttaattcctcggctcaaccagtttactcaaactcatcccgatattgatttacagattttagctacagaaagaatttcacattttcaaaatgatggggtcgatttagcaatccgttatggtaaacctcctttcggtgctggtcttcatacagagttactcttacaagattcttttatcgctgtagcaagccctcacttaatccctttaaaaaatcagcctttagagttaaatgatttatataaatatactttattacatgatgctaataatctttggccccactttttagataaattagaagtaaaaaaaactaaaaacctatttaaaaatatccgttttaatcaaaccttattggctattgatgccgcagttgctgcacaaggtattacattaagtaatcccatatttgtaagttccgacttagaaacaggaaagctcattaaaatttttgagcaagacttaaaaatggaaactggattttatttagttacacctcgatattctataaatgctgaatctatagctaaagttcgtaaatggttatttgatcagttcaattaa

SEQ ID NO: 70893 - DNA, 912 bp, Acinetobacter baumannii
atgaagctcaaacaactacagcaaattagcaatgctgatataaagcttttaaagatttttaaaactgtttgtgaatgtggcagctttacatctgctgaaagtatgttgggtattagccgatctgcaattagcttacatataagtgacttagagcaaaaagtgggatttagattatgccaacgaggtagagctggctttgctctaacagaagaaggaaagaaactattagaatatattgagatacttttagtatctattgaagatttccgcgtaaaggttaaccaaatccataataagctcaaaggtgaatttaatataggcattatcaataacttagttacaatgccaaattgtaatgttactcatacattaaggcagttaagtaatgaacatcctgatgtaaagataaatattagtatgagtactctttcagatattgagagtaaagtattagatggtcgtctacatgttggggcaattccatttgttgcttccctatctggactcaattactttgatctatacgaagagaaatcttatctttattgtagtgataaacatcctctattttcttcaaccactttattattaaaaaatgatttgaaaaaatgggatgctgtaatacctaactataatataactgcagaagctattaatttacatcaatttcttaattgtaaggcaactgctacagacagggaaggcatagcatttttaattttgacaggaaacttcctcggatttcttcctgatcattatgcttctaaatgggtacaagaacagaaaatgaaatctatacttaaatcagagatttcttataaaactaaaatttgtttgataactaaaaagagtaaagcgaataatatgattcttaattactttttagagagaatctatcttaaaactgaatga

SEQ ID NO: 70894 - DNA, 555 bp, Acinetobacter baumannii
ttgcatcagcatcctgaattaaaagcttttcaggctgaaaagcaaactgctgaagcaaaattgaaacaagctcaagctttacaaaagcctgattggggtattgagcttgcataccagcatcgtgccccagagtttggcgatatgatcggtgtacaactgacaactgagcttcctgtattttcaaaaaaacgtagtggtcccctcattcaggcagccctagacgagcaaaacaggattactgctgatcaagaagcccaataccgtgaacatctcacgaagttagatgacgggctatccgatctcgatgcgcttggtcaacaaattaagcgtacgatacagacaagtattccactcgccaaacaaaaagtgggtttacagttagcaagttaccaagcaggcaaaagcaatttgtccaatgtcattaccgcccggcaagctcttttagaacaacagctgcgtcttattgatcttcaacaacaacaagcaattacaacagcacaactttattttgcctttgaagagccgaccttaaaccatgctgaggagcagccataa

SEQ ID NO: 70895 - DNA, 543 bp, Acinetobacter baumannii
ttgcgacatgcttatagtgagctgtatttaaaacttggtaattatcatcaagctcttagaagttttttggaattattagtagaaattacttctatgcataatccagaaaaagcaaagcgatctagagatgctgaaaagcaactgaacgaagttaatcggcaaattgcggctaaagctaatgaattagttgacttgttagagccaagatcagagttaataaatacttctgattttatgacacctacccattaccacattggtaatgtaattcgcgaagcctctcaaagtaatccgtatttcagaccacatttacaagcagagctaaagctccttcaaggacggtttgattttaaatattggcctcagttacatgagttgataagagtgattgctgaagatacaagggtagctttacctatagctatagactctgttaccgaagcagcaacaagtggagacagggcttccatagcagattattttagtgctttatttgaagctatagaatgtaatcgtcagaaaagaatatggttttttacctaa

SEQ ID NO: 70896 - DNA, 399 bp, Acinetobacter baumannii
atgaatgagaaacaaaacaatcatctaaatcttgatggcatcaattcttcttataatgatggtgacggattaagaataaataatcctaatgattttagtagtatcacaatatctaatggttatttttcaaataacaaaggtaatggaataactattggttcaccacagcaatcaccattagaaattatcctcaatcagttagctccaaagcttcccgatacgatccaacctcatgagctgatgccacttgtccaaagtctcttagaatctaaagaccaagaagagctatctcagaaattaaatagttcaggaattaaagataagtttaaagatcctaatctttggatatcttttagtagcttattattttcaatagcatctcaatttttattaaaataa

SEQ ID NO: 70897 - DNA, 837 bp, Acinetobacter baumannii
atggctattggtgagagaaaatttattaaagcttttaaaagctactgtagaacacttaacttagcagtaaaaatttcccgtttaggtgctggtcgatatggtgagtcagataaagtagtatgggcatgtattctttttacaaaactatgcaccagtggaagaagtttaaaaaaacttttagatcatgatattgctaaagaatataaaaatgattgggattattcttctgcttttagtttaacaagaaatattatggaatgttatcaaacacttttttatttatgttttgataatatctctgaagaagaatatgttgcacgtaaagctttatttaatgtacatgattattattcacgcaagcaatttttttcctttttccctgaaaattttgatggtgaaagagaaaactatgaaattgaagctatagtattagaacaattagaaaattcaactttctttaaaaatttagatgataaaaagaaaattaaatatttaaaaggtaaaaatgccttttttatatctagagaagatattgaagaaaaagaggaagtgaataaaaatgattttcggctatggtataaacttttatcagcaaatatacattcatacccaatgggattttttcgaatgattgatggggatagaggaacaggggttcattctgaactagaagaaaattatagtgctgtagccttagaccttgcagagagctacttaaaacgtgcttgcattcacatgttaaaaatttttccagatattcttgaaaaaataagtccgcaggaaaaaaaaattactatattaaatattaataatactaatattttctctaagaaataa

SEQ ID NO: 70898 - DNA, 639 bp, Acinetobacter baumannii
atgataagaataatttataaaattcttacctatcctatgcaatgtataggttttataatgtatttctttaacttaaataatataaaaacagatgtagataagtgcttaaaaaatatagatgagtctgtttattcatctattcctgattcatggttaatttttttaatttatgcagaagatcataggtttaataaacactacggtgtagatttttattgtatattaagagcaatttaccacacaaaaatcaaaaaaaaatatcaaggtgctagcactattcaacaacaatatgttcgagttatcacaaatagatatgaaaaaaccctatggagaaaaataagagagcaaataattgccattattattacaaataaaataaataaagaaaatattgcaaaaacttatctaaaaattgccttttatggttctcagcaattaggcctaaattccttcttaaaaaaacagaagatttctattgtcgaactagatgacactaaggttatagaattaattgctagactaaaatatcctgaaccctatcaccacaagaataaagttaactgggagaataaaattaagagaagaaaacaatatatattaggtcgcatcgaaaaatattcattgatatctaaaggttaa

SEQ ID NO: 70899 - DNA, 834 bp, Acinetobacter baumannii
atggaaaagacaacctatatattcttatccttaacactttttattttaggttgtattttcatggacaaactccctagtctatgggaaaaaagttcattaaataaaattaataatatagataaagattttatagctattaagcgttttctcttcattcttctattctcatttcttagttacctacttatttatccatttactgaaactattattaaaagctgggatgtaaatttttcactaggagatactttagaaggtattatctctggtgtttttttagcattagccttcttctttcttagagaaaaagtatttggctatcctgatttaaatgataaatggtatctaatgtcagttactgaagaaactgtatataatccatttaaaaatatgatattacatcatgaattatttttggtacaagacaagtctcaaataaaaggaacagcagagaaatattatgaagactcttcagttggtaaaggtggtgatcatgttattcattacatagcaaaacatagaagaagagctaatattgagggaacaatacaaaaaaattattttggtccagatatattaatcttacatgctgtagaaaatggtgaagttcgacaatctaccatttattgtcgtatagaactaaagagaaaatatcttattggacaatatgactttagtagaaaaggtactttttattcaatggtttccggccaaaaaggttatgtcattcttagtaaacaaagatttcaaactagacctgcttgtatagatcctaaattttctccacctcctcgcaaaaagaaacacatattttctaaactcttggataaataa

SEQ ID NO: 70900 - DNA, 426 bp, Acinetobacter baumannii
atgatcgagctttttacgacattaaacccatggcttaaagctatacatatagtatcaatgaccatttttataagtggtgttcttgctgcttcggtttcatttaaaatagatctggatattactgaaaatatccatattcctgtttgggctcagcgtgaataccgatgggatcaaattatgactaccccagcgctctttattacttttgcctcgggtttaatcatagcaattcatggtcaatggttcagctctaagtggttacctgcaaaaattgtatttgtacttattttggcaggtattcatggattccaagccaagcttttacggcagatcgcaaatggtataaatgtaaggaaaaaacaagcaacattgattatcctcatctgtactatttcaatcatcgttcttgccattattaagccataa

SEQ ID NO: 70901 - DNA, 336 bp, Acinetobacter baumannii
atggctaatccgaaagcattgaatatgacacactttcaaaaattgaaatttttttcattattagaaacaatttctttgctgttattggttgtttttgcagtccctttaaagcacttcaacgggtgggatacaggtgttcatattatggggcctatccatgggcttacattttttgtctatttatggttcgcggtacaaactatagccgagagcaaatggtcaccattagaactattaagattagtggtagttacacttattccgttcggtgtttactttaatctatcatttataaaaaataaaatgactaatgtagacgaagctcaatcatcatga

SEQ ID NO: 70902 - DNA, 948 bp, Acinetobacter baumannii
atgcatacggtagccattttagctttacataatttcattccatttgatttgggtattccatgcgaagtctttggttttgtacggttattaaatggtgaaacgggctattgtgtaaaagtttgtggcgaagctgagtatgtaaatacaggagcatttacgcttcaggcacattttgggcttgatcatcttattgatgcagataccattattattcctggtattaaagatcctaaagagccccttaatcccaaagtaaaaactgcaattcttaaagcgtggcaaaaaggagcaagaattgcttcaatttgttcaggagcgtttgttttagcagaaacgggccttcttgatggatatcgggctgcaacccattggatgcttgcagaggaactggctattcgatatcccaaggttaaggtagagcccaaagtattgttcgttgatgaagagcgtcttataacttcagctggggcttcatccggactggatatgtgtctacatcttgtgcgtcgggattatggacaaagcgtggctgctcaggttgcaaagcttgctgtcgctccattaaatcgtgatgggggacaagcgcagtttatccaatatgaaataccagaaacacgtgatagcttagcgacgctattggagtggatgaacactcatctggatgacaagattgatattaaattacttgcttgtaaagcaaatatgagcccaagaacatttgcccgacgtttccgtgaacagattggaactacaccattacagtggttgctcaccatgcgcatacaacgggctcaggaattacttgaaacttcttcacagtcgattgaagaaattgccttatgctgtggttttaattctcctgtcacttttcgaactcgatttaaaaatagtgtaggtgttagtcctagcacctatcgggctagatttatttcttatctttcatcttga

SEQ ID NO: 70903 - DNA, 1848 bp, Acinetobacter baumannii
gtgagtagtttatataactctttaaaagataagcttgatgaatattcatttgatggattggagaatattctttttaaagaaaatgaagatgatttaaaaaaattacttatagatattaatggtaatgttaatttaataaatcaattccctaattataaaattataaaatttagaaattttttaaaagagttttatttaaaaaaaggaattgaaacaaaaatttttgagaatattgaaataattgaaaaactttatagaagtattttagatgaaaaaaaggattttgaaggtgaaaaaataagaataatacaaaatttatttaattttactagagaaaaactgattgaagtagataagttgttaaaagggaaaatagatagggaattgattttaaatgaaataggattggaggttaataattttgatagaggtatagaaagtttgtgtaaaataataaattataatttgcaaagtattgcttattcgtatcctgaactagttagtaaaaaaaatgaaatagtattgccatttgaagttttacaaaaaaataattgtgaaatagagtttttaaaaaagtcgctgttaaatacagggatgtgggatattgtacaagatttagattacgattttagattttttaataattctttaaataaaagtattttaaatggaggaaatgaaattttattgcaagtaaataatttacatttatatgcaaagattgctatgcaaagaattaatatgatacatgctgatgttttagtgcaacagtataaaaattatagattgtttattgcacagcttaataacgtacagaaagatttattttttttaagaaatcttttttatagattgtattttattgatattgatgaagataaaacagaatataaaggtttgacaattaaagagtggtttttaagttttttatcattaagagagctttctgaagctaaaggttttaatacagttagttttaatgaaataattgataatttcaaaatgaataatatttctagtagtaaacatttaatgattattaataatctaacttataagaaagaaaagagggctgatttatatgatactcctataattaaaattagtgatggttcttttttaattttccctctaagtattaaaaattctgacttagaaaaagtcttatcttctatcttttctaaatttaatttacatataatagataagggtaagttatttgagaaagaagttttaaatacattgaaagaaaaagaaaaagaattatcatttagtgttagtgagttggagttttcagttaaccatatagaaaaaccccagcatcaatatgactgtattttagaatgggataactatatttttataattgagtgtaaaaatagaagtatacctactacagaatatatttctttaaataaatttaaacgaaacttggaagagtatttgtctcaagttgaaagattagagtcggggttaattaattatactgataaacataaaattaaaataaaaaataaaaaaattattaaattaattttacattctttaccttttagtttggattacttaattaataatacttactttattgattactcaagttttttaagatttttctcatctaaagaaattggtttggaaagaatctctagtcaaaatataagtgaaattaaagaagtacttcatacactttgggttggagagcgccctactgtacacgattttattaactatttaaataaaccaccgcaagttcaatacttgaaaggaaaagtaaaaaaatcacaaacattacatgatttgggggattttaaaattaaagttgaaagacacttatgggaaaattga

SEQ ID NO: 70904 - DNA, 591 bp, Acinetobacter baumannii
atggaaaaattaaatacaccatttgaagataaagagtctaaaaagtcatctttagataattatatatttatagataaaaaattatatacggtaaaagctaagaaaagtagaaaaatatttttttacactgagagttttgtatatggattaatatcattggcatcatatttttctttttatatagcaactaataaatttacgaatcaaaaagaactagaaaataatataattttattaactgattattttggtttggatagtttgataaatacttttttaggtatatttattgttataggaatagtgtcatctttaaattatatagtaacaagttcaaaactgaatcttcaatatatattagataggttgacacattctttaatagattttgtatttttaatgttctctagtatgctgggcctatttgctgcaatattagaatttacaagtgttttagatttaacatctgatattttgaaattgaggaaattatcgtggattggtgtttttagcctgtttatactattgttagcgtatgtttttattcttacaataatgaaggagaataatgatgaatttatagaagaataa

SEQ ID NO: 70905 - DNA, 2049 bp, Acinetobacter baumannii
atgaattcaacttcttccccccccctagctataagtttcgtatggcatccagatgaccatgcagtacatttcaagaatattagcaaatttagacaatatttaacgcgagatattgatagaccattttctcgtgaattaaatattccaacttttttatatagttccaggaatacagatattatccctaatccattaaagaaatgggcaacgaaaaatttagtatttttatttttaagtaaaaatacactcattagtgagaactggaacacatattttgagaatattcctttggagtttgaaattattccagttgctttagataactatgcattaaatcatgctaataaaggtattttaaaaaataaaaatttcgtacgtgcattctcttggcctttaaacgattatcaagaatactttattctaatgttatcgcatgaaatctatcgtttaggccttaatgaaagtaaaaccattgaaaaaggtatagatgcttcattaaagatatttctcagccatgctaaagctgatgaacaaggtgtcggtttagctatagaaattaaaaattttattgataatacatctatacaaagattttttgatactacagatatttctccttgttttaactttgataaagaaatagaaacacatcttaaagaatctactgtaattgcaataggtagtgataagtactcgtcccgttattggtgtcagcgagaaatacttatggctaaggaagaaagaagacctattgtttttgttaacacattagaacactatgaagaccgaatttttccagcagcagtaaatattcctaatattcatgtttcgcatgatactagtgtgagaaataaagaaattttaagaattttaattgcaacattattagaaactataaggtttaactactcaaaaattcttttaaactattataagcaacaaggatggattcctaaaaattcagaagtttttgctagaccaccggaggttaatcaaataatcactttattaaaaggtagaagtgaaactcaaaaacttgaaacccttcatatttgctatcctgaacctcctgtttatccagaagaaattagctggattaatcattttgagaataagacaccacaaggtacagcaaataaaatccaagctgttacacctttatggtcaatttttacaaaggaacaaatatcaaaaaaaataggtatttcaatttcagattataaggaagatcagtttgaaacacataatcagcacattgatgaattaaaaagattatcacaagttctagctggacatttattagctagaaaacatacattaatatatggaggtgatcttcgtgaggatggattcactcaatttattcttgatgaggctttaattattcaaaataggacaatggataattcgatcaaagtcgaaaatcatttagcctggccaatttatttagaaccaaagttaaagattttcaaaataaaataccatggtattttgcatactgaagaatatattccaccgacagatatacacataaatcaagaaaacttcttagagcccaattgtcgagaaaacctatatatatggtctcgcagcctgacagaaatgcgtgagcaatctatatctaaatgtgattttagaataattgctgctgggaaatcttcagattataaagggaaaatgcctggtgtattagaagaatttataatttccttaaagaaacaaaaacctatatatatactaggtggttttggaggaattacaagtaaaatagtaacttcaatatttaataaagagccagaaccagaattaactgaaagatggcaaattcaaaataatattgggtatgcagacttacaaagtcttgcaacaagtaagggttttggagctgactaccatgaaatagaaaattttattaaatctatatctatagaaagtctagctgataatgtaggacttacaacagaggattatcaaaagctaatgtttactccatttattgatgatgccattcacctaatattgaaaggattaacacaattgtctacttaa

SEQ ID NO: 70906 - DNA, 453 bp, Acinetobacter baumannii
atggcaagaaaaaatatctttataagtcatgtacatgaagacgacgatggcttaaaaaagactaaagatttaatcaagacaaaggggtttgaagtcagagatttttctattaactcaagtaagcctaatagtgctaaggccgaagattatattaaataccaaatcttggctcctagaattaaacaatgttctacacttatggtttatataactcccaagactaaaaatagctattgggttaactgggaaatagaatatgctcaaaaactaggtttaagaattgtcggagtttgggctcatggtcaacaaggctgcgaagtacctgaagagttagagaattatgctgatgctattgttggttggaatagtgaatgtttaattaacgcaattaatggtgaaagtacttttgagggatatagttcaccgattgttgctagatatctatgtggttaa

SEQ ID NO: 70907 - DNA, 624 bp, Acinetobacter baumannii
atgaaaataatttcttatgtagttaggcgtgactatggcttcgctcctaatcccttttttggatattgtactttggctacttgtaagccagatattcgaaaaaatgcggttgttggagattgggttattggcacaagctctatttcgactggaagtttaaataaattagtatttgcaatgaaagttacagaaaaattaactttcaatgagtattggagtgaccaaaggttttttgataaacgccctattttagatcgtagcaggaagtatcaatatggagataatatttaccataaagaaaatttagaatggattcaattaccgtcgcatcacactgaagaggatggtagcccaaattataagaatataaacaaagatactaaagttgataatgtactgattagtaattatttctactattttgggagaaatagtattttaatacccgcggaattttcagaaattatcaaaaaaggcccaagttgtaaatatgtggataaaaaattacatgctaatttcttgaatgtttttttacataaatttccattaggggtaaatggttcaccatttgagtggaaaaacttacatcgagataaaaatcctcaacttatattttcattttaa

SEQ ID NO: 70908 - DNA, 711 bp, Acinetobacter baumannii
atgttttggagcggtaacaaactacataagaacaaaaagattttagtcccttatcaccctgatacagccatagactgtgcttctttagtattaactatcggtagtgaagtttatataactcctaattctgaagctgatagtaaggtcaaaaaaatacttaacattgaagaacctcagttcatcattcctaaagggcaatttgctctactgattacagaagaagagattcatgttccttaccaaaatattgcctttatctcatttaaagctaaatataaatataaaggtttaatcaatgtatcaggtttccatgtcgatccaggttggcggggaaaacttacattctctgtttataatgctggtcccagtgatgttgtacttgagaaaggcaacccttttgccttaatttggtacgctgacttagatcaagaaggtattactaatggggattatgcaaataataaatatgtaaaaaaggataaacctataaccagcatttcaagtgataaaattactgatatgactggtgatatattttctccatttaaattaaagaaagatattgaagatctaaaagagaaatataataaagaaataatagagatcaaaaaagaagtacatgctatcgagggaaagctgctagttagaacaggtttattaatctttacttttatttcattggttatagttattattagacttttaaaatga

SEQ ID NO: 70909 - DNA, 1341 bp, Acinetobacter baumannii
atgaattttgaggaatcgttttatttttttataaagtatattgttatctctccattgttatgctatgtgatttttacaatacaacttttttttaaacgatattctattatcacctcttcaaatcaagtctttgaacaagaaaaactcctaaaagaatttaaaacaaaatttacaaagtccacgcttagtcagaatcttcaaataagagaaatctatgctcaaaagatctcaaatcttcctaatgttagtggccgatttatagcttattgtcttaaacgtgaaattagcaacatcaattatatcatgtatctatttaattttacaggaaatttaataaaagtaccggatattgagggaaataactatttacatattttagagcaaaaacataatgtgctaaaaaaaggttttatctatcctattctcctaggcttattcattgtttcgatattatttttttctttaccgcccttgaatttttatattttcattctctacagttttttattcacattttctatttggctacttctaaattcatttcaatatctttgcgtataccttctagcaaagaatacagaatgtatcttttacaaaaaaaaagctattgagctcgatagttcaagtaatcttatacaagactctaagagtaataaaaaattatgttatcttatacaatgtgctaagggtaaatttggttttttgcatatgtcagctcaagaaattctgaaaaaacttgaaataaaacaaatgtctcatgatgttcgttaccataaagatgtttgggttttaagtacacaaggtaaggcaaaacatatggcagctcatattggaaaatatagtgggcaaatactagagactatacgtgaccctaatccagatttaataaagattcataaatacgtaattgattcattaataataaacttctcgtatgcgaatatttttgtacatcgaataagcaaacatttaagcccttcctaccttcagttagcaaatcttcatgagttgagagatacacttgcacaagaatatttgacacgtaaagcttacacgcaacaagcctcacaacatggtttagatgtagctatggatatgtgtattctttctagtaaaatattaaaaaccgttgaatcattagatcatgtagaaaaacatgaatttagagcaaatttcaaccaatatgtaattgatatttttgaaattcttattaccttatgtttcatttataatattgatggcatagaaaatcttattgcagatcgaatgtacgaagttgaacaaagacatgagtattttgaagagtatggaaattataaagatggttataaggttatataa

SEQ ID NO: 70910 - DNA, 1053 bp, Acinetobacter baumannii
gtgattcataccaaacaccaattaacttccttcgtaaaggatgatgtagattacttgaagtatttaaagtcattagatacatctcctgtatatgaaacatattggaagttcgcgtgtgaaagacaagatatttattttaatcgtttaagtaagaaagatttgccatggacagaggatcctgtacttaaaattcataaatttactaatgcttatcgtgctgcagatcgggtaagccaatatttaattaaaaatgtaatttatagagatgatttgccaaattcagcagaagaaattttttttagaattatgctttttaaattatttaataaaatagaaacttggcaactccttgaaaaaaaattgggcgcgataacttataagaattattcttttaaaacttatgatgacatctttcaaaaggctatggaaagtaagactaggatttattcagcagcttatatcatgccttctgggagtagtagttttgggttttcgaaaaaacatcagaatcatttgcaattattggagatgatgatgaatgataatttagtaggaaaattagctagaattactaaaatgcaacaagcttttgaactcatgaggtcctatccaactttaggtgattttttagcttatcaatttattactgatataaattacagtgagcttacggatttttcagaaatggaatttgtgatacctgggccaggggctaaagatggcttaaaaaaatgttttaagagtaataatgtcaatgaacaagagttaatacggtttatggcaaatcatcaagaacaagaatttaatagattagggcttcattttcagtctttatggggacgacctttgcaactaatagattgtcaaaatttattttgtgaagttgataaatattcaagaatagtccatccagagatagtaggtatatccggtagaacacgtattaaacagaaatattcttgtataagagaccttgaacttccctggtttcctccaaaatggaatatcaatgaaaaaatacatcaaacatcaattatggttaggtccaattga

SEQ ID NO: 70911 - DNA, 1083 bp, Acinetobacter baumannii
atgcaaactttacatgttgaattaggcgaacgccgttatcctatttttattggcagtcaacttgatcctaagcagttgcttgagccttatcttcatggtcaacaggttatgatcgtgagtaacgaaacggttgctcctttatatttatctcattatcaagaagctttaaaaagtttaggtaaaactgtagcgacttgcattttgccagatggtgagaaatataaagatattcaacatttaaatttaatttttgatgctttacttgaagctggttttaatcgtgattgtacggttttagctttgggtggtggtgttattggtgacatggctggctttgcatcggcatgttttcagcgtggtgtttattttgttcaagttccaactacgctcctttcacaagtagactcaagtgtgggtggtaaaacaggtattaaccatccccttggtaaaaatatgctgggtgcgtttcagcaacctcaagttgttttggctgatatggctcaactcaacaccttaccggatcgagagttatctgctggattatcagaagtcattaaatatgctttgttaggcgacgctgattttctggtttggttagagcagaatatggatgggttaattggacgagatgctgaacttttagcagaatcagtttatcgttcatgtgctcataaagcacgaattgttgccaacgatgaaaaagagcaaggcgaaagagctttactgaacttaggccatacttttggtcatgcgattgaatcttaccttggttatggtacttggttgcatggtgaagcagtagcgactggcatggtgatggcagccgatttatcacaacgtttaggttggatttcaagcgatgatgtagagcgtacaaaaaaaattattcaacgcgctaatttgccgatatcatgtccaaaaattccattggatgaattccttggatatatggcgcatgacaaaaaagttcttaatgggcaattacgtttggtgttgctaaaacaactcggacaagctgtaattactaaggactttgatgttgaacttatgaaacaagctattttggcgaatcaacacggataa

SEQ ID NO: 70912 - DNA, 372 bp, Acinetobacter baumannii
gtggtgaagatcgtccacgtcgcgaattcaactcagatcgtccacgtcggcttcggtggtgaagatcgtccacgtcgcgaattcaactcagatcgtccacgccgtgaaggtggttttaacgataagcctcgttttgattcaaatgatgacaatcgtggtaaccgcgtagactataaaccacgtcgtgaaaacggtttcggtgaccgtccacaacgtagctttggtggtgaagatcgtccacgtcgtgaaggtggttttggtgaccgtccaaaacgtagctttggtggtgaagaccgtccacgtcgcgcagttcgcgaagaacactttaatcaagaatctcgtggtgagcgccgtcgtaaattcgaccgttaa

SEQ ID NO: 70913 - DNA, 309 bp, Acinetobacter baumannii
atggatagaagtacacgcggagatataaggtatcaatatacatatcaaaataaagtttataaatcagaggaaaaagattttttggttgtatatagattatttatttctgaaaactgtgatgagatgaaaggccaaaatttatctatattttttatttcaccagatataaaaaaatcaaaaatattaataactaaaaaaggcttatcatttagaaactcttggatgataaaccttattttagaaattcagctaatatttttagtcttaattggattaattatatatttgattgtaacttctaagaagtaa

SEQ ID NO: 70914 - DNA, 825 bp, Acinetobacter baumannii
atgttgattttaaagagaattctacgctcactaagaaattggtttcaaaaacagcaaattactaatactattcgacattttgatgagaaagtggaccatacaaaatggcaaggagctgattttttccccgactattttactccttttaagctgcccacccctccaaaatatgacgcacagggaatatattatagtactttgatcgaagataatgtgggagcccttgcagccaaaattaccggagattttaaagataaaatttttgatttcttaggtccggatactcgtttagatgatatttatttattttggtatgatccatctaaaagaaaggaatggagtttatctaattcatggcatgacgataatgtaggtcaccgtattaaaatatatgtttgttttgaaggtaatggtaatacaccaactgttgttattccgaatagttataataaaccttataaacaaaacaaaaatgaaattcttcgtttttcgggaagaagggatattacaacgaatcagaaagaaattaagctaagctacaaatctggtgatgttgctatctttgatactacttgtttacatcgcgggttatatgaagagccagcagctgttcgctcagttctagtaatggaatatattaatcgaaataaagctaatcttattacaggaaaagcgccatgtggcccaggcacaagtagaactggaaaaattctttttactgaaaatacgtataaagctttaaaagcaacaggattaattgatgaacaactcatagaaagacaaggaaataaatacttttatgctcaatcaaaccttaagcaataa

SEQ ID NO: 70915 - DNA, 1926 bp, Acinetobacter baumannii
atgaataatagctttcgatatgatataaatggtctacgggcatatgccattttactggtagttttatatcattttggtattccaggcttctctggaggttttatcggtgtcgatattttctttgtcatttcaggctttctaatgacaaaaaatattctagataaaattgaaaaaaataacttttctttaataaaattttatctagcccgcggaataagaattatacctgccttattatttttgacattttttatttcaataattggctggcttttattaatcccagaagagtacaaaacttatgcaaaacatgcattatcaagtattaattttatctcaaatatagtttacctaagagaatctggaaattattttgcaaccgacacacacaataacattcttttacacacatggtctttatcagtagaatggcaattctatattatacttccaattctacttttaatattctccaaaataccgaatataaaaaataaatatggaataataataatccttagcacaataatttcacttattgcctcttaccttatatcaaataaaaatcaaacatttgcattttatatgattttaactagagcttgggagatgctagctggaggtattatttacttatatttctctaaaataaatttatccaaatttaacaaatatagtttagaaattataggcttttgtcttgttttaatgagcttaattttatttaaccctacctcattatggcctagtataaatgcacttattcctattgtaggtacaatgcttatcattatatctaacaatcaaaactcattatttacaagaataagatttttacaatttttaggaaattcctcatactctatttatttgtggcattggcctatagttttttttgtaagctacttatcaattcataatattttagttacctgtattgctattattttatcagtcttgctaggatggttaagttattatttcatagaaacacctacccgaaaaaaactttcaaaactttcgttaataaagtcatattcaatactaatcctcacgactgtttctttaagcttactttatatttatatatataaaaaagatggttttccaaatagagctacagaaaaatatcttgaaaaaacagctcttattagttacccatctcctgaaacaggctggtgtttttatagtgtggataatttagattatttacctgttggaaaacaaggtcttcaatgccatattggttcaaataaaaaaactgccaagtctgcattattatttggggactcttatgcaggacataatatcccattttgggacactgtcggtaagcaaatagatttgaatattaatgcaattagtacaaattggtgttttcctagtttaggcacaaattttactggaccaaagagttcacgtgcttatgaacaatgtttaattaatagaaaattccttaaagaaaatatagaacagtatgatgtcattattcttgcaggaagatgggctgctgtttatgaagataatagccgtattaatgaattgcaaaatttaatttacttaatcaaaaaatccaatatccctttaattattatggattcaccttactactttggtcagaatataggtaatagttataaacgttctatttggttaaataataaatttatattaccaattgctgatgagagtgataaagaagcgagcagagctaatcatgatttacagaatttttcaaaaaaatttgatcatactctttatttattgagggaagatttatatagaaaagataatacagataataatattccctattcatttgatggtgggcatattagtgtctatggctccttagcttcagctaagtttttcttacatacaccaaaatttatggacctaaaaaaaatggttcatgatagtaactaa

SEQ ID NO: 70916 - DNA, 834 bp, Acinetobacter baumannii
gtgattaataaagaagtaattattttaaactctattaaggagttatttgataaagctaatttagactacacaaatttatcaataggttatattgataatacaaattttataagcttttttgaccttaatcctaatgcgtatctttcttttgcaaagctagatttaaaacagaaagatgatcgtggactaattaatgctttatctaatgcgaagagagcaatagattgtttgattgaaaacactttaaaaaacttcaatataaatttaaaaaaagttccaaaagctgccttgagtttttgtgaagatgttttggatgaagacaataaaagtatcagtcctttttcattacgtttgttttgtgcattaggtttatcaccgaacttgcttgtaagtgaagtaagaagtttaagaaataagattgaacacgagtttaatattcccgaaaagcaagatgtgatgcgagcttatgaagttgctgaactgttaattaataatataaaagctaaagaaatttattcttgtaaaattgatatttcagatgttcataagcacggagatttatcatgggataatttttcaggattagtgtttagttcaccttttaggcttagtcaaaaagaaataggatattttggattagaatattgggatgaaaatggatataagtatttatataaatttgatcaggaggataaagaatattattattttcttaaagctatgtttatagctgaatttgattcagaagagttgatatattgtattggaaaaattctacatataattaatcctgaattggatttaggggaaattaatttgaatttaagaggatag

SEQ ID NO: 70917 - DNA, 2286 bp, Acinetobacter baumannii
atgacaactatagataaatatggtttttctgctgatagacctatcactaaattggaagatgatttattaggtcgtgctgaattttctaaaaatttaagtgatgctatttcacaatggaaaggcgatgatagtctagttattgctctgcatggagattggggatcaggcaagtcatctataaagaatatggctttagcacattcaaaacaacaaaagaactcaccaacaattatagaattttcaccctgggaatggtcagctcaagataagattattgaagctttctttgatgaaatatcaaagtcaattggaagaaaaaatacttctaaagaggatcaagatttagcaaatattttctctcgatacggaaatcatctatctacagcccatacccttcttaaaggtgctaatctttcaattccactatttacaacagcaatattaagcacaggattaataagtagttattttactgataactcacaattagtacttcttattactaccttgacatcaatcaccagtttaattttgtctgctactgagaaaggaagtgaactactaggtaagctatcagaaaactatgaaaaaaaagcgaaattaaatgaaaagacattgaaagaaattcgtgaagaactgattaaagctttaactaaaagaaaaactcctcttttgattgttatggacgatctagatcgtcttacagctgtagaattgcgtatgatctttcaattaattaaagcaaatactgattttcccaatgtaatattcttactcttatttcaaaaggatattgtagaaaagaagcttacagatagtactcaatctggtgaaaattatttagaaaagataattcaaattccttttacaattccacagattcaattaaaacaagtccatgaagttttatttaaacttctggataatattataaatagccacatagatgctgacaagaaattcaatcaagagaggtgggctgagatatatcataatggttttaaaaattattttaaaaatttaaggaatgtatatagatttaactctaccctttcttttaattttaacctttttaagaataatgatatctttgaagcagatccaatagatttgattgctatagaatgcttaagagtattcgaaccgaatgtttatagtaaactttctaattcaaaagaagcatttacaactttacgatctagcccaagtgataatcagagccaaaaagcaaaatattcaagaataattgaaaatattattaatagtgcatctgaaataaatagagaatctgttaaagaaattttaaaaaatctatttcctactactcagtggatcattagtaatcactattatgatcatacttcataccaacaatggtttactcaattaagagtatgtcataaagatcattttgataaatatttcaaacttagctttgattccgaagatttttccacatcagattttataagttttcttcagctaactgccgatagagaaaagcttaaagaacaactattaacattagatgcagaaaatatattagaagatttcttatctaaatttgaagcttatagtaaacacatacgtccagaaaatattgaaccatacctctacgcaatgtttgatagtgctgatgaggttaataaagagtccagtaagtttttaggtttttcagcgcaaactcatttatttagattatcctattggtgtttagaaagtattcaagatagtaaacaaagagccagactactaatcaattatattaaccaaaattcaaattttgcaattattaaagatatattaatttcagaggaaaatgcgaaggaaaaacaacaacatcatctgttagagaaaactgatttcgaacaactcaaaaaagattttatctttaaattaaagcagttttccaactcgaatcctgaaaaaattcttctgaattcatcgttcctttcattaatgtaccgttggaaagaatggggagattcttcagatgtcctaacttggttcgaaaaacagactcaagacctaaatggtatcctaagaattctgtcttctatgattcaaatttctcgttcatccagtaatttttatactatatcgaatattaaaaaatacattaaagctaacacagtagagaattttttagatatatcacgcatattaaatattattgatcaagctgatttatcagggctctcaaaagaggaaaaagaaattatagaaatgttcaagaaagggatagaaaataaagctactggtagggatgatagcctagatgattga

SEQ ID NO: 70918 - DNA, 273 bp, Acinetobacter baumannii
atgattaaaatttcttgtctttttgttaatggaaatgttgaaatagaattttcagataatggtaagggtttggacgaaaaatatattgataatcctaatcagatctttaatttatttgaatcatctaaagttgatcagcatggaaatataattggtacgggattaggactatcaattgtcaaaacaattatttctgaatataattctgcatcaattgaaatagttgaatttacaagaggtcttagctttaaaattatcttgaagggggtatag

SEQ ID NO: 70919 - DNA, 540 bp, Acinetobacter baumannii
atgagttttaaattagcatatattgatgagcaagaaacatctattagtaatttctatagtcattttgccgatgattatgaattattaactataaaagttgataaaaactcaacaattgagtcaatattggaagaatgttttaaagctaatgtagatgcaataattactgactacaagcttgaagaagaaggaaatgttaactttaatggagatgctttatttaatgcaataaaaaaaattaagccacattttcctgttattatgcttacttcttgggagccagaagcaattgatcatatggaaaatgttcatttaatttataataaagatattttagatggtaagagcaaggaagaatttgatctttttaattcggaggaagagctaactaagttatatatgttatatgatgagctacatcctgaaggaaaagaaataccttctaatcttatacagaaagaatctattactcaactaaacgatttcttaaatgaagctaaagaaattttagttattttaaaaaaaataaatgagaagtaa

SEQ ID NO: 70920 - DNA, 594 bp, Acinetobacter baumannii
atgaatttcagagaacttacgcctattagacgaaatattacaactccagtttctcactatagtgagcatagagataacttaacaatagattttaaaaaaagatgtggttattgtaatggaataaatctttatagaactgctccttttgaaatcgatcattttataccgagaaaaagaaatagaactatttttcttacaattaagtcggaaactgactattctaatttaatatattcttgtaagtcatgtaataatgcaaaaagtaataaatggcctactgaagatcagaatataccgaataaagatgataaaggttttattgatccatgtgaggaggaatatggaagacaatttagtagattacctaatggccggattgttcctaccactaagttaggaagctggatgctgaaagagcttaaattggacaaacctcaacatgaaattatttataatcttgaacagttagataaaataattgatgaattacaaccacttatttgtgatttagataatatggatttatatagacgtattacgcaattactattaaaatatcgagcttatattcgtcagctgagcgatatccgatag

SEQ ID NO: 70921 - DNA, 1842 bp, Acinetobacter baumannii
atgattagcgttacaaaatatctaagtcaatattccacagttcctattattgttgatagacttattgtatcagcttttctaaaaataaataacttagaaccatttaataatattttacttaaatcttattttattaatgaagaatataaggatgaatataattcattaaatgaatttgtaagaattgttgaaaatgaaattgaattttttaactttgaaaagcttattgcactttttgaatttgttgtttctcctgctgatcgtgtggtaactggtgcagtttatacacctgaagtaataagaaaatatattattcaagaatcgtttaataaatcaaataagttacaaaatactattaaaatatctgatatatcttgtggttgtggtggttttttatttaatgcggctttactattaaaagaaaaattagatttatcttttaattatatatttaaaaataatatttttggagtagatatacaagagtattcaattactcgaactaagttacttttatctttattagctcttcatgagggggaagatgatgttacttttcaatttaatttatatcaaggtgattcattagaatttgattggaaggctaaagttgttgatttcaatggttttgatataattttaggtaatcctccatatgtatgtgcaaggaatctagataatgatacaaaagaaaaattaaaaaattgggaagtatgtaaagccggaaattctgatctatatattccttttttccaaattgctattgaaaatttagcttctgaaggtattcttggttatataactatgaattctttttttaaaagtttaaatggtagagaattacggtcttactttcaaaaaaaatgtctttcttttaatattattgattttggtgcagaacaaatctttaaatcaaaaaatacatatacttgtatttgttttattgaaaataagaaagagaaatttataaactataaaattattgaaagtgccaagctgaataaaaaaataagatatgagagaatttattataaagatttagattttatgaaggggtggaatttaaatgcacataaaataatttcaaaaattgaatctattggaaaaccctttggagagctatatcaaactagacatgggttagctactttaaaaaatgatatttatatttttaagccagtttatgaagatgatgaatactattatctgaacaatgatggtttatttaaaattgaaaaatctatttgtcgagatgtagttaactcgaataagttaagccgcgaagtttcccttgaaaatcttaaagaaaaaattattttcccttacgatcaagaagttaaacccaaattacttgaagaagattttataaaagatttttatccagaagcatataaatatttaaaaaataaaatgcatattttaaaaatgcgagataagggtaaaggtgattatgaaaattggtatgcatatggaagaactcaatctttagaaaaagttaaaaataagatgtttttccctaagtattccgatagagcgccaagctttataatttcttctgatgaggatttgctattttataatggacttgctgtaattggaagttcagatttagagatgaagataatagagaaaattatgggttctagtgttttctggtattatattatgaaaactagtaagccttattcttctaattattattctctgaatggtaattacattagaaattttggtatatgtgagcttaatgaaagtgaaaaaaactttattttgactgaagatcgtaaggaagttttagatgagttttttgaagaaaaatatggtgttaacttaagttattaa

SEQ ID NO: 70922 - DNA, 546 bp, Acinetobacter baumannii
atgaaaataaaaaactacacaccaactaaaggttttatatggattttgcttttactagtttttacagcttgggttgtatataagtatgtacctttaacacagaaaaaacaggaccaaataattaaagaaaaaatagattatcaaaggcgtaaaatagcagaagaatttgataaatacacagctaaagatatagctaacctacaaaaatttgattctcgtaaatattttttaataaaacgtaatggtcgtttttggttaataccaagagagtattatggtgctaatggttttactattagagttatagatatagataaactaatagggaaaaagtgggaaggtaatattgtggtggaaggtgggtttcgagtttttatgtattcaccacaatattataatcgtaaagctgattttttgagtagtgatgtggcatgtaaatcaaatacatttagaaagctttttacgtggaatggggtaattattaatattgatgctaatacctatcctttgaatatattgtattttctcatcaaattattacagtag

SEQ ID NO: 70923 - DNA, 2382 bp, Acinetobacter baumannii
atgaatgaaaaattaaactcattaaaacaaataagtgaatttaatacaataatggggaggctaactttaaatcaggtgttagaagaggaagagctctcttttatattggcttgtgctattatttttctaaaagaatataataaagataaaagaaaaatccaacatttaaattttgcatattttattgctttgaaagttgctataaataataactattatactccattaatggatataagtgtaaatcttggattgtatcctattgttagatatattatagaaaataatttgaatgaaaatttgtcaatttcagatattattttagattctagaatagaaagctttaaaaaaggaaatattgttgaaacatataagcaaaaagtatatagaaaaagtattcttgaaagtgaaaataatgagtgttgctatgtcgcaccaacttcatttggaaaaagctctttaattattgaaatacttaatcagcataagtacaataaggttgctattattgttcctagtaaatccttattgctgcaaacatataaaagtataaaaaataatatttttgataaaaaaataatttttcatgatgaaatgtatgatttaaatatgagtgattttgtagcagtattaactcaggaaagagccttaagaatattaaataaatataaagaattaagttttgataatttaatcatagatgaggcacataacttattaaataatgattataggtctttgttattatctcgtgtaataagaagaaataaatttagaaataataatactaaaattttttatttatctccattgattgaaaatgctgataatttaaagtttgatagagaacaaacaatctttgataatagatttgttgatgatttctactattctgaattttttgataattatattaattatattttaatgaaatctaaaaataagaattttatttttcttaatcagcctaagaaaattgaagaactatcagaaaaaatttgtaataacttaaattttattgtagaagattatgagttaattagccttgctgagatcgtatcgaataatatacatgaggatttttattgtgttgagtatattagaaaaggtttaatatatcttcatggaaaattacctgatttgattaaagaatatttagagtttaagttctctaaagtaaatagtattaagtatttggttgctaatactgtaatattggaaggtgttaatctgcctattgataatttatttatcatgaatacatggaggttgagaaataaagaactaattaatttaattggtcgtgttaatagattaaatgaggtctttaataataaaaataaaaaattagataagcttaaccctactgtgcattttataaatagtaatgaatttggttcaaaaagggggaatatgagtaacaaaataaaattattaagatcaggtcttttattggatgaggttaagaatccagtattattaaactataatcataatgtaacaccagaaaccagtggggaaggcggaaatgagtatttttttgatgatatcaacatagttagagaaaaagaagattttttaatttatcaagaaaatgatccggatgttaaactaaaacatattttaattgagtctgggttggatagtgaatataataattttgaactagcctacagtcttttaaaacatcggattgaaaaattaaaatctactcaagtttggataatggctgatgtcgttgataaaatttatttattttttataaaagagcttgaatataatttaaaaaataaagagttatcacgcttggaaaaaattccagcaagaaatttttatagaatgtttattgagcgattacatactctaaatttaaaagatcatattcaaaaaatgttacaatatttttatatcattaaagataactttgaagagcgatatttttatgttggtaaatcatatggagagatagagcatccaaatgaaatattttcaggttataattctaaaaattatattaatttagccataaaaaatcataaagagttagttaatattgcattaataaaaataaaaattgaaagtgactttgttgcttattctttgaataaatttgttaatgttctgctagagttatcacttattagtgaatctgaatataataaatttatgtatgggactgaagatagaaaatatactgaatttgttcaacttggtttaagcagctctttgataaacttcctgattcgagaaaagcaaattgataatatttttatagataaatacggttatcttaactatcgaaatgaatttattaattttttgaaaaaccaagatgacttagtacagtttgaaattagtaaatttattacttttcaggattaa

SEQ ID NO: 70924 - DNA, 759 bp, Acinetobacter baumannii
atggaaatttataaaattcaggagttaactaatgaattaactcttcatgtaatacatttaaaagactatgatcaaaattttattgagaatttagatgaaaaattagttaaaatatgtgaaggtgattcagatagtagcattgatttagttaaaattagattaaaacagtttctaactggaaaagatataagacaaaaacaaggttctattgctgaattatttgtccatttgtatttgaataataagggttataaacctgagtttcttttttataatttagaagaatcctcaattaaaaaaggctttgatggattctattcaaaagatgataatacctatattgtggagagtaaatctggttcttgtagctctcaagaaataagtcatgaaagaaaaattaaagaagcatatagtgatatcaaaaaatacttgaatggaactaatgataagggtaagaacaatccttggaaaaatgcctattatcatgcaaatttacttgatgtaggaactgaaaaaacaattagaactagaattaaagagttacgtgataactatgatagaaaaatatttagcgaaattaaagattttaatataatgccatgctctacaatttttttagataatatttggacaaataaatggtctgatgattttattgaagatatagaaaaaattaaaaaattagttggtaagtctataaacttaataattgtaacaaagaaaaatttacaatcttttgaagattatttggaaatataa

SEQ ID NO: 70925 - DNA, 414 bp, Acinetobacter baumannii
atgtcaaataatcaaaatcatgataacgatcaatatcacgtaaaattagaagacttagaagtttctggaaacaaaggagatggtgcaataattgaattaggaaaaggtgagcgcagccatatctctagaagcgttttttcaaataatggagggactggtcttgttatcaaaggtaactacaaccccactctagatttattcttagaaacaattaaagacaaactaccacaagaaatatctattgcagaaatcacaccattagtaaaagaattaatagatataaaagatccaaagttagcagaagaaaaagctaaaaaatcacctttgagtgcaaaggtaaaagaatatcaagtttggttttctttcgtcacaacaattgttttgaaagcttgggcagaaatctctaagatgtaa

SEQ ID NO: 70926 - DNA, 759 bp, Acinetobacter baumannii
atgggtacagtaattcgattaaaaaacgtctcaattggtagttcaccattaggtatggtacatgatgagaactattctttaccaaatgggaagatgttgtttcagccaaaaataaacctggctaattctcaggacattcttggaaactctattgtttcggaagtaggggttccgatttatagttctggatatgttcaaggtaaaggcaaaacggactacttaaaaacaaattatgttcgtgatattgctaagagctttactctatgtattgtgggcaaacgtgatgcaacagatggtcttcagttgtttgcaggggattatcacaataacactgatcctgcacgcccatatgatacaggttgcggtatttttggtgctggtgggcatggtttacggccaactctgtttacatctgctggaaacttattttcaagtaacattcctactgcattaaccacagtaactataagtgaatggcattttgcatgtttaagcatcgatattgctaataaattagcaacattctacgttccagaacttaatttaacttggcctgtaagcttcgcctctactccattaaaagcaatggttgctggcgagttctttaatatcgctggttcatctggacttacggttggtgctgacccattcacatcttatgtttcagttcatgagcgtgcatttacagcagaagacgtaaatcgtcagtatcagaatgctaagcaatactgtgcaaaaatgggaattatagttaaataa

SEQ ID NO: 70927 - DNA, 2004 bp, Acinetobacter baumannii
atggcagttttgactgaagaaacgtttcagaaattagaacgtgatattgaagacactggtaaaacgccaaatacagatatggtaattgttcctagatatgggccgccatataaatcatttcctatggtatcgcgggagggtgaagagggctttgcggcagctattcaaaaaatgttagagacggggggctggaattattactcaactgcggctgaattattggcaactagtccgtcagtagtaccttcagtagcatatgcaggtgatacaaaaaaactctataagtggaatggaacctcttggattgatgagggtttaagtcagctagatttggctaaaatttatattgatcaaatattgaatggtgtctcatttgatagcgaagatgaccttaattggttttacgctgtcgttgatcaagctgggcaagttttattcggtatggacttaaataagatcatgcaattcccagttgttcaagcaacaaaattgcaaacagggggaacatcattagaagaaattattgagaccgacctttttaatatactagataaagataacaacaagattgcagcgattgaccaaaatctactggcgaaatttgtttcagtttttgcaggtcaattatctataaaagatatgtcagttgaaacactttctacaactgataaccctttaacacttgtggataaagatggttatatcatcggcactctacagcctgatggcatttataactctattggctcaacgtcttcaggacttgttgggattcaaccagaaccaagaatttacacagattatattcatgtttctgctcaggggcagtcccttatgcttggcttgggttcgggaacacaaatatctgtttcttctgaagcaccaaatgcattagtaccaaatgcaggtattgaagatggcaactggacaagtgttgagggtattgcggggttgccgctgtcttcaacgggattaactccgtttgatccgaatttaaatcctaataagattgaaagtcctctatatgctgcaatgattcatttgcaaaaatctttagacgaacgctctatcgaaacgcaagtcttgggatcaacaaatgctcatggtggtgcgcctattgcgagcctttcgaaaggtacgggtatttatgcagctggtgttgcacaatctcaagcttatagaaattatgcaagtgaagcggggaaaagctgtctcacacaatttgtaatctggatgcagggtgaaactgatatctcacaaggtctaagtgccaatgaatatttgaatcgattgaacaaattgattgctgattatcaagctgacatcgggcaagacttgtcaccagttatgttgacctatcaaactggttctcacacaaggcgttctccgtacttttcacctgatatacctaatattcaactaaaagcttcgaatatcaacagaagtattaaaatgtgttgtgccacttatgttatgccatataacggtggcacagatggtgtccatatgccagcaaattcttatcgatggctcggctcttactttggaaaagtaatggactggatgctagtaaacgaaagtgtagactggaagccggtacagcctgaaaagattgtcagaaacagtcgcgttgtcactattaaatttcatgtgcctgtaaagccactggtatttgacacaacattggttacgaatcctggtaattacgggtttaaggtttttgataattcaaatgttgagcaaacgattgagtcagtaagtatcgtcaatgatgatacggtgaaaatagttcttgcttctacaccctcatctatcgtcactgttaaatatgcccaaggcgtcaattgggctatcgctgggcctacaactggagcacgtggcaacttgcgtgattcagatccagccgtttcaaaagttttagatattacaacagggcagccattccctttacaaaactggtgtccaattttttcattacaggaaggcttctcatgggtacagtaa

SEQ ID NO: 70928 - DNA, 2829 bp, Acinetobacter baumannii
atgagccgaatttatatcattaaaaactctttagaagagcatgtaaaagaaacggttgaaaccaataatattttgcatactttcttgagcgaaagagctaagcatccccaagctagaatttacaagggaaatccttgtcctgaaaatgatataacgccaacaacagcggatatgtcatctattgctcgtttattggaaatagcagacgaatgtacgattgttcattatcctggtgaattatcctcaacagtaacatggattgcatcaaagctgttgggtaaaggtatttcagcattagtaaaagtacctaaagctccaactacaaataatggttcaatgacgggttcaagtaataataatttatcgaaccctgagaaccgccagcgcataaagcaacgagtcccttatattttaggcgctccaaaagctataccggatttatttgcacctccatatcgatatttcaaagatggagttgaagttgaagagcttttgctgtgtgtttgtgaaaaccctgtaagactctctcaatttaagaccggtgatactccgattcaagaaataccaggaacaagtttgtcagcttatggcttaaatcaaagtctggttggtacagaaacaatttttaaatggggtgatacatttactgaagcaccagtaattgcccgccaaaatgaatcgattaatggtcaaacagctttgccgccgaatagtacgcgggtagaagctggagatatttattttcaatatccgaatatgattaaggctaatgaccagggcacagcagatcgatttaactcattcaatattaatgagtctttaattataagtggtgcaaattttggaattggtgatttgtctataactggtcaagtaagtgtagaccctgcaaatgaaaccttagcaatcgaatcgactcaaaatgttttggattatcagaactaccgaaaaattaatgtgacttcattacttgtcactgatccggtaaatgagcagcttgatttagctgggttgtatgatattgattcaatcacatatgcatctaatgtctatacaattcatttgaggaaccctgtagccacaaacaccaatttctcaaaagtaacagagttattaacttccacaatatcggcaaatttgacagcaaatacagcaaacatctttttagatggtgaatatgttgtgactggtgtagacacaagcaataagcagcttacattagcaacgcctagtggtgtaaattctgattggaataagcttgctgatttagagggacaaaagaccagtacgggcaatataaagttacgtggtagtcaggataactggattggctggtttacgattgattcacctaaagcaacaggacttttgctaaatttccaggctttaaacggaatttatcagggagcagatgctaagtttgtggatatctatgttgaatatcaacaaatcgtatcgggtacacctacaggagttgtttttaataaatcaatacgtttaaacggaaaagcaaataaccgagacagtgtaggcggttcaatgtggattgatttaccgtttactggagctgtgcgtttccgagcaagacgaactaatgataatggagatgctgtagatttatctgacgaagttaaattctatacggcctacgcatatcgttacttgtcaaaactggtttatgacaaccgcgtattaatacgccaacgtacacaggccacacgtgctgcaactgctgttgatacgagacaaacaaactgtatcgctgaaagtttagtctattcatatcgtggtggtgttaaatctgctgagcgtatcccatctcgaaatattgctgatttatgtattgatatagctctacataagcgtattggtcgacgttcattaaaggaaatcaatactgaagaaatttatcgtgtatttgatgatgttgttgaatactttggctcagaaaaaatggctgaatttaactacacattagacaatgcaaatcaatcatttgaagaaatttgtcgaatgatggcaggtgtatccggttgcaatgaacgccgattaaatcgagagctttattttgattttgagaaggcagggcggcaaccgatattgttattcaatcaccgtaataagaaggctaaatcagaagttagaacatataactttaaggttgagaataattatgatggtgtcgaaataacatatgttgatagtgaagcggggtggattgaaaagactttgaaaatcccgaatgatcaaatcacgaacccgaaaaagctcgatggctatggaattgcttatagagagcaagctcatattatcggctggcgtgcctggaataaactgaagtatcagcgagtcaattgtaagtttgactgctttgctgaaggtgagctaacagaacgcggggacccaatcattgttgttgatgatacccgtttgtcacctattaccctaggggatggttcaataacgtctggagaaattacagcgtggaatggcttaacaattgaaatcagccagccgtgtactttgacagcaggtcatgattatgtgattcatctacaaaagaaaagtggttttactgatcagataccagttagccagggcgcaagtgagtatgagctaattttggcacgtccaccgcttgaagctctagtaacagaaggtgaagttaaaacagtttattcaatcactgtagacgatcggcaagatgaagagttatttctcgtctctaccaaaaatcgaaatggtgtttttgaaaattcgatatcagcaaccaatttagatgaacgttattatcaaaatgataaagacatcatcaagaacctaatttaa

SEQ ID NO: 70929 - DNA, 471 bp, Acinetobacter baumannii
atgctttgcccattacaagaggggtatggatttgaaccaggtaacaatataagagagcaggaaaatgaagggggcatgccaaggcaagttcccttttttgttggtgctgtccataaggtaaatgtaactgtacttctcaaaagtgaggaggatcggcaatatttttgggcattctggtggactaagcaacgtgagcctgaaaattggaagtggaaactatctctagatgatggaaggtcagaagagtgtgagtgtcgattcctatcaactggaagaccctcagagacttttcgaaatggtgtactaatcaaagtaggatttcaggtagctgtaaaaccgagaaaacgaaatgccgatctagaccggaatatcgttaatgtacgtcaaggcgttgagtcaatgggagttgtcgatgacattgaaaaagtgccgaatgaatggctgccggatgcgttgggagtaaatcaatga

SEQ ID NO: 70930 - DNA, 2889 bp, Acinetobacter baumannii
atgtctataaagttgggaactttaacccttgatgtttttgcacgtattgggaagtttgttcaaccactcaaagaggctgaacgtcaggcgaaaaattctgcaaaaactattggtggaagtctaggaggaattggcgatattgcctcccgtgcagcaccaatggttgcaagtcttgcgggaactgtaacaggtctagttgcttcatatgttactttggataatgtaattaatgcccagagaacttatgataaacaaattgctggtttggaaactgccacaaagtccgctgaaggtgccaaagaggcttatgcggctttaaccaagttcgctgctgaaaccccttatggaatggaacaagcggttgagggttttacaaaactagtaaaccttggtttgaccccttctgagcgtgcattacgctcgtatggcaatacagcgtctgcaatgggtaaggacctaatgcaatttattgaagctgttgctgacgcatcaactggtgagtttgagcgactaaaggaatttggtattaaggcaagtaaagaaggtaatcaggttgctttcactttccagggtacaactaccaaaattaaaaataatgcagctgacattgaagagtatttaactaaaattggtgaaaatgaatttgatggcgctatggctaaacgaatggatagccttgatggttcatttgctaatttagaagattcttggactagtctttatttatcaatttctcaagcaggtgttggagatttagttcgtgaaggagtcgatactgcctcagatggggttcagggtttaactaacttaattgagtcaggagcaatacaagcaggtcttggtggaattgcaagatcatttaccttgttgggtaatgatgccgatgatgaaatgaaagggattgctgaagcatttggttttacttctgaatatatggtgaagaaatgggaagctactatttcagagctgaatgcgataggcaatgcatggactatgatgcgttcatgggttcagaaggctaccgtttctgttgcagctggttgggacattataagcgaccctttcaataaagaatcctcaaatgcaaccaaacaaaaagtttggcaagattcaatggctgcaattgatgctgatttaaagtctagaaaagattctgttcttaaaggatttgaagaagctgaaaaaaaatatcaagcttatatagcaaaacagaagtctaatcaaaaagatactgctgatgctttggctaaatataagattgctgcaaaaaatgcaggtgatacagcttcagattcaactgaaaaagcaaacaaagcattggaaaaacagaaaaaacttatagaaggtttgggttctggttttgtttctaacgctaacttaaagggtttaaatcttaaaggtgctgaatcaattgcgggtgggcaagtaagaggttatacagccgaatttgctcaattggctgatagtgctttgggtagctcgattaatcgatttactgcttttaatgatagctatcacaagggaacaaatagcaggcatgcaacagggaatgcttttgattttacgcttaatgatgcaaaacaagctgaacaagccgtaaaaattcttgaaaatgtggcaaagcgttatggatatcaggttaaagttttagatgaatattcaaaaccatcggccagatcgaccggcgggcatttacatgtttctgttctggggaaaaatgcaaaagaaacttggaaggatattcaggatgaagttgcattaatcggaaagggtaatgaggaagctattcgattacagacagaattggatgaaaagcggcttgatatacggcagaaatattttactgaatctgagcgcatcgaatatgagaattctgaagcaatcaaagctattaagcttgcttatgctggagatgatgaagcgacaaaaatatttttaaataagcagcaagaagcttatcaaaaggatattgacgcttttcgtattgctcaacagcaaaaatatcaagatgcggttgaagaggcagcacgtgctacttcaaactggaatagatcatatgcagatatgactggtggtggggaaatttataatcttcagcagcagagaaatagccgttacgatgaatcatttgctgtttttgattcacaaagttcggttcttgatatgcaggagaaagaccctaatgccgatttgttattgattgctgagcagagggaagccttatggcaagaacatacccaacgtatgttaatgattgatcaagcttatagtaaagataaggctctgctcggattacaaactgcaaatgaaacactgagtggtatgacagacttaacaggggcgttgcttggtgagcaatcagcggcttataaagctatgtttgcgatgtctaaagcttttgctatagctcaggctttgatgaatgctcctcagacattttcgaatgtatatacctctgtttcggcaataccactgattggtccatatattgcgccagttatggccggagcggctgtagctttgcaagttgctcaagcaactcagattaagtctgtaaatctgacaggtatggcgcatgatggtatagataatgtgcctaaagagggtacttggttattagatggaggtgagcgggtacttaatcctcaacaaaataaggatttaacaaaatacctttctgataatcagcgtggtggtggacttaacgtaactgtaaatactttaccaggaacaacagccgttgttggtcgtgatgcaaatggtggggtaactattgatattgttaagcaagaggtattaaacgcttttaccagattaggtacggaagcaaatagttatgagtctgaaatggtgcaacgcggttttgtagttgaacgtaatagggggtga

SEQ ID NO: 70931 - DNA, 504 bp, Acinetobacter baumannii
atgaaaaaaattctatttgttgtattgggtttgattagtttgaatgtaaatgctcaacaaacacaaataaaagaatatgtagaagttgtagaaattccgaatatgggaaaatctcaaatttttaatgcaacaaaagtatggattgcaaaatcctttaattctgctaattcggtaattcagtatgaagaccctgcaactggttcaattataggtaaggggaatatgaattttccatgtcaagggacatggaattgcttggcaagaaaagatgacattcttttattcacactcaaagtagatactaaagataataaagctagggtttcttttaatgatatgagtgtaaaaataaataccaaaggtactacaaaatttgttccaattgggcaagaaattaatacagttaatgaaaaagatagtgaactaattcaaactgggttaaagaatattgttcagaagtatgtgaatgatattcagaaggaaacattaaattctgattggtga

SEQ ID NO: 70932 - DNA, 129 bp, Acinetobacter baumannii
atggcctgttatacgcgttataaggttgaaaaaggtgtgatagttgatgcgtatgattttatgccgcatgagacggctccagttgtgacttttgagcaagctcgattattggcgatacgaaataaataa

SEQ ID NO: 70933 - DNA, 438 bp, Acinetobacter baumannii
atgactaaattaacacttgcaggaactcgtgcagttctaggtattggttcatttgtccagaagacaattgaattttgtgataaagaaggcaatgaatatagtggtcaaattcagatcagaattttgtcccatgatgaaatcaaggatgctcctaatgtttggggtgtggaggataaaaaacagctaacaatagatcagtttcaaaaagcccagatttttcatgcagtttattcaactcctgaagaaaagttctttagtgaaattaatgaaacgggaacactttctactgaagttattgaagcgatgtataaagcagtagatgaggttcttgatctagggggaaagaatcgaatcttagtgaagaagaagagttctgggcagaacttgttatcaacggaatcggtggacgaaccattgccgaagcccgaaacaacataa

SEQ ID NO: 70934 - DNA, 483 bp, Acinetobacter baumannii
atggcaacaactaaaggtgttttaacacaaggtactcatgtttggcttttacatggtacacctgcaatcctatctcgaatcttatgcgtaaaaacgattgcatggggtgatgacagtatcacagatattgcaagcacatgtctggacgaaccggatacagcaacttctgaagatggtttaaatacgccaggtgatggtagttttggaattgacactgatcccaaaaatgcaactcatatgcttttgcttgctgcggcagcagcaaaagaggtagtgggaatatatgtcgggtggtctgatggaactggagaaccaactttagcaaatggagttgtaactttgccagatacaagaacatggtcttatgcaactgctcgtttacgtaaaaattctgcggtatttgatcctgattctttggtgaaccataccattccatttaagcgccaaacagaagtaattgatgagttcaaggtgattgcataa

SEQ ID NO: 70935 - DNA, 363 bp, Acinetobacter baumannii
atgagcttcttacctatttttcgtatcttagaggatcgtcctgatatcaaggctatgcttggtgagaatttgcgggtttatgaagatatagccccggttggaattgttccgccttatgctgtatttcaggtggttggtgcttcatcaattaatcatttggatgaatcagcaaattttcatcatgtcatgtatcagtttattgtctatggcacatatccgagagagacaaatgatatcaaagatgctgtgttgcgggtgctggagcaatacagttacatccttaatcctttacttaatagttatgagactgaaacaaagctttttggtcgaggctttgacgcaaattggcttttaccaagataa

SEQ ID NO: 70936 - DNA, 471 bp, Acinetobacter baumannii
atggaaacttcagttgagtttactggagtcgaagagttatcccgtaaattagacctgcttgctgatccgaaaatagctcgtcgtattgctcgaaaggcggcaaggcagggtatgaatatcgtcagagattcagctaggcagcgggcaaaattaattgatgatcccgatactagagaaaggatctggaaaaatattattactagtggtggtaaatccaaagatttaaatacgattgtaatgcgtgtaggtatccgtggaggagccgcaatgaatgccaagtctgataggcaggcgttagctggtttgtcaggtggtaatacaacttactggcgaatgattgaatttggtaattctcatcaacccgctgttccatttatgcgaccagcattagcagaaaatattgatgctgttaccaataaattttccaatgttttccttgaagagatagataaggagttggcgaaaaaatga

SEQ ID NO: 70937 - DNA, 342 bp, Acinetobacter baumannii
atgcttaatgctggtgagttacgtgatcgtgtcattatccagcgttttaatgatagtggccgcgatgatgatggatatcaaatcccatctggttgggttgattacaagactctttatgcaaaaataactcctttatcggctcgtgatttattcgctgcacaagccgctcaggcaaaaacgatagcccgtatgaaaattagatatcgaacagatattgaaacaacaatgcgggttatatatagaggcaaagtttatgctattgatggtccagccttggatgatgctgagacaggcaatatttattctacttttttgctttcaaatggtgttgagcgattttag

SEQ ID NO: 70938 - DNA, 219 bp, Acinetobacter baumannii
gtgagtggattagacagcgaaaagaaatcgcaagacttaaactgcaattgttgttgcagcgacttggttctggaaatgctaaaaaatcaacacatgttgatgaaagtaatgaacaatcaaaatgagttgttggttcaaattgtaaatcaaaacagcaatttaattactttaattgaaaatgagcaagcagaaccgaaaaaatctcaaactttagattag

SEQ ID NO: 70939 - DNA, 288 bp, Acinetobacter baumannii
atgccgctgacagtgaatgatgtagcccgacaccttaaatatgatgaaggcagtgctgatctggatgatttacaaagcttgcttgatgcagctgagcaggctgtaaaagatcatgtgttgagtaagtacgatgcagaaaacaaagctcagcaacgagcaattttattgttgtgcggttattacgataaatatcgaaatttagagggtgaaatgccgactaatggttttttcctaccgcaacctgtattggtccttcttaatccatattacgtgccattggcgatttaa

SEQ ID NO: 70940 - DNA, 1269 bp, Acinetobacter baumannii
atgggatttttaggcaatattttccgcaaaaagtccatttcgcccgttactggctctggtggttggacttcagtagtaagtgaaccatttacgggtgcttggcaacgaaatatggagttaaagcgtgaagatttgctctcatttcatgctgtttttacctgtgtttcgttaatttcaaaagatattggaaaactacctttaaagctttgtaaaaaagaaggtgaaatctgggtccctacaaaagataagcgatttaagtttcttgaaaagcctaatcgctttcagacaatgcaacaatttttggaatactggattatttcaaaggtaacgcgtggtaatacctatgttttaaagtttcgggatgcttttggtgaaatcattggattaattgtattaaatccagatttagttaaaccattggttagtgaaactggtgaggttttttatcaaataagtattgataaattagctcaagttggtcagtccataattttgcctgcttcagaaattattcatgatcgatggaattgtttttatcatcctcttgttggtttaagtcctattgttgcttgctcattggctgcatcccaaggtattgctattcaaaagtatggcgctagtttctttgcaaatatgagccggccaagtggtattttgaccagtgctggaaaaatatctgatgacgacgcaaaaaaaattcgagatgcttggaaccaaaattactcatctggaaatgtaggtaaaactgcaattcttgggggtgacatgaagtatgtaccaatggcaattcccgcttctgatgcccaaatgattgagcaacataaaatgagcgctgaggtagtctgttctgcatttcatgttcctccatttaaagctgccattagtggcctgcctcaaggctataaagttgaagatataaatttagtctattacggtgattgtcttcaaagccctatcgaagctattgaaaaccttcttgatgatgagctgggtttaaaagagctaggttatgaggtctttttagatgtagaaagttttattcgcatggattcttcatcaaaaatggacttttacaccaaaggtgttaaagggggtgttattgcacctaatgaagcccgtattaaattcaatcttaaacctgtggctggtggctggtctgtttatatgcaacagcaaaacttttcattggaagctttggcaaagcgtgattcaaaggatgacccatttgctaatagcaaaggaggcaaaaatgccgctgacagtgaatga

SEQ ID NO: 70941 - DNA, 219 bp, Acinetobacter baumannii
atgttagttgaatatctcaaagatgcgccattaggaaaaaagggtcagattgcaacagtgctggaatatgaaggaagagttcttacacttttgggttttgctaaaaaaattgatttgttattaaaccaaagtggtgaagctgtagttgatgatttcggttcattggtcgttcttgacaatgaagaaaagcagactaaaaaaggtaaaaagggaaagtaa

SEQ ID NO: 70942 - DNA, 1338 bp, Acinetobacter baumannii
atgacgcttgcagaacaaatcgcagtaatcaaaaaatctatcaatgaaaagatggatgagattgtaaaactatcaggtgcttcaattgaaaagggggtaacacctgatgaagaaaccgaaaataaaatcaaaggcattcaaggcgaagttgatgtattaaaggcaaatttacagcgtcttgaagaaattgaaaaatcccaaaaagaatggggaaaatctacacccgtaaatggtcagacttcaaaacaaggtaaagactcagcaggtggtgtgattgaagtagttgaaaatttacctaaaggtatcggccttgcaatgttggtgcgagcaaaagtagcttcacaacaattagcaaaaaatcatagtgaatatgtaagtgcaagtgatttactcaaatcatgggatgctccagaacgtgttttaagtgttgctaaagcagtggtaggcacaacaactagttctgattattcagctttagtcaactctcgggtcttggctacagaatttattgatcttttacgtccgcggacaatcattggtcaaatgactggattccgaaaagtaccttttaatatcaccgtcccaactaaaaccagttcaagtattgtaaattgggttggtgaggggcaaaaaaaaccagtcactaatctctcatttggtaaaacaagtctgaccttcgctaaaattgcagggattgttccttttacagatgaattgggacgtttttctgatcctaatgttgatgaaatggttttgcgtgatttacaggatacgattcttgaattcatggatgatcaatttcttaatccagcaaaagcagaaactacagacagccctgcttcagtattgaatggggtggacaaaatcacagcttcaggtgtgacggcagatgctattcgtactgatttacgtaaacttcgagccaagttaatctctgcaaatgtctcattgacaggggtttattatgtgatgagtgaaactatggctagtttcttatcagacttggttgatgctttgggtaatccaatctttaaaggtatggatgcgccagttggggagaaaactttaaaaggtctgcctgttgttgaatcagagaaagctggaaagtggatcgcattagttaagccttctgaaattttattagccgatgatggtggtattgatctctctgtttcaacagaagctactcttgagtttaatgatggtacaaatgacgtatccgtcaatttatggcaagaaaacatggttggagtgcgagctgagcgttatgtgcgttggaaaaaacgccacgctaatgcagctggctacatcgattattcagctcaaacaattgaataa

SEQ ID NO: 70943 - DNA, 606 bp, Acinetobacter baumannii
atgaagcaagcctatagtttgctcgaaatcaaagcagttgatgaagagcaatgggtgcttgaaggaatagcgacaacgccaacgccagaccgtgttgatgatgtagtagagcctaaaggtgctcaattcactttaccagttccatttctttggcagcacgataaacggcaaccaataggacaggttactgaagcaatcgttactgatgcaggaattcaagtcaaggttcagctgactaagcctgatcaggttgaatcagaaactttaaaagcccgccttcaggaagcatgggacagtataaaaactggcctagttcgtggcttatccattggttttcgtgggcttgaaattgctgatattcaaggaacatggggctacaaatttattaaatgggattggtatgagctatcagctgtaactattccagcaaatcaggaggcaaccattacagggattaaaactttatgtggtaaagctcccgaaaaaacaccaaatgagccacaacaaaaaactttgccttgtgtgccacctcaacctgttgttccaacgtcaaagcatgtcgttgtgaaattgtttaatgaagaatctcaaggagtaaagctatga

SEQ ID NO: 70944 - DNA, 1689 bp, Acinetobacter baumannii
atgtcttcgatgtccccgatctggagtacagcttgcccagattgggaaaagaagattttagcaaaagaatctttaattgcctgtaagccgttatttccagatgaagccgaaatggctttgcgtgtttttaaagaattaatcgttgtagacgtagctggtaaaccaacaattggcgaaattacggctcagtgggtttttgatttcgttggaactatctttggtgcatatgattatcaaagcaatcagcggttaattaatgaatttttcctactcattagtaagaaaaacactaaatcaacaatggccgcgggcattatgcttactgctattattttaaatagccgtgaagcagctgaatttattatcatcgcacctaccaaaaaggtagctgacaactcatttactccgatgaaaaacatgattcggaatgaccctgagttaaatgctttatttcatgtagctgagcatacaagaacaatcacacaccgaactaccaaggccgttttgacagttgtagctgccgagacgggttccagtgctggcgctaaaggtgcatttattttggtcgatgagctttgggtgtttggtgagcgtgcaaacgctgagtcaatgcttgaggaagcaacaggtggtatggcttcattccctgagggctttttaatttggttgtcaactcaatcagataagccaccagcgggtatatttaaaaagaaattagattatgcccgtaaggtgcgagatggggaaattgaaaacccttctttcctgcctgttttgtatgagttcccacaaaaattgcttgatgaggaaaaatatttagaccctgattatttttatgtgacaaatccaaatttaggacgttctacccatattcgttatttattaaacaagtatgagcaagcaaaagaaagtggtgcagattcaattcaattatttttagctaaatatttgaatgtcgaaattggtatgaataaacgtgctgatagctgggcgggtgccgatttctggttgctctcagcttataaagacaagcttttcttagaatccattcttgatttgagtgaattgtgtactgttggttttgatggtggtggacttgacgacatgtttggcatggcgatcattggtagagataaaaatgatcgatcattatggtactgctggaaccgtgcatgggttcatccaattgcattaaagcgtcgaaaagaaaatgcaccagcttacgaggactttgagcgagatggtgatttagtcattgttaagaatgtcggtgatgatgtgagccaagcagctcaaatatgtaagcgcatttatgatgctggaaaattccctgaaaaagctgcaataggcttggataagttaggtatgccttctttgcaagatggtctattagagcaggtgccatttgaattattaataggcgttccccaagggtatcaattgtcgggatatgttcaaacaacagaacgaaaagtagctgaaggaaagtttaaacatgctggacaacgcatgatgaactggtgcgtcggaaatgctaagggggtttatcaaggtaacgccttgacgattcgcaagcaagaatcagggaagggaaaaattgaccctttgattgcaacctttaacggggttgctttgatgtcgatgaatcctgagttgcctgtgcaaagtcatcaagtattttttatataa

SEQ ID NO: 70945 - DNA, 462 bp, Acinetobacter baumannii
atggctttgactcaaaaaaagaaagcttatgcccaagcaagattgcaggggaagaaaacaaaagaagctgctgtgttggctggctattctgaacgctcggcagcggctaaaggaagccaattagaaagcgatcccgatgtagttgcatatctggcgagcttgaattctcaggggggcggggggctggacgctacaccattaggtgaggcagccattcaagctgagtttttagcgatggagaatgtatcaaattccttggagtttttgaaaacaatttacaaaaatccacgtattgacagaaagatgcgaatagaggcggcaaaagctgctttgccatatgaatttgggaaagtgggcgaggatggcgttaagaaggtccgagataatgaggccgatcaagtatctaaaaaaagtaaatttgcaacagcagatgaacagcgtaaacaacaaagagtgagttga

SEQ ID NO: 70946 - DNA, 183 bp, Acinetobacter baumannii
atgattgaagaaaaatcaatagaacatatggtccaagaatatgttgttgcacatataaaatcgggaaaagcgattcagcaggcagatgtacaagattactgttcgttagcagctgatgtgaaagcagcagctaagaaaacacagaaagctatcgttgaagatgctagacgacgaacttggtag

SEQ ID NO: 70947 - DNA, 207 bp, Acinetobacter baumannii
atgttgatgcatgaacatctaattcatcgtgatgaatatgcccgccttgaagaaattctaaaacatttcaaggaagctacggcttctgaaaatcaggaagagggaatggttgtgactatcggtattgatcatgctcgaccagttccactaccaaagaacataaagaaccgactcaaacgtatgcgaagaaaggcggcaggaaaatga

SEQ ID NO: 70948 - DNA, 540 bp, Acinetobacter baumannii
atgaatatagctgttaaacaggatgagttagtacgtcagcagtttgaatttgagtttgctccagttcggcacttgcttgcatatgtatcttattcaaatcaaatgagttcatatgtacccaaaggaagtgacgaggaatcaagaatagctgcatcacttgtcaatattgcttggacttcatggttatatcagcaagctaagattaatgctaaagacaagctgctaatccagcagggccaagcatacaacgagcaaagccagaaggttaaagacttggaatacaaactaagtttagattttgagttggttaatcctgatgctgtgcttgtcttagcaagagttaacttctgtaagttccatagtcatgaacaaatgcgaaacgagttagaccatctgactaaagcttttaagaaagcaggcaagcaagtcattgtgtttgattcaagttattcattggaagtcatgactgatgagcaactgaatgatgttggtttaaaaagaataaatagagttgatggaggtcaacatgttgatgcatga

SEQ ID NO: 70949 - DNA, 309 bp, Acinetobacter baumannii
atgagactacctaaacttggttcctcaaacttaccaacgcttaaaagcaatcatgcgaccttaccaaagcctgaaaagaattatggcaagggtcgtggtggtcgttcttggcgtcgaattaaacggcaagtgcatgagcgtgatgactggacttgctgtcactgtggttgcataaccatggaacttgagtgtgaccatatcgtgaatactgctcaaggcggtactgatgacttggataacctccagtcattgtgcaaaccatgtcatgacaagaaatcatttgcagaaagcaaggcaggtatgcgatga

SEQ ID NO: 70950 - DNA, 222 bp, Acinetobacter baumannii
atgtttgatgaagaagtaatgttgctgggagacccagttgtataccgcgacgacatcaaaggttttgaagatgttggtgtagttgttcaaacaggatcatgtttcaaggtgctgtggaacggtgaacatcatccacgcgttcaagtctacggtcaacttcgcttagccgatctggatgaagttgaggcagggcaaaggattataaaaaatgagactacctaa

SEQ ID NO: 70951 - DNA, 360 bp, Acinetobacter baumannii
atgggccgaaaagaccgtgaggaacattggagacatcaagaagagatggcggctaaagccgataaggttttggagcgggccagcaagaagggaagcaaagagaaaacttggcgcggtgctactgctgagtttatctcaatgaatgaatgttgcagtgattgtgcccgtcgaggatatgtttctgtagccgacaaagtagcccacataacagacccgaaaacagatcgggttttattttgggataaaagaaattggcgaacgttatgctccagttgctatgaacgagttatggcagaaacacctttggtagtactagagccgatttcatctaaggctgaattgtttatggttgaggattga

SEQ ID NO: 70952 - DNA, 465 bp, Acinetobacter baumannii
atggaaaactttatacggttgttaaatcctaaaactgtgaattatgaagcgattagagtggataacaccagaccgctatacacggctcaggatgtaattttggcaattagttatgcaaaattgacaaaaatgcagactattcttttcggtatgtacgcgctaaatgcttatgaagattctgaaattttagaattgattcatccaatatttaaattaattcatacaggtgaacaaattacctttgaagaaaagcgagagaaggcattgttaattgcattacttgagttatgcaaggttccagctacttacaagccaagtgagagaaacagagctgtattagcaggcgttagtcgtatgcaagtacaacgttatttgaatgagttagcggacttttacaaagaaattttggaaaatgaaattagcaaggcggttcgaaaaattgaggtagcattaaaaaatcactaa

SEQ ID NO: 70953 - DNA, 390 bp, Acinetobacter baumannii
atggtggtgataatgttccaatgcctctataaatataaaaatcaaggctttatgtgtaccttgtgtacctttatgtgtaccatcattaacaatggtacacgtctgcaagccttatatatcaatgcttctaaacaaatgtgtaccgtgtgtaccatttgcgcacacgcgcgtatacgtaaaattaatattgatattgtattgactactttcaaagtacttcttaagccaacactcaaaaagcattctcacgtaagagaactttatataaatggtacacatggtacacatttaagtgaaagctttatatataaaggctttccagtgtttaccttttcaaaaaatcataaacagattgtaaacatggtacacaatgataaatataaatggtga

SEQ ID NO: 70954 - DNA, 2751 bp, Acinetobacter baumannii
gtggctctaaattttgatcaagtaagagatgcagcccaaggccgatggaaagaagtgatttttccagcatttgcaattcaggttcctgccaaaaaaaatcaacatgggccttgtccaatttgtgggggtaaagaccgttttagatgtgatgacaaacaaggtaaaggtacgtggatttgtaatcaatgcaatgctggggacggttttgcactaattgaaaaggcacggaatatggattattcagccgtgcttcaagaggttggtgcgattttaggtttatcgaaggatgcaaaaataactgaagctgatcgtgagcgttggagaaaaaaggctgaagctgatcgtttaaaggcggaacaagatgagattagagcaaatgaagctgctgcaaagcgtgctgaacgggaatcaaagtggcgtagttttgatcgcgattgtccttatttagaacgtaaacaggttaaaaactttgggtgtcgaatcaatgggaacggtcatttaattgttccactttttgatataaatgggaaaatttggaacctacaaacaattcatccagatggctttaagccgtatttgaatggaggccgaattaaccattgtttttatatgttgggccaaattgttgaccctcagcaagtgatttgtattgctgaaggttacgcgactgctgctagcattcatgaagcgacaggttataccacagtagtatcatttcaatcgagtaacgtcgataaagttggtatagctattcgaactaaatatccgaacgctcatatcgtttattgtgcagatgatgatagtcatagcaatcctccagatgcaggcttaaaagccgcgaataaagctgtggctgccacaggcgggcaggtgatcttacccgactttagtgtggttaacagcaaagtgggtcatgacggtacagcggggcagccgcaagcatcatcaaaacatccatccgattttaatgacctgcatgtattagcggggttgagtgaagtgcgtaggcagatcgaagagaaattgaattcttcagatcatgttgccagtcctccccgcacccctcccacaaaagcaggccaaactttgggtgaaatgtatggggataatgtggagcaagttggtcaagttgttgatttaaaagagaatgattttaatctcgactttgctcctcctatgaatgggaggccaaaaactgaaagtgctaactcaaaagagatggccgaaataatagaatttgagcgtcctgaattttcattggagaagtgcctaggccgatttatgttggttgaaggtaaaactgacatatgggatgactataaaaagaaagtaatcaagtccttagcttttacaaaaatggtcggtaaatctgtagccagccgttggcaagctcacccgaatcggaaaatgatagatgctgatgctttgaaaaggcaaattgatgatcaaaatgcaaatgatgcaactgatttgttaagtcgctttgtgcatttggagggaactttagaatcatgggacacggttaatcgtgagcgtattaaaaacattgcgattaaagaggcttatccaaattattatgaaatatgggccaagtcgccacatcgacgtatgattcgtcacgtggacttagtttttgacccgaccaactccacaaaagaacatcaaattaacatttttacgggtttagaggttacggcattaactgatcctgattgtccagatcaactgttaccaatcaaggatgcctatgaaagatcaaaaagttttatcgatctacttcgtcatctttgtggtgaagaaaaggctgctttcgcatggttattaagatggcttgcttatcctttacagaacaaaggggcaaaaatggctacctctgttttaatgcatggaaatattcatggtgcgggtaaatcattattttttggcgcagtcatggagagaatttacaccatttaccacaaaacattagatcagcgagacttagaaagccaatataacgactgggctgagcaagttctttacctgctgtttgaagaaatttcaaataataaaaccaagcacggaatgatgggttttattaaacatctaattactggaagcaccttatctattcatcaaaaattcttggcatctatgcgtcaagccaatcatatgaattgtgtatttttatcaaatcatactcaacctttgccaattgaggagaatgatcgacgttttttagttctttaccccaagtctactttaccgcctgaattattggaaagagtagcacgtgatttgcaatcaaaagaagctatacaggcgttttatacggcacttttacaggttgatttaactggatttgatgcccacacaaagcctccaatgactgaagcaaagcgtgacatcattgaatatacaaaagcaggttatgacacgtttgtgactcaatggattaagggggaaactgaattcccttatgtgagttgtacatctatgcaactttatgatgcataccaaaagtggtctaaacggactaacgagcatatcgtaagccaaaagcgatttatgggtgaggcaaagaaatatgggattgtttccactccagaccaaaaacactggcgtatgcccaaaggcaaaaaaggacaaactaaagtaattatggttggtttgcctcctgataatgttccgttgcaggattggttaggtgaacaaatagataaatttgacaaggcgttcgatggtggtgataatgttccaatgcctctataa

SEQ ID NO: 70955 - DNA, 891 bp, Acinetobacter baumannii
atgagtaaggtttgttttattccgaaagaatttcgacgtagttcattagagttaatccattttatgaatgaattaattgggtcatatcaacgtcaaggatatgtacttactgtacgtcagctttattaccaattagtggctcgtgacgtaatctcaaatgatttaaattcttataaacgtgttgctgcaatgataaatgacgcaaaacttgcaggattaatagattgggacgcaattgaagatcgcacccgtgattttattgttcgttcaagttggcgctcagtttcaagcattcttgatgcatgcgtaagtagctttcatatgaatatgtggcaagaccaagctaatcaggtatatgtaattgttgaaaaagaagctttagtgggtgtgctggaacgaacttgtaatgaatatgatgttcctttattggcagcacgtggttatccgtctagttcggttttgtatgattttgctaaaaagcatattactcgtaagcctcattggaagagtcacaccattatccatttaggtgatcacgacccgtctggtttagatatgacacgcgacttatcagaacgtattaatttactgactggtggagagcatcacatttcaattgagcggatcgcattgaattacgatcaaattgaagagttgcgtccacccaaaaaccctgccaaagattcggactcaagatttgactcctatcgtaaaaaatttggaacttcaagctgggagcttgatgcattaagccctgaatttttaaacaaccttgtttcatcaaaaattgaagagtttattgattttgatgaatgggaagttcggaaagaagagattgaaacacgtaaatctcagcttcaggaaatttctgatagcttcagaggggaatag

SEQ ID NO: 70956 - DNA, 498 bp, Acinetobacter baumannii
atgctgttaacgcttaacgaacgtcgtgaacgtgctgttttaagtcttgaacaggctttaaaggccgcagtttcaaatagcaatgaatgcttaatggctcaaattgcagaaaataatggttttaatatcaatacgtttcgtagtgctataaatcccacaacaacaacgcataaagccaatattcatcattttgaagcgatactttcagaaacaaaagacgagcggctcatggatagtgtttgtgcaattcatggtaatgcggcttggtttgaattgcctcataccactgacttaattgatgccaactttattgcatctattggtctgcttgcgcgtgaacagggagacctagctcaatcagttgctcaggctgtagcagacaagattattacaaatgacgaagcagcaataattcaaaaagatgttcttaatttaatacgtgtagcagtaaacctttatgcaatggttgaagcatttcgggagaaagatgatgagtaa

SEQ ID NO: 70957 - DNA, 294 bp, Acinetobacter baumannii
atgtcaaattctgatttttcatttcataaatttatctctgatcaaagtccagaagagcttgaggcatatgccgaaagagctggaacaacggtcttgtatttaaagcgtcatcttattcatagaactcgcttaccacgaatagaaatgattgaaacgttggttaatgcctctaacggtgcatttactaaagttcaattcatcgcttggttatatgaactggatgcatcttatctctgtggtcaaaaagaaaacatgattgtttctggaggatttaaacatgctgttaacgcttaa

SEQ ID NO: 70958 - DNA, 720 bp, Acinetobacter baumannii
atgcaaattttatccgatgtatatcagacccgaaaaagaaatctcctactccttataaaatattctaccagtagaagcgatttcgcagaccttattggtagtggctataataatttaaatcaatatcttagccaaaaaaatcctaagcaaattggaagtaaatttgctgaaaaagttaccacagcattaaaattacctcgtggctggttagatagtcctcaagacgagaatacgattaaggttattatgaaagcgcataatacgacaggttatgacgcaggccctcaacaaaatcaaaaaaatgatgatgaaacatctagcttaaatcaaaataatccgcttaaaatgatcccactcatgaatattctgaaaatatcaaagggggaaaatttggaagtaacggaaaatattgatgaaactaaaaatatatatgctccaccagggattgctaacccagtagcgtatcttattaaagggactggatattcaaaaccttaccgaaatggatacacaattatctgtgaattttctggagcagctacatctggagctgaaacactgatattcaccaaagacgagaaaatattcgcaggtgaatttttatatgaacaagatattttgattgctcttgattcaatcgacggtgaaaaaatcaatattctcaaagaaaatatagcaagaatttcacctattaaggcatttctagcaccagatttatag

SEQ ID NO: 70959 - DNA, 240 bp, Acinetobacter baumannii
atggtgattattttgattaatgtaaaaaatcaacctagcccagttgatcaaatcaacgaagctattgaacttatcagtgaagcagtaaccagcaaacagctcgatgaggctcgcaacacagcaaccgcatttattgatgcagcttatgaaagtgaagacatcaatttagcccaaaagcaccagctacttaaaaaagtacgcactgcttaccgcattcaacacataggggcagcgcgatga

SEQ ID NO: 70960 - DNA, 162 bp, Acinetobacter baumannii
atgaaaatatcacaagttgctgtattcaacattgccctattcattgtgttttctgccggcacatttctaggtctgaaatatcgcacaacaacattaaaccctgtaagcgaatcaattgcttaccaagctctattccaaaataataattatggagttaagtga

SEQ ID NO: 70961 - DNA, 441 bp, Acinetobacter baumannii
atgacttctttacgtgatttattagctgcaaatgctccagcagttcctgattggtacaaaattgaaaaatttgattatccaatcaaaccacctactacccctaaacacccaacatggttttcaaccgaagaactcaaaaatgagtattttgcttggtatgacagtcgtgaatgggacctaacacaccccgaattagccccataccaaaaaatgtgggaagactacagactccaactgcatagatataaggaaatcaaaaatcaagattatgctacttataaattaacttgctggcgttattactacgccgatcatatgttaaaagctcgaaaactaaaaatgaccaaaccgttttatcgaaacccatgttttcaagcttttttaatcatgttgattctcttacttgcttatattgctgcaagtcacttggagggcctttaa

SEQ ID NO: 70962 - DNA, 624 bp, Acinetobacter baumannii
atgaatagattaatgcttgattttgaaacacttgatattactgaatgccctgtgattttaagcatcggcgctgttgtatttaatgaagatgaaattattgactgcatgaatgaaaagattgatcagcagtcatgtcttgatattggttgcactaccagccaagacacaattgaatggtgggaaaaacaaagtgagaccgcaaaactagccgctttcggtggaaccacgaatatcggttatgcaatgggtatgcttgtggacctttataaaagtcatggctgtcaggaaatttggagcaaaggttcattaaatgacattctttgggccaacaacattatcgagaaatgtggtctagtcaaaccttggaaattctctcgggaaatgtgtttcagaacattcttaaaatactctccacaagttgaatttacccctaacggtgaaccacataactcacttgatgatgctatcaatcagactaagcattggatcttaattaataaatttaaaaatataagttcattgggtattgatgctaatactgctggatatgcagatgcaaccctatcggttcaattcgatgaaaacggcaagatgctatttgttgcattggaggataaagcatga

SEQ ID NO: 70963 - DNA, 456 bp, Acinetobacter baumannii
atgagttcgaccattttggtaattcatggaccgaatttgaatttgctgggaaaacgcgaaccagaagtatatggtcatcttaccctagacagtatcaaccaacaacttattgctcaagctgaacaagcctcaattacactagatacttttcaaagcaactgggaaggtgccattgttgaccgtattcatcaggcacaaacagaaggcgtaaaactgattattattaaccctgctgccctcactcacacttcagttgctttacgcgatgccttacttggcgttgccattccctttattgaagtacatttatcaaatattcacgcacgtgaaactttcagacatcactcttatttatcagacaaagcaattggcgtgatttgtggtctaggcgcaaaaggttatagctttgcactcgattacgctattgaaaaaattcaaccatctaacccaaactag

SEQ ID NO: 70964 - DNA, 246 bp, Acinetobacter baumannii
  misc_feature (86)..(95): n is a, c, g, or t
atggaaaccgtgcttatcaaaaagaaacagccaaataaaaaaggtattgttaagtttttgttattatttggaatatgtgctattgnnnnnnnnnngtcatggcagattcctacaagatataaaagaaaaaataaaaaaggtattgttaagtttttgttattatttggaatatgtgctattgcgttaaagcgtgatcgacatattccgcaaaatgataaaatttcacagccatcaaagggtgcatga

SEQ ID NO: 70965 - DNA, 2952 bp, Acinetobacter baumannii
atgcaaaacatacttacttttattaaaaatggtcaaaaatttactttagatgcaagcaatattaaaagtgtaagagatacgggaaatggttttgaaatcactcttaaaagtggtgagataattcaagctgattcctatagtgttactcctaatactcagccagtggagcaagtttctagtcagcaagtagaaaataattctgaagctgatgaggaatttgaaaaagaagaagttttaaaagaaaagagtttattggattcacaaacaatgttatggggtggtgctgcgatcgcacttggtggtattgcgatagcagcatcaggtagtggtggtagtgatggttcagcaccttctgatcaaactcctccagcaagtttaactaaaatactgtctaaagatggtaaagctgtaagtggtttaacagaagctggagcaactgttatagttgaaaattcggctggaaaagtaatcggttctgccaaagcaggagcagatgggacatatttaattaatttagataaagcctatattaatggtgaaatactaaaagtttctgctcaagatactgccggtaatagtacagttaaacaagagcttatcgcttctgatattacagctcctactttaacacatgctatttcttctaacggtaaaactattacaggtttgacagaggctaattcaactgtcaccgttaaagattcatctggaaaaatcattggaactgcaaagtctgataatgatggaaaatatacagtcatactggataaagcttatttaaatggtgaaaatcttactatttctgccgaagatttagctggtaataaatcaacaattcaaacaattttggctgacgataaaactgcgccaataggtttaacagttgcaattgatacagcaggtaaattcgttacaggtgtgaccgaagcgaatgctgttgtaacaattaaaaatacagcaggaactgtagtcggtacagctactgctgataccgcaggtaaatattcagttaccctagataaagtatatttaaatggtgaaagcttaagcgctactgcatcagatcaatctggtaatgctacagcaccaaaaaccattatcgcaccagataccacggcaccatcaagtttaactgcaagtattggtactgcgggtaaagtagttacaggtgtaactgaagccaatgctgttgtgacagttaagaatgctgcaggaattgtagttggtacagctacggctgatgccacaggtaaatattcagttaccctagataaagcttatctaaatggcgaaagtttaagtataacagcgacagataaagcgggtaatgctaccgtaccaaaaataatagttgcaccagacattacagcaccatcaagtttgactgcaacgattgatgccgcaggtaaagtaattacaggtgtgactgaggccaatgcaacagtaacagttaagaacgtggtaggaaccatagtgggtacaggtacagctgatgccacaggtaaatattcagttaccctagataaagcttacttaaatggcgaaaatttaatcgtaacagcaacagatcaatcgggtaataaaactgaggcaaaagaagttattgttccagatattacaccaccgattttacatcaaccaactattcaaggtggatggactgaggggcaagtcgtacaaggtacaacagaagcaaacgttactgtaactattaaaaacgctgtaggtgatgtgatcggttcagctatagctgatgcatcagggcattactccgtaattttgaatactgtttatgagaatggtgagttattaaaagtaatagctacagataataaagggaatgaaaatttgcttcaattaaatgcacctgatactacagcacctatgctagctaatttatttagttatgatttgagtacagataaaattatttttaatgcgccaagtgatagttatattgttgagcaaaaaattggtgatgcttgggttcaggtaaatgttgaggaaaaattcgattggttgaatacagaattcagagtaactgctaaagatctagctgggaatagctctcaaccactaaccattataattaatactgcatcgggaacttataagccaactgatcctacatttattcaaattattaaaggatctacagggaatgattatctgtatggtggtgatggagatgatacattagtttctaatacaggctctgattatttgtatggtggctcaggtaatgatacgttgatttatggtggtaattccaatgtgtatacggctttacaaggtcaagctgggaatgatacttatattgtagataaagcattacttacttcatcaagctctattcatattttagataatgcagctgaagaaaatatccttcaattaaaatcagtgtcctctggtgatatttcacttaagcagtcggattcactcatcataatatcattcaatgattcagcatcgacaatacgttttggtgagggacaattatcttctattgtatttgatgatggaactgtttgggataaagctcaaattgaacaacatattgccgaacctgtatttggcacaactggtaacgatgtaatcgagacaaacataccaaatcagagttactcttatattctaggagatggtgcagatactgtagtttttaatattctcgataatacagataatttaggtggaaatgttaagactgaatggacagattttaatcttgtagagaatgataaaattgatttttctcaactgcttataaatgacagtggagatcttcaagattatattactgtaaaagatactgaggcgggactaattatttcagttgatagagatggctctagtcaatctacgtatcattcgcaagaattaattttgcttactggtaagcactatacgttagaggatttaatggcttcaaatgcatttattcattaa

SEQ ID NO: 70966 - DNA, 630 bp, Acinetobacter baumannii
gtgactacaaatcaaggcaggcggggtcgacctgctaatcatagacttagccaaacgataatcgatgcagcatacgaattatttgtcgaattgggttttaaagaagcgacattaaacatggtcgcccagcgtgcaaatatttctaaagtcagtatttatcgatacttcgagaataaggaagcacttttcagtgcagtcgttacagcccgctgtcaacagtttgcaactcagactcttttaaaagttgatggttcagccgaagaacagttaatggccgtgggatcatctctactttgtacgctattgagctcggatttccgtagtcttgagtctataatcatagctgacaggacaaaccagaaattgttaagcaaacttcattacgaagccgtattcgctcatgttatcagacaaattgaggctctattacgtcaattacacacgaaagctatactaaacgtgccgtaccctcttcagtctgcccacttgtttgttgcacttttcaaaggatccaacctcggcactattgcacgcttcgatgaggcaaaagtagaggacgataacgtgatcaaatcctactgccgctcagctgttaacatgtttatcactagtcatagtggaagtaactag

SEQ ID NO: 70967 - DNA, 1371 bp, Acinetobacter baumannii
atgaatcatataaatgaacaagagtctaacagcaattctggatctatgccatttcgccttcttggtggctggatagagcagcctagtgatcttcaaccagcactagaaggttctgttagtgcagatgtaattgtagttggtgcaggctttgctggattgtctactgccttagaactaacggcccgcggtgcaaaagttgtagtacttgagcaggagttcggtgggttcggggccagcggtcgtaatgcaggctatttgcttggtagcatgggaattgaattcgaaatgtttgctaagcgggttggtcttgagcatgcaacgaaatttgttaacttctatgatgaggctgtgacttatgtggaaaagcgtctagtcgagttagacatcgactgtgactataatccttctggcattatacgcgctgtcatagaccagtctcaggaaaaatggctgcgccgcagtatggagattggtgagaaactagggtctcgtactcgctttgtagatcaagccgaaatgcgtgcacgcggaattccgcctgcattcctatttggtagtgaacagcgtggcggcacactcaaccctggtaaatatgttagtggtttacgccgtgcagccattcgggcaggtgttaagatatatgagaaaacacctctactctcttacagtgaaggaaagacaattacctgcaaaactccacatggtagtgcaaccgcacctatcgtagtattagccactaatgcattcaccccacaattgggactattgcgcgataaagttgccccagtacgagtttcagcgattgaaacacagcaattatctccacaacaattggaatcactcggttggcatggtcgagaaggtattattacgccacatctgatgatggagagtcatcgccttacagcccacaatacaatggtgatgactgttaagaagttgaattacgtatatggctcaaaaaccccgaacgtaccggataatggtgcctatgctttactagctcaaacattacgcgaacgtcacccgacattgcgagatatcggtattaagcactgttggagtggttacgttagcgtagcatatgatgccttacctgtagtgggtacaactggtatacatcaaaatatcatttatgtagctggctgctcaggacatggacttgctactcactcgttcatgggtcaacttcttgccgagaaaattaaaagaatagagaaccctattctgacagctctgtatcataaaacaccttccacactacctgagccattccagtggtgtgcttttaaaacagcttttacagtagcaagactatttgataatcgaacagaccgcaaagctcgtttaattacttcgaactcaagttga

SEQ ID NO: 70968 - DNA, 756 bp, Acinetobacter baumannii
atgaaaattctcggtcttgatgccggcagtgaaacggaagctactgcatcaaaaatcttaactaacagtgaaatgacgcatgccgctattttggaaattgtaaatatctgcgggctagttgcttgtattgtattagccatcattggttggatgtacggtgctaaatttctcaagaaaaagaatatcttgctgggtttagagtattggatcgttgctttctctgcaacgaactttgccgcctatatgatgactagttggaatgttaatctttcaattactatgtttctcgattcattctcacgtagtttcggaatgccgattattgccgtacttggtttgatggctctgacacataattacaaaccttcacctcttaaagagtttctattattcaccttctcattcgccggcacttttgtaatctttctggcagatttctttgaagaaatacgcccgtatttttatctagttatgtggataattctcgtgatttacctttgttacttcattatttgtttggcacgtgccggagagattggacatgctttggctaccacattaacggtaataagcagtctatcgatagctatcgtatatgattttttccctataccaggtgatgacaaccatatgatttttatgactttggcttttattacatggggtttttctattattcaattgtattacgcatataccgccctagagcgatcgcaaaatgtgtctatacaatcttttgttccagctcgccaataa

SEQ ID NO: 70969 - DNA, 144 bp, Acinetobacter baumannii
atgtttatatactacaatgatttcttggagactattgttaattattctttcgataaaaaaataaaactatttgtgttattggtatttggttgttttatttgccatattagtattaattgtaaaattaaactatatgaaatatag

SEQ ID NO: 70970 - DNA, 693 bp, Acinetobacter baumannii
gtggctttaattacctttgtaaggcatggacaagcttcatggggtactgacaattatgatcagctatctataaaaggggctgaacaagctagggttttaggtaaagtttttgatgatcaggctaaatctttcgacaatgcatggagaggagaaatgattagacatcaagaaactgcacaacactgtttagcagagatgcattcttctctaattgttcttccacataaagggttgaatgaatttgatcatgaacaagttttattaaatttggataagaaaaaatatccaactaaagctgaaattctagaagtaattaaaagctcatctcatcctacaaaaaccatgggagtcatgtttggtgaggctgtaagccgctggcaaagtggccaatatgatgctgactatagtgaaacatggaaagagtttcagcatagatgtgtcagcgcttttacagatattgtgaatagctcaaaaggaaaaaatgttgttgttttcagttccggaggcgtgatttccgtaattatacagtcattacttggtttaactgatcgagctacttttgagttgaactggtcaatggttaattgtggtatcacacaaattctaagtgacagtaaacgccatagtattttaagtctaaacgagcaccagcatttccgtgaatatggtgtaaatttattaacttggcattaa

SEQ ID NO: 70971 - DNA, 909 bp, Acinetobacter baumannii
atgattgatttgaaaaatcgagttgcgattgtgacaggagctggtgcaggtcttggaagagaacatgctttattgttagctcgtctaggtgcaaaagtagtagtgaatgatttaggaagtgatgtcaatggaaatggcggatcaacaaatgcagctcaatcagtcgttgatgaaattgtaagtatcggtggagaagcatttgcaaacggtgcctcagttactgaggcttctcaagtagaagcaatggtaaaagaaacgattgagcgttgggggcgagtagatattttaattaataatgccggaattctgcgtgataaaacctttaccaaaatgtctttagatgatttccgtacggtggtagaagtgcacttaatgggagcggtaaattgtactaaagcggtttgggacattatgcgcgaacaaaaatatggtcgcatagtaatgaccacatcatcatctggcttgtatggaaattttggtcagtctaattatagtgctgccaaaatggctttagtaggtttaatgcaaacattagcacttgaaggtgaaaaatataatattcgtgttaattgcctcgccccgactgcagcgactcgtatgctggaaggtttattgcctgaagaatccttaaaagcacttgcacctagtactgtaagtcccgccgcagctgtgctcgtgagtgaaaatgccccaacaaaaatgattttatgtgctggagcaggaagctttgaagcagcacatataacattgactcatggtattcatattggtaatggggagcagacagcacatacattattagagcgattagatgaagtttcaaatcgtacagctgaaattgtccctatgtctggctttgctcaaggtgaactagagttgaataaagctggcttaaaagtaggggaataa

SEQ ID NO: 70972 - DNA, 477 bp, Acinetobacter baumannii
atgggtgaagcactttcaaataaatcaccgatttcaattgctcagctttttgaactggaaaatgaagtacttggagtctctggttggattacgattgatcaggcgtcaattaatgcctttgcagatgtgacacgtgactggcaatatattcacgtagatgtagaagcagcaagccaaagtccatttggaggaaccattgcccatggattttttacgctatctttattatctgctatggcagcagaagctatgccgcagattaaagaattaaccagttctataaattatggaatgaatagcttgcgttttattaatcccgtacatagtggaaaacgagtgcgtggacatttcttactaaaatcaataaaagaaaaatctcatggtcgatatcaaatggtcctagatgtaactgttgagattgagaatgaaactaaaccagcccttatagcagaatggttatcacttctaattttatag

SEQ ID NO: 70973 - DNA, 1824 bp, Acinetobacter baumannii
atggtagatgagcttattctgtctcgaaacgacttagattttattttattcgactggttaaaagtagatcaattaaatcagcgaacatgtttttctggccaagatcgttttgactatacgtcagttttaaatgtttatgaaagtttagcaactgatttattcgcgccgcacaataagaaaaacgatagtaatgaaccttcttttgatggagaaactgttaaggtaaatccagaggtgggagtagcattacgggaattttctatagcgggtttaatgaatgctgcattcccggcagaatggggtggaatgaatcttccaactacagttgaacgggcaggtatggcgtacctcttaggagcaaatgcaggtaccgcagcttatgcttttttaacgattggaaatgctaaccttttaatggcttatggtgaaaaagacctaatcacaccttacataactgcgatggcagagggtaaatgttttggaacaatgtgcttatcagaaccccaagcaggttctagtttagctgatatccggacacgtgctgtatctaatggagatggtagatatcgcctattcggaaacaaaatgtggatttccggaggagatcatgaaatctctgacaatattttacatttggttctagctaaaatacctgatgaaaatggccaaattccagcaggagtcaaaggtatttctttatttgctgttcctcgaaaactacttgatgagagtggacggccaggggaaagaaatgatgttgtactggcgggaataaatcacaaaatgggttatcgaggtactgttaattgtgttttaaattttggggaaggtaagtttacccctgaaggaaaatcaggggctttagggcatataataggcgaacctggaaaagggctagcttatatgtttcatatgatgaacgaagcccgtatttctgtaggattgtcagctgcagcattaggatatacaggttatctgcatgctcttgattatgctagaacgcgattacaaggacgtccaagaagtgatagagatataaactcacctcaagtaccccttataaaacatgctgatgttcgcagaatgttattagcgcagaagtcatatgtgtcaggggctttagcattatgtttatatgcagcacgactagtagatgatagtaaatcacttgaagatgaagaagaacgcgataagatcaacgccttattagatttattaacgcctgttgtaaaaagctggtcttctcaatggggacttgtagcaaacgatttagctattcaggttcatggcggatatggttatacccgtgaatacaatgtggaacagttctatagagataaccgactaaatccaattcacgagggaacatttggtattcaggctttagatttattgggtcgtaaaactcgtatcaatgatggactatctgtgaaactgttggatgagaagatttctgaaaccattaagcaagcgctatcgatagataaattacagagtcatgcaaataaattagatcaggcatggaaagaaatccttcgagtgactaaaagtttgcacagtctagaagatttagaagtgcaattagcaaatgccgcaaactacttagaggcatttgggcatttagtcgtaggttggttatggttagatcaagctatcacaattcataaaactattgagacatcatcaagcagcgatttcttaaatggaaaacttgcagcttgtgattacttttttggctgggaaatgccaaaaatatccagttggttggcagtactggatccagtggaaaccactcctctgaatatgcctgagcaatggttttaa

SEQ ID NO: 70974 - DNA, 720 bp, Acinetobacter baumannii
atgctaaacaagaaacttttagttattttattaacctgtgtagtaaattcatctctagtacatgccattgaaattaataaggatttaaatttaaattttacagctacagctatgtctgaatatcgtcgttctggttttgatttaagtgatggtaaacctgtagtacaaggattagtgtcactggcccataaatcaggatgggacatttcggcacaaatatctaattatgatgtagtagttgtcccagcaaaatatgaaatagcttatacggcgggctatttttatccttttaacgaaaaggtctacatttactcctcattaggtcaaacaatatatccgaattgggctgatggcaatgttactgaatggtttataagcgctaatgcttatggcgctttttttaactatttttatgactggggaaaaaattcaaatgctcaatatcgctatataggttataaatataattttcctaataatgtgtggcttgatatgcgttatggctacaatgatgtaggtatacaattaaagaatgaagatggcgatattcgacataactatagtgtgcgtaaagttgagctaggtaagcaatataatgatattagctatacattagcttatgttgatagtgatttaacaaactcagaatgtacacaaattatggcatatggagataaatgttcatctactgtagtatttggaattaaaaaaactttttaa

SEQ ID NO: 70975 - DNA, 1383 bp, Acinetobacter baumannii
atgagtaattcagattcaataaatgataacggtagtggtgctcaacttcttgcccgtttaaatcgtttaccagttatggggatgcattatctctgggcattattgcttgccatcaatcttatgttggaatattacgataatgcaatttttgcttatgcctctccaactattaagtcccatacaaattacagtactgaacaaatcggccttataggtagtatgtttttcgttggtatgattattggagcccttattggtgggaggttatctgataaatttggacgccgatctatcatggtgtgggctacaattctttattcattcggatcacttttaacggctatttcaactaactatgaaatgatgttattttcaagaacaattacaggagttggagtacaagcagcaacctcagtattactcgtatatgtgtctgaaatgtttccaagtaatactcgtggtcgttttatgtcagttgtaacaatcggcttcgcattttctgctgtagcagcatccgctttagcactattttatttaccaaatagtggggctaatgcttggcgtcatcttttttatgtgggaagtattggttttattatagctccttttatgcgattttatatgcctgagtctgttcgatggtatattgctagaaaaaaactaccacaagctgaagctttaattaaaaaatttgaaagcaaagccatatcaaaaaacaaaatattaaagacaccaaatatttcagctatagaaaattataaagaatctactctttctgatttatttagaaacaaagctgttatttctacaataattattgtaggaataggttatttcggatcaactttagcatactatttatttggaaattgggcagtttattcttttgtctatggtttaaaatattccgaggaaaaggcttattatattttcttcttatggaatgttatttattgtataactccatttataacaatgtatattcttgaccgttttgaacgtaaatcactaattttagcaatatcagcattaactacagttccattaattatcttaggaatatcaaatacaacttgggagttaatagctgcaggtggtgtagcttgtatacttacaggcatcatcgtaagtggatattatacatatattcctgaggcaatacctacaaagttaagagcattaggaagtggaattattatctcaatcggaagatttgggggagcaatttctggagtattaggtgcatggttatttacacatagtggaatacagggagtaatgtttgcagccgctgcattgtatattttgtttgctattccagtaatgttatatggtcctctcacaactaaccgttctcttgaagtagtcaatagtaaagaataa

SEQ ID NO: 70976 - DNA, 1803 bp, Acinetobacter baumannii
atggcaacgtataaagcacctcttcgtgacattaattttgtgttaagtgatttactagattttgaatcactctatgctcaatatcctcaatcaaaagaaaaaatgactcgggaaatagcacaacaatacttagaagtagcatctgaattctgcgaaaaagaattacatcctttaaatcaaataggtgatcaacaaggttgtaagcttcaaaatggaattgttacaacaccagatggttttaaagaagcctataaaaaatatgtagagttaggttttccatctttgacgggtaaagaaatttatgggggacaagaattcccaggattattatggctagcgatttcagaaattttaacctcgactaattgggcttggggtatgtattcgggtttatcccatggcgccatggctactatcgaaaatcatggaacagaagagcaaaaaacgaaatttttaacacctttaatttcgggaatctggactggaacgatgtgtcttactgaatcacacgctggttcagatttaggccaaattcgaaccaaagctgttccaaacaatgatggaagttatgcaattacaggagaaaaaatatttatttctgctggtgatcatgatttgtctgaaaatattattcacatcgtattagcccgtttaccgaatgctccaagtggcaccaaaggtatatcattatttattgtgccaaaatttaatttagatgctgatggaaaaattgatagtcgtaatggagtaatctgtagttcgttagaacataaaatgggtatacatggaaatgcaacatgtgtactaaattttgaaaatgctaaaggttttctaattggccctgaaaatcgtggcttaaattgtatgtttaccttcatgaattcagcacgaatttttactgctgtacaaggcttagctgcttctgaagcttcttatcaaggcgcattagcttatgctaaagatcgtttagcaatgcgttcattatctggtcctaaatttccagctttacctgccgatccaatcattgaacatcctgccgtacgaaacatgttgttaacacaaaaagtttttgcggaaggatctcgagcattagcttattatttatcaacttatgttgatattgcagaattaactacagatgaattagaaaaaaaagctgcagaggataaattagccttacttactcctattgcaaaagcatttatgacagagttgggggtagagtcagctaaacacggaatgcagatttatggtggacatggttatatttctgagcatggcatggaacaaattgctcgagatgttcgtatttccaccttatatgagggtactactgaaattcaggcaatcgatctcttaatacgcaaagtaattggctcaaagggaagtttattagtattgttaactaatgaaattcaagcttttataaaagaaaacagtggtaacgacgttacagaacctatgttatccaagctagatctcttggttaaagagtggcttgatttatctacttatattcaaaataaagttccagataatcttgacgaggttggtgctattgctgtggactatctttacttttctggctatgtcgttttcgcttatttgtgggcgaaaatggcgattatagctcaaaataaaattgctcaaggaagtacggatgatttctattttgccaaaatttctactgcacaattttattttgatagagttctacctagaaccttaactcattcaaccttaattacgtcaaatacagaatccttatttaaattagaccctcaatcatttaagtttgattga

SEQ ID NO: 70977 - DNA, 1014 bp, Acinetobacter baumannii
atgacaactcaacaacaatttcttgatctcctagcagatattgaaccatctacaacaacggttaatgattgttcaagcgcacataatacgcttcgtgatgctttaaaagtgcataatgaattcagcaaagtacatgttcatacattcttatcaggttcttataaaagaaatacggcaatacgtccgactatcatagacggaaatacacaaagaccagatgtagacattatcgcccgcactaaccacacaattaatgatgatcctcagattgtgcttgatgctgtacatacagcattaaaggatattggatataacgaccttacagttaatcgtcgttcagtaaatgttaaattgaaaaaagttgatatggatgttgtccctatcatttcagacggttacggcggctatctgattcccgacattcatcttgaagagtggctatccaccaaccctccagcccataccgagtggacgattgagatgaataaaaatgcaaatggccgatttaagcctcttgttaagttatttaaatggtggcgtcgtgagaacttgtctgaattaaaacggcccaaaggattcattttagaatgtctagttgccaagcatatggattacgacgaatccaactatgaaaagttatttgtttttcttttagaaaagatcagggatttttacgagatttatgcgtcaatagggataattccacatttagaagatcctggtgttgcgggcaataatgttttttctgctgtcacagcagatgagttcaaaactttttatgacaaggtaaaagaacaagcttctattgcacgaaatgccttaaatgaaacggatagtgataaagcattagctctatggcgacaggtcttgggtaatcgttttccacgttcggcatcacacaaaagtgcaaactctgctgatatggccagctctttagtccgttctgctctaggtgcaggattaacatttccatcaacccctgtttatccaaataaaccaggaggttttgcataa

SEQ ID NO: 70978 - DNA, 4596 bp, Acinetobacter baumannii
gtgtctttagaaccaggtggccttgcagaaaaaattggcaatcgttatgaatcctcttgggtcgcatttcagcttttaagattattagatgaaaaaatttcttatgtacaagtagaacctattggtccagatgaagatgctgtagatgttattattggtaatttggatggatataaagaacatcatcaatgcaaaattggaaatgtttctgatgatgcttggtctctttctactcttcaatctaaagaacttctaacaaagggttttcagcacattctatctggctcaaagtcttacaaggtagtttcaagaattggatttagaatactagaagatatttgtgaaagtgctagacacagtacaggttcaagttctgatttttacaattatcaaattcaaaatattagtgaagaacgacgtaaattatttagtgaattgtgtacaaaattagaattaaatctatcaaatcctgatgatttagataaagctgttcactttctaaagagttttgaaataaagaaatttaatgaagatgatatagataatgaactgtgtatattattagctgaaaaactggtttatcaacctcctagtcagcttgttcatttccttcaaagttaccctgttaaatgcggtaagttaagaacacatattacatctcatattcttaaaacagatttagaagtccaccacttttcttttaaaacctatccgggtcatcctcatatatccgatgtaatagcaacgctaaatgatgagtttgatcactcaatcgagccttatttaatatcacaacaaaacattcaacgtgccgagtttagtactacattagatactgttaataataacccaatcacaataattaaagctgatgcaggggttggcaagagcgctttcttattagatttgaaaaaacattttgttcgatctggggctattgttcttcctattcgactagatagacgagttcctaaaaaaaatctcgatcaatttggaaaagatttaggatttccgtattcgcctattgcttgcttagaaaaatatggacagagtcaagaaattatcatcttgcttgatcaattagatgctcttcgttggactgctcttcactcatcaaatgcattagatatatgcattaaaatggttaaagagattcttttactacgccaatatagcaataccaatataaaaattattatggcaacaagaaactttgagcttgaagatgatgtacgcctaagaaattggatcagtgaactcaatagtgaggtcaaacagatggaattaaaactgtttgagccagatcagattaagccatatgttagccaatttgaagactatgatcagttgagtaatgagcaacagaatattttaaaaattcctttatggctaggtatttatatggatttagccaatgatttagggttcgctcctaaatttacaacaaaattagatttaatcagatctttcatcgatgatagatttaaacaactcactgatagtcatagtatttccacagcaaatagtgaaaacttcttcaatgaagttataaatttaatgaatcaagctaacaaattaagtgtttcatcaactcagttatcaattggttcatcagaaattaagaaagctatgatttctgtcggattactcactgagcaaaatagagaaattagttttagacatcaagcaatccatgattatgcaataggaaaaaagttatattcgcaaggtcttagttcacctgaagatttcttacatgaattaggtcccaaaaatcaacaaacccttttaaaacgagagcatctcagatatgcactcgcaatgttatatgaagcagatgaaagagctttctgtaattgtattgaagcagttctttttcattctgagattcgtttccacttaaaatcattggtatttagtacattacggcatatagagaactttaaagctccccttaaaaagcttataaataagatcatttcagattctgatctagcacctcattttataagattaagttgtagcggttgccctacactcgttcaatatctttctgaaaatcattatttaagtgattggttagatgagaatagtgatatgcaatctaaagctctagagcttttaagctcagtttctgataaagctccaaacttgttaattaatgaattatctaagtttgtgaatcgatcacctgagtggaatcaaaagatatacaactgtttatgttggaaaatgagtgatgattcagaggaattatttaatcttcgcattgagctaactcaaaatggagtcagcagtcgctatattttttgggatgacttaaccaaagaatatccattgagagctttgcatctattaaagctcatgtgtaatgaagaattatatacaagactaagctcaacagaagaatggtctgattacgacacagagtgtattgagaaacttgctgaaagccattcacaagatgtgctaaggatttttttaccttttttagatcagtattttgctgagcctctaattaaggattttgatgcttttaaatggtctgaagaatatgctacaagaacatcatttgagacttttatatacaaagccttgtcttctcagaatgtggctttacaatctattgaactttttcaaatattagtcccattaaaaaataatcccaatctaatatttaatcgtatatatggtaatgctcttttaaatcttgagatagatcatgctgattttgtaattgaatggctgttagacaacccaaatcataggttcaaattaggaaatgattatgaagaacccgtttggatatcagcgggtaaactcatagaaaaattttcacctcattgtaatcaaaaaaactttgagcaacttgaaaatacaatttattattttccccctgattatgagttagaagaaattagatggtgcttagaagctacacgtaaaaactactacaaactttattggggtaaaactcaatatcatttactgcctaaattggatacctcacgtatttccaataaatctacacaaataattagtgtactcaatcgtaaattttcaaaatatacagatgatgatttttgccatcgaagtaatagtctagtcaatactattaaatcgccaattaaagatgctggaaaattatccaataaggcttggaaaaaactaatactgacagatcccaaagaatttaaaggctttaaatttgatcaggaaagcaccgaatgtagtattcagcagttttcaagtaattttagaagtgctgtgaatgatgaacctaaacgttttgcagaatttgctttgaccttaccgaaaaatattcatcaagattatattaatgctttatatgcaggattaagtgaaaatagtcttgatcaagttccagagcatctaaaagaacaatggaccccctgtcctattgatttgattgaacaagttatcgatcatttttcatctataaattattctagagcactccaaaaactactttctggaagagttaaattactatctccaaaatacttaaaactactggaagatattgctttatcagcggatgatccattaccaaataaattaaatattcatagaggaggtcaacctaatcaaatagatgaaatttcaagccatgatttatctggaaatattcttaactgtacaagaggaagcgcatacaaaggattggctgaaaaattttgggatgatcaagaatatgctctttctcacaaatatcttattgaaaatgctttaaatgatgaacatgcggctgtaagaatggcaactgctgatttacttctacccatgtataattatgaacgtaattatgcttttcaaaagtttataaaattatgccaaaaagacattagaaataccttaagtcatggctattactactatttcaataatgcatttagtagtgaatttaaagagtcatttatagctcttgtacaaatgatggtgggttctccatatcaagatgttagaaaagaaggtcataaacaagttattgctcgatggttattcaatggtttatttgaagaagagctgaaacaaggcctccagtgcaaaaatcatgaaagtcttttgggttatgcttcagtaattagccaacttcttggtgatgatacaaaaggatatgatcactcaaaaatgaaacagatctttgagatcttagttaattcagaaaacgaggaaattcttaaaaatatagggcgtttttttaatcaaaagttttggtcgaaaagatacgctcgggagtttttcaaaatatatgttcactcaaaagccttaaatcataatatttataacgttttacgctcaatagaaaaaagttctatgaatatggctcaatttagtgaccttattattatcatgattcaaaatattcttaagttaaatactcaagaattagtaagccgtatggatacaaatgctatcacgagagtcattcaacgattatatgatcaagcagaaaatgataaagatgatgaaacactagattattgtttagatatgtgggacgaattgttagctagtaatcattcatttacaaggaatatgacagacaagcttgatttcggacttctggcataa

SEQ ID NO: 70979 - DNA, 1713 bp, Acinetobacter baumannii
atggggttttgtgcaatgaaactgattagtttaacttgtgataagtctgaatttaaaccattgttttttaatgaaagtggtgtgtctattattttgggtgatggtgctaaaattaatggtggaactagtaatggtgttggtaaaacattatctttgaagttaattcatcattgtttaggagcaaatactgatccattattaactaaaaccgtaccagaatggatttttactttacattttaaagtcggtaataacttatataaagtatcacgtactggtgatggcaaaaatatatggttattagataaattaatatcacttaaagaatataaaatctggttaaatgaacaagatatttttaatttacgggataatattcctgatttaacttttcgtgcattagttaaacgatttactcgaatggttaaaggagattgtgagaaagcaacctatacggcaaaagaaaatgaatatccagcgttgcttcgtacaatttttttacttggtattgattatcagcttgtgcttaataagcatttatcaaagttggaacttgataaatctactaaacttataaatcaatataaggaagatcctatactattggatttctttagggcagggactcaaccaaaagttcgactagaatttttagaaaaagaagttccacgccttaaagaggatattaataattttaaagttgctgatgattatcgtgatatagagcttgaagcgaataaacttacatcatttattcgagatatttcatttgaacaagaagctttagtacaacaaattcataatttaaatcaagttattcaggatcagcctgatattactaagaatgatttactggaattatatcaaggtattgaattattatttaaaactgaggcattacaacattttgatgcggttgaacgttttcataacaacctatcgataaatagaaaacaacggcttgaagaagataaacagcagctccatttaagattggagaaattgaatgatcaaagagccatatcagaaaagttgcgtgatgaaaaagttcaatatttacatggaaaaaaggcattagatgattatgtggttttaacgcagaaattgtcacaacttacaagtgaacaagaacgtttaacagaatatagtgaagcaatttctaagcttgaaaaacaaaaacttgaaattaaatccagacgattggaagatgatagaaaagcaacttcatatgttgagtccaatcctatagaaaaatttgatcacgaattcacaaaacttgccaatatgctttatcctcgagttgctgctggtatcaccttgtctgcaaataatggagaccgtaatcaaattcgatatgatttagaagctagtattgagggtgatggttctgatggtattagtgatgctgtcattttatgttttgattgggtaattttaactctaggcttaaatcattcgatgaaaacactatggcacgataaccggctttttgctgatattgatccaaaggtaagagctaagtggttaaaatatattgcgttagaagctgagaaaagaggattgcagtatattttttctattaacacagaaaattttgaagcaatggaagattatctatcacctgatgaatttaaaaatttagaatctaaacaaataattcggttgaaaggtgatacgccagagaacaaacttctaggtattcaatttggctaa

SEQ ID NO: 70980 - DNA, 1242 bp, Acinetobacter baumannii
atgaaccaattaaactcaaatatcacctcccatacagcgtatgagtcttataaaacaatccccctcgagtaccgcactccagatatacaagactggatcgacaaatatgaactagctaataacattacgaaggattgtgcaaccaaagaagtatgcacactcaacgttgtagatgcatcacaccaatcactaaaggagcaacatgaagtagaagctcccctatttgatccaaatactgttacgcctgatccagatatggtggaataccataccaacgcaactgcattccttaaatctcaattaccattatttaaagatgaacgtaacaaagaattgtttatattttcaggagcagggtctattggcgcgaagtattcccgccataagctgcttgttaaagtcaacgatacagaatttgggaaacatttagcagataaagttgggtgtctcagttttgcacatattgcaccaactaccacaatcagcaaagcaatcaaggaagcacagttagagtgtccatatatgactattgctgctatttaccttgatccacatcgtgatacaaaacttgataaagagcgtgaagctcaaattaaactcggcaatgaatttacagtttacctttcgcctcctaaatttattcacaacgataactatactctattactagaagacacttttgaagatgaagtcatccctcaagttcaaaagttagatattttctcaagccccgtacagcgttcacgttaccttctttcaaaagtacgtgataagaaagtagtagagccattaatcgcaaaacttaaaacaatccgccctccccaactgaaagaggaaaaattcaatgaatgggtaggtatattggcaatggctttattaacgagccagaaccactttaaccaattatgggaattgatgattgaagtaactgatattgaaccgctagaaaaaaaacatgaactagcagtagcattagaattagttgttcctcaatacaaaacaatgttagaaaattgcaaagttaaggaagatcaattaattccaacaacattagtgaaaactttgctaaaagggattggttacaacgaaagttgtctaagcgatgcattctctaatctaggttttcctttgaaacagtataaatcgggcattccactacgtgaattggaactagcgtatgaagccctagtccaagataatgataagcgtgtccagaactatcgtatgcaattgaatacataa

SEQ ID NO: 70981 - DNA, 411 bp, Acinetobacter baumannii
ttgagtgctagaaaggctcatgaattttttggaatgaaatattcatcctattacaaattagaaaaatacgatcacaaccttccattggagactctcttttttgtacttcataaatttaatttaaagttaaatcacctacaggaggtcattgatctgatcaaaaaaaatatcgaaagaaatgatcacttaattctaggttggacaatagaaaagactgctggaaatgaagttatagtttctaatgagacaaaaaaaatatttgatcttttgattggaggtacagttgttgacttaaatgatgttgaacatttagatgagatgcttggttttaaaattgttgcagaagtcgatgaattaatttttaacatgattaaagaaagtgatgcatataagcaaaccattaagaaataa

SEQ ID NO: 70982 - DNA, 573 bp, Acinetobacter baumannii
atggatattaactctactgaagataaatctttggataagcttttaaaatatggtagcgcagcattttcaattttgatgattggttttggagtgggtaggtgggttggaagtgaatttgactcgaaagctgaaacgcggccacagatatcaattagcaattcatctgatagttcacctgtaattcagcaaacaacttcaagtgttttacctttgttagaacaggaacggctaaagaatcaaaatttactaagtattaatgctagtttagtcgtacaacgagacaatgcaattactacaattaactcatgggcagaacatgataaaaaacaaaaacaagatttctcatttaaagaacaaaattatattaaacaaatgaatacttgtaatgctaactataagacatatatggatatatccatgtatgagaaatctaataaagatataaatagacaacttgagttttatccttacacaatgacttctgaacagaaaatcaatctgaaagaaactcttaaaagcaatgatattaaaattttagctttgattgagcaatataagaaaattgaaagttag

SEQ ID NO: 70983 - DNA, 426 bp, Acinetobacter baumannii
atgctattaaaatatccgaatagtactgttaatttttcagcaagtcccgctcatgccctgactccttttcaggtatatgatcgggatgaatgggaggagtatttatctcaatatgatccaaatgattttaatcaaatgaaacctttgtttaatgaatatttttttaaagtaaaaaataaaatttataatgttcatcataaagcagtagttatgctctcattagagaaagctttgctaactgagaattataatttcgctgaattattagagtctgatgatgaaacatgcttttattttccttataactggaaaattgaaaaaccaagatctttttttaaagatatttattacttaatgtttacaaattggggggaggaggtaatcaatgctggttataagatttcacctccaaatgaaatattatga

SEQ ID NO: 70984 - DNA, 2073 bp, Acinetobacter baumannii
atgatcgtggtggcgattgtggtgaccatttataccgcaggagctgccgctggtttaatggctggtttggggagttctgcatttggggtgagcgctgcgttttcagcaggcttaactgcgatgtcaaccagtgctgttgctgcaggtatcggtgcggcagttggaagtgctgcatctcagctggctggtaaggccatgggggtggtggatagtttctcatggaaacaagtgggtatctctgctcttacagcagcagctacagcgggcgtaggaggagcattgtcttctgcagggggaacagttggaactactggagcaactgcgacacaaagtagctggttaagtgcagcgaagacggccattaataatggtggttgggtcgctaagggtgctatatctggggttataagctatggctcgaattatttagctaatcaggtgtttgggaataaccagagctttagctgggcatcactaggttcatcgattgtaggttcaattgcagcagctggaataggggcgaaaggattacttgatggtttaggcacgacagtaagtccttacgcctactctttagcaggtgctaatgcagctgcagtgattgatgataagtggtttggtggatcgaaaccggattacttaaatgtatcaatggcagcgatcgccaatgcaggtgtacgtcagtttggggaaaatgctgatggatggtttgctgatagcaatactaatgatttagttgctaacttcaatgaagaagaattccttcgtcaggaagcaattcgttcgaaaactagacctttatatgtagccgacaatagccgaaataaagatgtaatttcagattaccacccaaatcaattgccaactataagcataagagcttcccaagaaggtgaattaatggcgggagtcattggtgataatctttatattgaggataacagtattaagggtgaactctatacaattaaagttgaagccgaaattccagacactacaaccaacactttagatggagctagaagcttcttccaaaatcgtttacaagcattagaggaatggggtaatgcctctgtaccatttcagtattcatgggcaacaccaacaataaatacaggtaatccgagactggatcgatattatttccagccggtaaatgatgtatttaatactacagcaaatgttgggtggaatgctttaaaacttgtaggtaatacagcagcaattgtatctaattcacctgtcgctttatttagtgcagttagtggggattatgaagcatcccaacagttttatgaggatttgtacttatctaatcctttgacagcttctattggtggtttaaggagtgggcttggatatatacgagatgtaagagaatttaataaagctactgttgttggccgaactattggagctaaccaaagaggtagtgctagccttggcttgttaaatgatattccagctggtagtacaactggagaagtgttgacagcatcaatgccagttaccaaaagtcccggggctatattacgtgataaatggggatacctgagtagcgcagagcggcagaatttgattgtgtctaaaggggaggctgttgctgaacgatgggtaaataagtttgaagataatcttaatcagacctattttgctaataagcctaaatttatgcaagctcattttgtggaaaaacatggtcctgatattcctttaagacctaatttggaagcaagggcaattgacgggcgtcaccctagaacagggattccttcaaaaacaggtaggccgcaaacaagctcacaattttatagttggagaacacaaatggatgttataaatgaagctattactcgtgatattcgaggtttaccaagatataacgcaggtttggataaacaaggagatctaataccagcagtagtcggttataaagctagtggggttggacacggatttactccaactagaagagggcaagaagcacctagttataattcgcaaatgaatggatggaaagtagtgtttgatgatgatcatcatgtaccatatacagcttatccgactaaatag

SEQ ID NO: 70985 - DNA, 381 bp, Acinetobacter baumannii
atgaagcactgtttcttttttagcagtcagattccccagttcatcatagcgataacgggtcagaatgccatgctggttgaggtcatagacctttctgcccagcttgtcataatacatataatgaataacataagcgggcaatgcagatgccttataaaccccatccatctgtgccaaagtgctgttccgagccaatgtggtggcaattctaaaatccagcacccggataatacgattcagtgcatcatagtcattacgggtcacataacccgctgcattcatgctgtaaatcacccggcccaaggcatcgtaatagtaagactgggtttgagcagaggctttggctgtggtgagggcagtcttgataccatcggcagttaa

SEQ ID NO: 70986 - DNA, 552 bp, Acinetobacter baumannii
  misc_feature (446)..(455): n is a, c, g, or t
atgagcacttcacgagtaaagctaactaagtcatttatcgatcaacttgaactcacaccggctatttatcgtgacagtgagattattggctttgctattcgtgtaaataactcttataaaacttacattgtggaaaagaaagtaaaagggaaatcaattcgttgtaaattaggggattacgaaaaaattactcttgaagacgcccgtatacttgcacagcagaagttaaaagagttaactgactcaaactctttaagcattaaaaataataaaatattaaaaaatagtttaaatgagaaaattgaccagccttatctcaaagaagctttccaagtatatataaatcaccacgagttaaaagaaaagacattagccgactatagagaagttatagaaaaatatttaatagacttaagtgaacttaaactgattgatattactgaacnnnnnnnnnncagtatagttatgcaaaagctaatttatctatgcgtgtacttagagcggtctatcgtttttcaattatgtattatcaaaataaaaattgtgaagtaa

SEQ ID NO: 70987 - DNA, 1185 bp, Acinetobacter baumannii
atgcaaaggtatttattacttccattatgtttagctattggactctcctttcagggatgtagttcagaagaagcaacgcaagctgaaacaccttccgcaaaagtaacagtattgagtgtgcaaccccaaactgttgaattcagtgaaaaccttcctgcacgggttcaagcttttcgtatcgctgaaataagacctcaagtgggcggaattattgaaaaagttttgttcactcaaggtagtgaaattaaatctggacaggccttatataaaattaattcagaaatattccaagcagatgttgcaacaaatcaagctgctcttaaaaaaactcaatcagagttagagcgtcttaaagtacaacttgaccgttaccaacaattactacctacaaatgcaattagtaagcaagagttcagcaatgctcaagctcaatatcatcaagcattagctgatgttgctcaaatgaaggcgactttaactaggcaaaatattaatttgcaatatgcgactattcgctcaccgatttccggtcgaattggacagtcttttgttacagaaggagctttagtcggtcaaaccgatgttaagcctttagccatagttcaacaaattgataaagtttatgtagatgttaaacaatcagtaacagcatatgaaaaattacaagccgctcttaaaagtggcaaattatcggctaaccaaaatgagttagtacaaattttaaatagccaaggtacaccatatgatgttacagcgaaattattatttgaggatattaatgtcgatcctgaaacaggtgatgtaacaattcgaattgaagtagacaataaaaatcgcaaacttcttccaggtatgtatgtgcgcgttaagctaagtcgctcttccgtccctaatgctctacttattccagaacaagctattcaatacgaccaagggggacatccccaagtttttgttctaaacaataaagcaactgctgagttgagaaaaatagacttaggacagcaacatgatcagttttatgttgtaaatcatggattgtctaaaggcgataaagtcatagttgaaggaatcgatcgtattcaaccagaaataaagcttgaagcaactccttggaaagctcctatatcagaacacgatcaatctaacttaaatgggacgcataaatcacaaggagacaaatga

SEQ ID NO: 70988 - DNA, 1395 bp, Acinetobacter baumannii
atgtcgaaatcgactgtaactcatcgtgcaatcctgatttctacgctttcaaccgtattgactgcttgtatgaatatgcaagcaccaacgcctgtaatcaaatcagatattcctcagaactttacacaaacggtatcaggagcctcaattgcggctcaaggttataaagatttcttttctgatccgcgtttactacaagtgatagagttaagcttaaataacaatcgtgatttacgtacggcaacattaaatatccaacgtgcacagcagcaatatcagattactaaaaatgaccagttacctatgattggagcaactggtagtgctgtaagagaagtcaacccatcaataaatcccaataatccctactctacttttcaagtcggtcttggagtaactgcgtatgagttagatttctggggacgtgttaagagcttaaaagatgcggcattaaataattactttgcaactcaaagtgcaagagaagcagtgcaaataagtttagtgagccaagttagtcaggcatggctaaattatgcgtttgcaaaagcaaatttaaatcttgctgaacaaacattaaaagcacagcttgattcatttaatttgaataagaaacgttttgatgtaggtatagatagtgaaatacctttgcgccaagcacagatctcagttgaaacagctaggaatgatgttgctgcgtatagaacacaagtctcacaagcacaaaacctactgaatctactagctggacaaagtgttccacaaaacttgctccccaataaggccgttagaagtattacttctgagagcaattttgcaacaggaataccaagcgatttattgaataaccgcccagatctcagagctgccgaatatcaacttcgtgcagctggagcaaatatcggcgcagccaaagcgagaatgtttcccacaattagtttaactggctcagcaggatacgcttctacagagctcaaagatttatttaaatctggcggctttgcatggtcagttggtcctagcatagacctgcctatttttgattggggcacaagaaaagccaatattaaaatttctgaaacggagcaaaaaattgccgttgctgattatgaaaaggcaatccaatcagcatttcgtgaagtcaatgatgcgctagctgctcatacatatatagatgaacgcttaaatgctcaacaacgtttggttagtgcaaccgataccacttataaattatctacagctcgctttagagctggaattgatagttatttgactgttttggatgctcaacgttctgcatatgcggctcaacaaggtttattaattcttgaacaaactaaattaaataatcaaattgaactctataaagccttgggtggaggggtaaataaataa

SEQ ID NO: 70989 - DNA, 408 bp, Acinetobacter baumannii
atgaagaaaaattcaaaacttgatcaagatatactttttattaaattactatttaagccatctgccaaagtgactgcggatgaagttgattactaccgaaaatatcctgatcagattgaccaagttacagcacctattaatattcataaaatattcttatgggtgggggcctttttaggagtagttattgtcgcaatggctaaatttctaaaattttctggaatcttaaactttctgtcagaaggggttttggaatttgttattgatattatttatgaaagtggaattgctttaattggtgcagcagttacagcttatatgcttggagtcttgttaaacaaacagcaagagagtgctatgaaatggcgagaagaaattcgtaaacgtatagaagaaactgaacaatag

SEQ ID NO: 70990 - DNA, 864 bp, Acinetobacter baumannii
atggagtctttgaattctaataaacaatccggatacttagctttagattttgacattccgatttcatttggcgatagtcatcaaattagtttcagacaagataatagagaaaattttaataaacttataaaattaacatataccgaaagagaggaattaaccttagagaatttatctttccaaacagatgaatatggcgttaatttagtaaaactacatggaggtcttaatgaactaaaatataaagatggtcagtatttatgcaacttaagcctagatgtcgaaaatgctactgaattatcaaataactttaacgatatgatggaaatgtgccattatcttccaaatggtgagaaactccactctgcacaggattggattattactaacatggataatgagttagatatagctgccaaatctatgttaactggtggtgataaatatagtatttcctatagtcagaaaaagggagaggaaaagcttatattgttttcaaaaaaattagaaaaaattgatactttaacaataattggatatggatttaatgatcgtcatatcaataataaaatctatagagcattaattttaaatcctcagttaaaaattaagattgtagatccatatgcaaagtatccggattgtttattagaattcaaagactccattcaacttatacgttctgatgtagcaaattggatctattatgaagaaaatagtactgatacagaacataaatggaatcctgaattgataccttacaatgatgctatcaagagctccagagagattttgaagattgctattatgagaatggtaacaattaaatatagaccctctcaatctattatcaaaacttcttaa

SEQ ID NO: 70991 - DNA, 387 bp, Acinetobacter baumannii
  misc_feature (345)..(354): n is a, c, g, or t
atgacacaatgctatctgctcgcagcaggattctcttatcaatttggtatgcctttagcgtcagatctaacagaggtatttttatcaatctttgataaagagtatattactcttctagcagatggcttatctaaaacttttccttatggtgaagaatatccactaagtcgggatgctctatttgaagcttttgaattgctgctcagttataaagagaagaatgagcaaaactatgaacttataataaatgctgtaaaaaatcttacaaagccaagtacttctcaatctgaaaggcacagctatgaatatgtttttggtatcctatatgggataatacatactatnnnnnnnnnnacgtataagttgaatggagtctttgaattctaa

SEQ ID NO: 70992 - DNA, 966 bp, Acinetobacter baumannii
atggatgatgctactaagaactttttttatcacatattttttcgtttagagatgtataagcgttcaggtgaagagtttcaaattttcttctctgatatcatgaattatacagatccaaattttattaaagttgcaccttttggtggggatgggggaaatgatggatgtgacccaaataaaggacattattaccaaatatattctcctagaccgacaacgtcagtcaaactgactcattcgacagttcttcagaaatctattactgattttcataaattgaatgaacattggaataatgtaactggtttacctaaaatttcggaatatttttttgtatataatgatcgttttcaaggtattcccacagatatagtgtctttactagctaatttaaagaaagtacatagcctaaataattctgaatgtatttattcaaatcaaattgaggataagtttgcagatttaccagagtataaaaagttaagattactcggtagacctcctatttctgaagcaccgtttgagattgatccatcagcactaggccaattacttcaacatctttcaacacagagtgtaaatactttaggttttttagaaattgatgctcccatttggaatgaaaaaatttatttcaactcaattagtagtggtttaaacaataggctaactgatcgtagccatcaaggttatcgagttaagaattttctttctcagagcaagacaagtgatgcacaagaaatatctcaacaagtgaatcgtatttacaaagaaagtaaaagctttattccagattctttagaaaactatgcggatatgagatacttctggatggttgatagactgattccttcacaaatatttcaagaaaacaacccttatgccatcagagcttatcgtgatgcttctgaaatcatcttagctcattattttgatacgtgtgatgtttatgacaatcctaactag

SEQ ID NO: 70993 - DNA, 723 bp, Acinetobacter baumannii
atgtatgcttcatggagtaaagataaaggtgcattcggtaaacattgggatgaacatgatgctttaatcattcagtttgatggtcgaaaacattggaagatgtttggaaaagctgatgaaaatgctgtttcacatgaagatagtaaaggtacgagtgaagagcttttaagcgagtttgttatggaaaagggggatatattatatattcctatgggacaagttcattctgttgagatggaggatgatatttctttacatgcgacagttggaattagacgattaacagggcttgatctttttgcatggttgaaagatatggaagatttcttcaaaaatctctcgactatccagtgggatactaaagcaggaactacgagtgtagaaagtcatataaagtctaaaatttcaactagaccttatataagttttcctaatgtggggctttcgagtgaaaacaaacaattagataataaaaaatttgctattaattcttttattacctatataggagatcataaatctggactcaaagttagcgatggtgttaaaaaatgggtggttccttctagtgtagctgtaagttttaaacaacttttagacggtgagcttgttgattatgattcaatttatttagaaggtctaaataaaggtgttgataaaaatatgattgaaaaaatctgtagtgatatgttagatgaaggtgtggtaactttacacttctag

SEQ ID NO: 70994 - DNA, 1350 bp, Acinetobacter baumannii
atggaaaaaaatgtaaacaaggaacgtgctgagttacggcctcatatacaaatagtgagagatactattgaaaataaccgaaagaaatattttttcgctgaaaatagtcagtttaaatttggtccgattatatttagtgtagtaggtgtattttttaatagtcatagtcatgcttcagctcttgaacagtcgggccaatcgatattgccttttttagagactggtaattatgcagaagtaaatgcttttgctattgatccttctgtttctggtgtagttcatgatcgtccagatcttgttcggcctaatcaaagtcgtgatacaggagatattgggcaagataatcagttctatacagctgcattaaagttgcaattaacggatcagattagctttggtatgctttatgatcaaccttttgctgcaaaaacagcctatccacttctttcaaataatagttattctgatgatgtcagtggtgaaggtacatccgtaaatgtaaaaagccaaaatttgagtttcgttttaggttattcacctattaaaaattttcaaatttatggtggacctgtttatcaaagtgtagaaggtaatgtgtcattcagaggaatggcatataccgaagcttttaatggatacaatgctaattttaaagaaaagggtggactaggttggctggtggggggaagttatcaaattcctgagattgcactcaaagcagcagtaacttatcgttcgaaaattaagtatgattttcaagtagatgaaaatatttatggtgaaccactacaattagttgcaccagcaaaaacaagaatcgaaacaccgcaatcattaaatatagattttcaaacaggtattgctgaaaagacgcttgcttacatgaaccttagatgggtgaattggaaaaaatttaatattcgacctattcaatacgatgcacttacagcaatctatatggatacattaacgggaggagcatataaacaaggtattgatttggattcttaccaaaaagatcaatacagtgtaactttgggattaggacaacagttaactgaccgctggagtattggctcagatattggttgggattctggatcgggtactcctgcttcaacacttggacccgtgaaaggtttttggtcttttggccttggtgctcaatttaatccaacgcctaattattttattgctgctggcgtaaaatatttctggttaggggatactaaaactgaaggtggtggttattttttaccaatcgatggtattaaagatttttcagaacaggctgagtttaaaaataatcacgcaattgcgtatgcattaaagtttggttaccgcttttaa

SEQ ID NO: 70995 - DNA, 627 bp, Acinetobacter baumannii
atgattgatgagtttgaacccatattacttcctttaatcactcaacatttttataagtttaataaagaattagtaattaatagtgttcgtattgatcgaaaaaatttacgtcaagaactagtctcaggaagaattgatttttcaatagacgtcaatcattccattgaggaaggcattgcacaacaaacttgtttaaaagataaattagttattatgtgccataaagaacacccaattttaaaatccgggttaactctagaaaattatttagatgctaaacatattacggtatctgctcgaccaactggaagagtatttgaagattttatactatcaaaacaaggatttaagagatcgattaaacttcgctgtcaacaatatcaaacagctattagtatgctagctcaaacagaataccttcttacaatatcttacacacaggcttcctaccataaaaaaaactatccagatgtaaatatccatccaataccagcgaaaattgaaggatacgaaatgaatctttattgggatgaagaaaaatctcaagaagaagaaatcatgtggtgtaaaacacagttaatagaaattataaatactctccaaaaacagtcagaccatagagactaa

SEQ ID NO: 70996 - DNA, 879 bp, Acinetobacter baumannii
atggctcttcctagtgtagatcctatcgctaatactttgaataaacttttttctccaaaacgtgcttttgatcttattagacgtaagaatattacgttaagtcgagctgtttataaattaagccgtcaattcccaagtgcaatgcgtcgtatattaatcgcagatgtacgaagaaaacttcctaaagactttgatgtatctactcatttttctccaaaatataatccctgggacgaacgtctatgtgtagtaccagatggcgatatgtttaaagcaatttcttccggaaaagcatctgtagtaaccgatcatatcgataaatttactaaagatggtattttactaaaatctggaaaagtattagaagccgatattatcattaccgctacaggtttaaacgccctaccatttagtcgaattcaattatccgttgatggtaaaacaataaactatcccgacactacaatatttaaatccatgatgttgtcagatgtacctaattttgcattcgcatttgggtataccaatattgcttggactttaaaaattgatctcatctggaaacacttctgtagacttttagactacatggatcagaaccaatatggaacttttacgccagtcatcagtaacaaaaatatgaaacgtgtaccttttgttgatttgaattcgggatatattcaaagaagtattgcacaatttccaaaagccggtacggaaggtccatggactttattacaagattatgagtttgacctcgaaagactggataagggacctgtatttgataaggaattacagtttaccaatatcaaatcaaagaaaaaattaactttggttacagactcatcacaggatgaagcaaaagtacaagcttaa

SEQ ID NO: 70997 - DNA, 1371 bp, Acinetobacter baumannii
atgagtatttttaaaacaacaataaaagttcaggaacgaataacaaataattttatagagcttcctgtgatttttgatgcagaaggtaaacctttttataagcttgtgcagtattgtcttcttaagtttactgttagtaagtttagactctcatcgttaaagcatgcagtctatgctgttgaattatatctaaagttcaatttagcgaataaagataaagtgaagaactcgaaagagatgtttagacttttttttgaggctttatataaaggtacgataaatgataatggacatgatgagagcgagttatattggaaaccttttaaacctcatacagcaagcatttatcttgacgctttaagtaagtttggtgattggttacataaggagtatggtaatgaattacttaatccaataatcgaacacgactacaaaacaaaaatacttttacaatacgcttactattataggaatagagcgaatattctttctcacttgcaaacgagaaaaaatattaattttaacttttctcgtcaatataaaattagaaatactataaaaatagaaaaaggggatatacaacagtttcctgacattttattcaagagactacttaaatatggatacgaagctgtttcagataaaagaatggctgtacgagatatgttaatacttttattgatacatggatgtggtctaagaatctcagaaccattccacttatggatccatgacgttaacatattaaataaaactattaaaatttttcatcccaagaatgggaatgctccttctgaagctaataataagattacaaggcaagaatatttgtggaagaactataaattaaagccacgaactgatgttattggaaatcaatatttaggttggaaaagtgctagtgtgaataaggaaggggcaattgatttattttggaaagaaagtgaaatgagggattttttctttgaactatggactatttatctatcatatttggcagtattaacaatagatcatccttatgcttttatgaatttcaataaaaaggactttttaaagccttatacactatcaagttttcagaaaaactatttagctgcaatggctagaattggtgaaaaagttaataaggagtcaggtttatccacacatgggcataggcataattatgcaatgactttaagagaaagagggcatactccattgattattcaacgtgctctgcatcaatcgaatatatattcgcaagaaccatatgtaacgggaagctatgcacaagctattaagaaatttaaggaactagaaaatgagagggaaaagagcgaacctgaagtaaatgatatgtggaatgacctactgttaaattattga

SEQ ID NO: 70998 - DNA, 1071 bp, Acinetobacter baumannii
atgaaaaataaatacggtattagtaaacagcttattattactctgagtattctaaattttagtataactgtcttaactttaattttaggatattcaatttatactattgctcttaaaacaaagattgttacttgggaaatgatgtcaacaagttggccttctcttcaagtaattgactggctttggtactttttggttttaacaatggggtttattttatccatctttttaggaatgcatctcgcccgtagatttgttactccgattgaatcaattgctattgcaacaaaaaaaattagccaaggagacttgacctcaagagttcaagaacctgataactgttctaaagaaatttcagaactgattaataattttaatgatatggcacaaaaattagaattatcaattaataatgctcaagtatggaatgcagctattgctcatgagctaagaacacctataactattcttcaaggacgtttacaaggaattgtggatgaagtgtttgaggctacgcctaatttaatgagaagtctgttaacacaagtagaaggtttatcttttttagtggaagatttaaggactttaagtttaattgagaatgaccaattaaaattaaatatagaaccaacaaattttaatgagtgtattgaaaaaatatctttaatgtttaaagaaaaattaaatgatgcaaatcttattattcataaagagttaacaagtgaaattgtttattgtgatagacgacgcatagagcaaattttgattgcattaattgataatacaataagatatgccaattctggtattcttagaatttcctcccaaattaatgaaaaacattggattttaagaatccaggatgaaggccctgggataccagctatctatcattcagaattattcaaacctttttttagggttgaaaattcgagaaacaagaggtttgggggaactggcctaggtttagcggtcgtacatgcgattgtttcagcacattcaggagagattaaatatgaaaataagaattgtagtagtgtatttaccattacaattcctattttaaactag

SEQ ID NO: 70999 - DNA, 432 bp, Acinetobacter baumannii
atgaaattttataaaatatttatatttgcttatctacacattattattgttggctgtggatctatccccaaggatatgcattcccttagtacaactttaaataatggaattaaaacactaaatgctaccctcaacgatgactctactacttccactagacataaaacaaataataaaagcggtatgttgactaacagtcaatgtcaaaatacaaaaggtaaaacaaaatcccaaattgagattatggcaaatgaaaaactcactgatgctcgtgcatattcattgaactcttacgctgtaacatataactttcaaattagtgaccgagtaagtaggtatggtgtgaatagagattctaaagctatctgctctctaacttttgatggaaaccagccctcttcaaaagttttgagctggagtgttattggttaa

SEQ ID NO: 71000 - DNA, 255 bp, Acinetobacter baumannii
atggaagttaattatttttactacaaggaaaacattcagtgtgatatctgtcctaatctctgccacacaggctatggcgtattaaaaacagaaaacaagttgaactcctctgccagcaatcaaagttatgaaatttttttatgtaaatcttgttttttaggcacagtttcttatttgaaaagtcaaaaagaattgaattatttatttgatgaaaattttgactttgcacaaatagataatctcgggctaaaataa

SEQ ID NO: 71001 - DNA, 180 bp, Acinetobacter baumannii
atgctagcagggtttttaatgcgttttacttctgactatatatggcgaaatgaaatttgttcagataaaagagaagcttttgatatattgtttaaatgtggtgatgagaaaacaagtgtgggaatgaatttcgttttatcaaagtcaattacaagtgaattgtttaattcagtaaagtaa

SEQ ID NO: 71002 - DNA, 303 bp, Acinetobacter baumannii
atgtttgattcaaagaaacatgatgtgcataaacttgtatatggtaatgaggctaaaagttatctagatgattttaaatcatcattgggaactattgtatttctaggagaacgtgagtataccatcacaaaagcacatttttactcacctaaaaagattgatgactcaaattcttacagtcgagaattggaagagtttatagatattgaggtgttagttgaaggtttatatccatatcatgcaacgcttggacgtaagtttggctctaagagctggcaatacattccgaatacggcgtattag

SEQ ID NO: 71003 - DNA, 429 bp, Acinetobacter baumannii
  misc_feature (350)..(359): n is a, c, g, or t
atgggtaagacccttaatgagacattagaaggctttattggtaaaaccttagtaaataatattaatactaagttagatactttagttaatagtatcaatgaagatctgaactattatacttataaaacaccgcaaacaagacaacaaaaactcaggaaaacagatatttataaattgattacagatgcttattttggtataagacagatacatcaagattttgatggtaaacctattccgataacaaaattaagttcaggtgaaaaacagaaagctattttaaatatagctagtattttattagaaaaaaatcatccaaaaaatgttgataagtatattattttcgcatnnnnnnnnnnttgcatatttctgcttgttttgatatttttcaacaattgcataaaactagtaccttttgtaatcagttaa

SEQ ID NO: 71004 - DNA, 696 bp, Acinetobacter baumannii
atgcgtctaaaagatttagttcttgaaacgggtattgcacatgcttctacacacaggatattgaatgatttaattaaagttggatttgttcagcaattagataataaagcatatcaacttggaccagaattatttactttaggcctaagtgcgcctgtgccaatttcagacttaaatactttagaagaatttgcccaagagttggctgatgaatgtggtgatttagtatgtattggattaaaacaatttaatggggtacggtatatagctgtttgtcaggggaaaaatccttttgttccttacactatacataaaggagatttgaaaccttttacagcaacttattcaggtatagcacttttagcttatttaaaagaaggggagcaaagatactggattcaaaaaccgcaattagatgctcctacagaatggattactgagaatcaattaaatttaaaaaaaaatatacctgattttataaataaaatgaaaaaggataaatatatatatgctcaaaatttaatttatccaaatattagtggcattacaacaattataccaactaagaacggaggaataccttatatgacactttctatttcagctagtactgaacgtcttcaaccagaatatgcaaataagctaataccaaaactaatgagaactgcaaacaaaatttcaaaattaatttattaa

SEQ ID NO: 71005 - DNA, 159 bp, Acinetobacter baumannii
atgaataaattaaacaggtttgattcttttagattattagtagaacgtttagagcaagaaaactcaaactcttttaaaggcatcttaaatgatttttttgacaaaaatgaaaataaatttctaaaactaactggtattaatgatattgaagaggattga

SEQ ID NO: 71006 - DNA, 402 bp, Acinetobacter baumannii
gtggcaaaggaaatagatatagataaatttatttcggtcttaccagaggggtatgacactgttgcaggagagcatggggttaaattttcaggtggtgaaagacagcgtatagcactagcgagagctatacttagaaaatcctctattatattgctagatgagcctacatcatcattagatgtaaaaactgaaaataatattatgagcttaatttttgatatttttaaagataaaactatattaattattgctcatcgattacaaagtattgttaatgtagataaaatctttgttgttgataatggagctgtggttgaagaaggttcttataatgacttaatgcaaaatgattttatgttttcttctcttgtgaatttaaatgaaatcaaaaaaatttcttaa

SEQ ID NO: 71007 - DNA, 162 bp, Acinetobacter baumannii
atgtctgctgaaactgtgcctgtacctggcaatgaagtgttgcctgcagggtcagtcgctgttgcagtcactgtatcgccatccaccaggttacctgggtttggtactgaccagctgccatctgtgccagctaccacggttgcagttgtgccatcaggataa

SEQ ID NO: 71008 - DNA, 171 bp, Acinetobacter baumannii
atgaataacaatcaagttaataatctaattgaagatcaagatgatgtggacttaatctttcttggatcagtaaaagatgaaactaaaggttttgactttgaaggaactgttgagccaagagattttgataaatataataaagatcttcaagaaattgactctatgccataa

SEQ ID NO: 71009 - DNA, 393 bp, Acinetobacter baumannii
ttgtgtgtattaataatattactttggcaaatttcaaaactgaatttattttataagcttcagcgttttgctttaaattttgttattattttttcagctggtattagtttttatttagcttcaaaaagtggtgagagttttaatgaaattcttagttatagaccggctttttttaagcaatatacagatcttctgtttgaaaataatatgagtattatttttggtgttcctttgaatgaagatattactgtggataatagctatattattttttcaggggcaataggtgttgttctttcttttattctttatgttttttcgcctattatttcttataagaaatatatacctcgtgcatatgtaattatgattctgtctcttatacacatctga

SEQ ID NO: 71010 - DNA, 288 bp, Acinetobacter baumannii
atgaggaataaaaaaaacaataattttgatgagcagaagcttattaaaattatcgggctatataattcagcattagtctttactccttggagaggcattaataaatgtcttttgaaatcaatggctctaaagtacttcttaaatttaaatggttttagtgctgatttaataattggtgtaagggcgaatcccttttttgcacatgcatggttacaagttgataatgtagtacttaatgatgatatagacaaggttggcgattatcaacctatcatgaggattagatag

SEQ ID NO: 71011 - DNA, 300 bp, Acinetobacter baumannii
atggatattgctactacccctcctaaatatacttctgcctatacagcatatcaattgaagaaactcttgctacctaaagagcttcaatctccttatgaaaatatttttcagcaaacgcaaggaataaagaatgagattcataagaatcaactcgaaattgaatgtttaaatgaatgttttaaagattttccagctatccgttttcagatcgaatttttaattcaagagaagcaacaggaactaatcaagttagagtccaaagtaaatgctcttacagaactcatagaaacttttaactaa

SEQ ID NO: 71012 - DNA, 228 bp, Acinetobacter baumannii
atgattgcaaccaagctaccatctgcaggagcaacaacttctaaaacaactttgtcggtttcaatatcacagattacttcatcacgtgatacaggttcacccacctttttatgccaagttgcgatggttccatctgcaacagactctgggaataccggtgctttaatttcggttgccattattgagaatctcctgattgttcagcttcgattgccaatgcatcattaa

SEQ ID NO: 71013 - DNA, 516 bp, Acinetobacter baumannii
atgatatctaagttgtatcaatccacttcgctacatgcactttttagaaagtctcaatttacgatctttgctataactttctttatttgctcttttacatttgtatcaatttccgtttttacgatggaaacttatgcaaaacaaaatttgcaattacttagccatactcttcttgagcgtattcagcctgccgttgtgtttaacgataagatcacgatcgaacaaatcttaaatgaatacacaaatgatcactctattcgagcaattcatatttatgactctgaacatcacctgattgctcaaagttttaagttgtcgagtcaaacttcggtgttagagaaatggtttgatcactggtttttaaatgagccggtacatttgacgatttatcatcatcaacagaatgtaggtgaactcaccctttttggtagctctgaaaaaatattacaatttttaaagatgattatggtcggccttgctattgcgatgctgtttattgtttgtgcattgtggtag

SEQ ID NO: 71014 - DNA, 1221 bp, Acinetobacter baumannii
atgggtacatatgtctcccttgaaacatacgtttattggactgacgcatctggtggtccgatcatccagattgcacgaggtacagattcgaaacttactgctgaacgccgtagcaccagtacatcaacttggggctcatggactcaggacatcaaaacccttagcgacgggcttgccaataaagctgaagcatcggcggtaaatacgttagacgccaaagtttcaaccattgatggcaaagtttcaactcaagccagcaatattgttagtttacaaactgctgtcggtggaaacacaagtgctatctctgagcagtcaaaatcaattgatggcattagaaacatcaagacgattacgattgacaataacggtgtaatgtcaggctatggcttaatctctgacctagttaatggtaaagtgacttccacttttggcgtcaatgcagacaacttctacattggccctccaagtggtggcaaaaagccattcctggtcacaacaaccaacacaaccgttaatggtgtgacttacccgccgggtacttggattgataccgcatacattgctacggcatctatcaagagcgcgcacatccaagatgcagcaattactactgcaaaaattgctgatgcggcaattgataccgcaaaaatcaaagatgcggctatcacaaacgccaaaattgccgatttaacggtcgatacgatcaaaatcaaagacaatgcaattacggtggcaactgttgctgaaaatacacaagccagcaagatcttaacgcctagtagttcaacctttgatgcctgtcaggttacggtagtcacttcgggtacaaactttgtgaaaattgatgtttcgccatttttgtacgcttggaataaatattccagcccacaaatctacctagatatttaccgtgatgacaccttgattaaaaccttcaacttgccgtggattcaaagcactgaagtattcaaggatagatcttggacagaaggtggttcttatgatgttctttacaatattgtcgtatacaccatgaacacaatggctggttcgatgtttacgacattagacagacctgcggctggcacacacgtctacaaggcaacgctcagaagaacgaccaactggggacgggatgacgcaatggacatggcgcgtcgatacaacgagattgagtttacaaacgctcttattttaatcacggaggttaaaaaataa

SEQ ID NO: 71015 - DNA, 216 bp, Acinetobacter baumannii
atgctttcagaaaaattttataagattttttcttacatagttatatcttcaataacttcttctttctttgttttaattgagagtttttttgatagtattgtagaggtgtataaattagaaaatagttcatttagaacttttataagaattagagaagcatgtttgataaattttttgacatacagattaaatttcgaaatttttaaatctaaataa

SEQ ID NO: 71016 - DNA, 672 bp, Acinetobacter baumannii
atggcaaaagactttaatagccctaaagtagtcgaaggatatgatgtgcatattcgtaaattaattccgggctatgaagtgatccaccaacaggtggatgccattttgcagtcggtgttgccaccagatgctcatatcttaattgtgggctgtggtacgggttacgaactcgattatttacttaaaagacatccaaactggcaatttacagcggttgatccatctttaaccatgctgcaaaaagctcaggagcaggtggagattttaggtaaatctacccaagtcacttttgttcacggtgaaacttcagctttacctctcgagagttgctttgatgctgcactttctattctcgtggctcattttattgcagatgacataaaaccagccttctttaaggatatttataagcgcttaaaagaaaaggcgcctttacttacctatgacctcatgacttgtgtaaatccacagcagcttcaagcattacattatttgtgtttggctcaagggttaacagaagaacaatgtcaaaaaatgttggagcgtatggcggaggacttttttagtttaacgactgaaggatatataaaacttttggaagagacaggctttgaaagcgtacagccatatacgcaaattttgacttatcaagggattattgcaaaaaaataa

SEQ ID NO: 71017 - DNA, 1287 bp, Acinetobacter baumannii; identical to SEQ ID NO: 48626

SEQ ID NO: 71018 - DNA, 1239 bp, Acinetobacter baumannii
atgaaactttatcaagctaccctattttcttttgttttaattacgagctttgcacaagctgatgtagaaaacagccaatggattaccacttggtctgcgagccctcaaaaagtctggaataaagacttcgtttttccaacactcattccagagcaagtatctaatcagactattagacaaatgagtaaaattagtttgggcggtgaagcggttcggctcgtttttaccaatcaatatggtaaacagccactttatattgatgaaacaacgattggtttagcgaacgcagcaactctaaaatctaagagcatctatcccgtttatttttctggtcaacttaaagcaagaattttacccggcaaacaactcataagtgatccaattcagttgcctgtacccgatcatactcaattggtggtgaatagctttattcaaaagcctacaacgtttaaaacatttcattgggatgccaaacaaaccagttggctgattagaggaaatcagacaacaaatttaactacaccaatcgatgccaaaacaacgacggcacggttattactgtctgcaatagaggtaaaacccaaacaaaaggctcatgtagttgcagttgttggagactcaattaccgatggggcgactgcaaccttagatgcaaatacaagatggaccgattttttagcgaaacgtttatctgtacatcgtatggccgtagttaataatggcatttcaggaaatcgattacttaccgatggtatgggtgatagcgttttaaaacgtttaaacagtgagatatttcaatattcaggcgttaaaactttaattgttttggttggtatcaatgacatttcatggcccggtacagcttttgcacctaaacagcaaataccctcttttgaggcgctcactcaaggttatcgacgtgttgtaagtgaggcccataaacataatattcaggtgattggtacaaccttacttccgttctctggtgctttgcctaatacccctttagataattattatcaacccaacaaagatcaattacgtcagcgcattaaccactggataagaactagccatacctttgatggtgtgcttgatcttgatgaaggcttaaaagatccaaaacatcccaatcgattaaatccaatttatgattctggagatcatttacatcctaatgatcgcggcaatcagcatatggcagaattggtagatttagatcaaattattaaaaattaa

SEQ ID NO: 71019 - DNA, 906 bp, Acinetobacter baumannii
atgtcttattttgatatcaatcgttctggcgagttggcaattattataagagtggtcgagcttggaagtttttcagcggtagcaagagcatgtaacatgacgccgtctgccgtaagcaagttaatttctcgtttagaaaaaagattgggtgtcaggctactcaatcgttcaacacgtcagtttcagcttaccagtgaaggatgccagttttatgagcaaggcattcaaatactcaatgacttggacgaactggaacaatcggttaccgcaaatcatataccgaaagggcgaattagaatccataccagtttttcatattggatacactttttattgccatgcattagtttgtttaatcaacgttacccggaaattgaattagaagctcatttgagtgatgaagtaattaatttggttgaacaaagaattgatgttgcgattcgaacaggacctttgaaaagctccaatctggtggcccgctcgcttggcagtacttataaacagtatgtttgctctcctctatatattgaaaagtacggttgtcctgagcatccagatgaactacatgaacatcagcttttagatgtaagttatcagcgccagaacaaaacctggttatttaaaaaagcaactcaggaaatcagcctaaccccctctaaagttttaaaagtaaaccatggcgaagcaattttacagttagcactggcaggtgccggtattgctcaactaaatgaattccagattcgaaatgcgttacagcaaaaacaactcgtcaaaattcttgaagattggaatattcatgcttctgaagaatttcatgctgtctggattggccacgataagtatgttcctaatcgcgtacgtacattcttggattttttggtagagcatgcctctataaattag

SEQ ID NO: 71020 - DNA, 291 bp, Acinetobacter baumannii
atgttttttctctatcgttttgttttggtgagccttctgacaataggtgttttaaatttgatggggtgcaggccaatgagtaaaaatgaatttaatacgcgttgtgtatgggccggacatgacctttcagcgtgtaattgtatttataattctttagagcagcattattcacctcaatttgtagaaagtttaccaaaattaagtttgcaaaatattgatgcaaaaatgaactttgtagaaaccatgaatcaaacgatgcagcagtgccaattgagtgcgagcaaacactaa

SEQ ID NO: 71021 - DNA, 147 bp, Acinetobacter baumannii
atgactattattctatattttttaaattcttttattaaacctacttacattcaacctcttttactcaagcagtcatttcttagagttctttctcatcctctgtttaaaagaactacacactatagagttcgaaaaatttttacttaa

SEQ ID NO: 71022 - DNA, 144 bp, Acinetobacter baumannii; identical to SEQ ID NO: 44680

SEQ ID NO: 71023 - DNA, 429 bp, Acinetobacter baumannii; identical to SEQ ID NO: 55994

SEQ ID NO: 71024 - DNA, 222 bp, Acinetobacter baumannii
atgtttgtatattttacagatggaacttgcattaatgattctgagatttatggcgtaaaagccaagtatgagcaaaataagtatgtagtggaagttactattaagccgacacatgtactcgctacaacaccgagcgtacaatttaaaaaagaagtttttgatgatccaaatttagcaaatcaatatcttagtcataattttaatatgccaccatttttttaa

SEQ ID NO: 71025 - DNA, 318 bp, Acinetobacter baumannii
atgacagatcaaaatacagatcatgctcaattggtagctggcgatcataactattctgactctcgctggcgcgaaagctatcttactcgaccttattatcaagaagcgcaattaactacaccagatctagattatgatcgtgatttttctgcagcttatgaacttggtcatcgagctcgttctgaatctaaagaaggaactcagtttgaagatatggaaggcagcttgcagcaaaaatgggaagagctaaaagctgagtcccgcctaaaatgggaacacgctaaacaagcgattaaagatgcgtgggatgatatttaa

SEQ ID NO: 71026 - DNA, 222 bp, Acinetobacter baumannii
atgagcactactaataatcaagcaaatcaacgcaataatcagcagcaacaacaacagcaaaatgacaaccgtaatcaacagcaacacggtaaccaacagcaaaacgatcaacagcaacaaaataaccagcaacaacagcaaaatgataaccgcggccaacaacaaggatctaaccaaaaagattctggccaacaaaactcaaataacaaccaacaacgttaa

SEQ ID NO: 71027 - DNA, 480 bp, Acinetobacter baumannii
atgttcaataaatgttgcgaattattagcaaaggaaaaaattaaaattgcattttttgaaagtgcctctgcgggctaccttgcttatcgtttctctttaagtccttattcaggcgatattctgattggaagccttgtgagttacgaccttcgcgtaaaggaaaataccttgcatatttcagaagagcttattgaaaaatatactgcagaatcaatgcaagtaactgttgaaatgattaataaaggtaaagaacttttacatgctgacctgtatgttgcctgcacaggtcttttgaaaaaaggcggctctgaaacaccagaaaaacctgtaggtactttcttttactcaatatattataaaaataatttttataattttagacgtgttttaaggggtcctgcctttttaaaactaagaaagttgatttactatgttactcaagatataaaacttattatattagaagacaaaaggcgttaa

SEQ ID NO: 71028 - DNA, 1410 bp, Acinetobacter baumannii
atgcctgttgtagtgaaaaaacgattattagacttattacaagataatcaacaaaattattatgaattgtttgtttttttccttgatcctgatgtttctagctttgagaaagagaaaaaggctagagattttcttgttaaagagatagataaactagagatgaaggaaatagattttccttcggatatcaatttgattaaggcatggtgtgaaaacgataataaaaaaaattgtcaggaatttcaggcatatttaaatcgtagacaatctggtcaagatagagagtattttaagaacgtcgctcaggcatttgagtttttaataaaggtatctccaaccaaaaaagtagacggtgcatggctatatagctcagtgcattattggaatgatcctatttttcatgaattaattattacttatctcgaagagcttgggttaggtgagccaaaagcaaaccatgtctgtatctatgatgaccttttacgcagtctagggctagacagtttcgatctgcttttagaagacgagtattatcatcaagcagttgtgcagcttgctctgggttatgcgcctcctgagtttattccagagattgtgggttttaatttaggctatgagcagttaccactgcatcttttaatttcgaattatgagcttgctgaactaggtattgattctaaatactttaatcttcatatcactatcgacaatattgacaatggtcatgcctataaagccattaaagttattgaagatatttataatcaatatagagataaagaactcttcttgaccaagctaaaacgtggttttgcccttaataatcatggggtgtcctcttcaaacattataaaaaatttaaatactgaagactttgtccatagaattttcaaaagaaaggcgcttgtcggtcagttaatccataacgaaaccagacagtttgggtgcaagaccattaatcaatggttatcaaatcccgatgacattgcaggtttaatcactcatttaactgaacacaaatggattaagtttaataccgaccctgaacagagcgtattctggcgaatgattaatgaagaaaatggaaaaatgtttggggtgtttaaccctgtagagcgccaaattattcatgactggattgctggtagtgatcattcttctagcttcttggcatacagcagagaactaaagaatagccagcgtattcaggactatctatttagttatatctcggatggcgaacttgatgcactacaagagcgcgtccaacaatcaagtgaccttgccataaagatttgcaaacttactccgtttcttgccccagattctcatcataaaagtattggtctttggagtactcgtaaatacgtagaactcctttttccttatttaggtacgtttaaaaactag

SEQ ID NO: 71029 - DNA, 2139 bp, Acinetobacter baumannii; identical to SEQ ID NO: 45688

SEQ ID NO: 71030 - DNA, 879 bp, Acinetobacter baumannii
atggaaaatacaacgaatcagtatccatcagaagttcctgcacaagttcaacctcatcaaccaggtgatcaggagaaaatgcatcctgaaccagaaattattaaagcatcccataaaggcagtgaaaaactaaaaggcaaagttgccgtcattagcggtggtgatagcggtataggccgttcagttgccgtactatttgcccgtgaaggtgccgatattgctgtactgtaccttaaagaagaccaagatgccgaaattactaaacagcttattgaaaaggaaggacaacaatgtcttttattaaaaggtgatatttccgatccagaccttgcaaaacaaaatattgataaggttttacagcattttggaaaaattaatattttagtgaataatgcgggtgtgcaatatcaacaaaaagaaattgaaagtattagtaatgaacaattagaaaaaacatttaaaacaaatatttttaccatgttttatttaaccaaagaagccattccttatatggaggaaggcgatagcattattaacaccaccagtattaccagttaccaaggtcatgatgagttgattgactatgcaagtactaaaggtgcaattacctcttttactcgtagtctatcgaacaatttaatgaagcagaaaaaaggtattcgtgtaaatggtgttgcaccaggcccaatctggactccccttattccaagtagtttcgatgccgagactgtcgaaaagtttggtaaagataccccaatgggtagaatgggtcagccaagtgaagtcgcccctgcttatcttttccttgcctcagatgatgcaagttatattactggtcaggttattcatgtaaatggtggtcaaattgttaatggctaa

SEQ ID NO: 71031 - DNA, 414 bp, Acinetobacter baumannii; identical to SEQ ID NO: 49351

SEQ ID NO: 71032 - DNA, 873 bp, Acinetobacter baumannii
  misc_feature (859)..(868): n is a, c, g, or t
atgaaaaagtatgattatgatatagcagtaattggcgctggatgtgcaggtgttgttgcagcacgggatttaagtaatgcaggtcataaggttgttttattagaggcacgtgaccgtattggtggccgaacctatacaggtgaagcatttggccgacaagttgaatttggtggtggttactcacactggactcaaccttatatttggagagaactacaacgctacggaattggcttaaatcctcctacagaagttgataaaacggtttggtttgcagacgggaaactacacacgggaactcaagctgaatatgctgctattgctgaaccattattaacagctttctttaatgacgctcgtcagtggtttcctcttccttatgatgtaaatgctatcgatacgagtgatattgaaaaacaaacattaagagatcgtcttgataccttaaatttatcaacttatgaacgtgacgttttagacggcctattatcaacacttgttcactcttgggatgagcaaggagtcgcacagctcttattctgggcagctacctattttggaaattggggtgcgttctttgaagtagcagggtcttggccaattgccggtggaacacaaaaactcgtaagagctatttataatgattcaggtgctgaattacgacttacaacttcagttgcagccattgatgatcaaggtgagcaggttgttattacgactcaatctggtgaaaagattgtgacaaaaaaagccctcgttgctgttccattaaatgttttatctgacatcaaaattacaccagaggttaataaacctgctcgagatatgattgttgcaaaacatccaatgcgtactgctnnnnnnnnnnattga

SEQ ID NO: 71033 - DNA, 213 bp, Acinetobacter baumannii
atgtcaaagcgccatattttaaaagaagttaatgcgaaaagtatgtgtgggatggaaattgtggtagagcaaatttttgcttcggctgaaatcgaacaaaactggttaccgctttccaagattgtgatttcagataaagttatcaatttagatcaagataacacctttgctcatcccagaacagggaaagtctttaaagttttaaattcttaa

SEQ ID NO: 71034 - DNA, 405 bp, Acinetobacter baumannii
atgaaaccagaacagtttattcgtgagtttggcgaaaagaaggcgagagaggttgttgagggggcgccagagtcagcatctttggtcttttattactttgatgaggttaatgatgaattgctaggaccagaatactacagagacaacggttcccagcatttcaataaagaaaataattcatgggggttttgtttagacccgcaaatcatagtaacggaaccgcatgatgcactagtgagtgttgaggacctcaagcgtctcgtggagtcggttgatttagtaaatagcttaggtggaataaaagcagcacgttcagaagctcataaagattgttttgtatataaccagccattgctagctgctattgcagcatacgaatcaatatacggaggcggggatgagtaa

SEQ ID NO: 71035 - DNA, 201 bp, Acinetobacter baumannii
atggctgttcaaacccttggaagaatgaacgtgagtaatttagcaaatcatccctgctcaggcaaatgcactgattttaaagaagaacagtgctcaacttgtcttattaatcaagatgccccgcatcaaatcgtaaacactcaaaccgatgaagagaaatttctagatcgtgcattcaatgcacaaaaggagatttcatga

SEQ ID NO: 71036 - DNA, 210 bp, Acinetobacter baumannii
gtgggttatacacctaacgttatcggtttcggtggtccattcgacaacaacacaggtaatggctatgaacctgacggctcagcaacggaacagcccgcaatcaacgacaaagttgtagtgcaagctgatcagtacacatcactcgatcaccagcgtgtgaagggtgatagagaaacaggtgaaattacagttgagcgtatagatgactga

SEQ ID NO: 71037 - DNA, 636 bp, Acinetobacter baumannii
atgtgtgcaaactatgaacctatatctaaagaccgagtacacctactagatctccttgagccaacattcgactacaaagatgatgtttatcctagctacgactgccctcttatattttctaaagatggtcagatagaatggcggcaagttaaattcggcatgattccaccttggaaccatgaccttaaattttctaaatacacatacaatgctagaactgagacagccgatacaaagcctagtttccgacatgcatgggctaaaagccagtttgctttgatacctgtagaaaagatctatgaacctaggtatgtgaatggcaaggctgagcgctggggtatctatcgtgaagacggcttacctttcaccgttgcagcaatttacgactctacagtgattgatggccaacaagtaagatcaatgtcaatgttgactattaatgcagataatcaccctttcatgagtcagtttcataaaccagaagatgaaaagcggtctattatcgttattcctgacgagtatcgagaagattggctgaattgcaaaaaagaagatgcagatcaatttttctttgaaatgcccttaggtgaatttactgcagactacttcccaaaaccaaaaaaaagtgcaaattag

SEQ ID NO: 71038 - DNA, 303 bp, Acinetobacter baumannii; identical to SEQ ID NO: 57295

SEQ ID NO: 71039 - DNA, 1779 bp, Acinetobacter baumannii
atgactgtgttaacagaagaaattcgtaaaaagtatgatgctcaacaactagctactgttcagtgccgaaattactatttcaaaagtcctgaagagcttgaaaatgggtttgacagtgctcaaacagcggcagaagagtatccagaagtattaaaagcaatttttgattcaattggcatcgaatatgcgccagaagttgataaagctgtgatgtttggggtatcacaatatcaatcacgtcatggcggtgaattaccgcatccttcaatcattgcagctgcattaactgctggtttaagtggtgcgaaacaagcagctgctttgcctgccgaaacccttagctattacgatagtattaatgaatctggttttgatgatgtaaatcaccagcatcatgaatctgtaagcatcgttccagcaattacagttgctactatcgccaacgttatcgcttatgcaacacctatcgttgctatgattcccaactcaaatggctcaaatgaagtaccgattgtatctattcgctttatcaccaaccgtgattttggtgcaatgaagaaatcagaatacttagatggtgcaaatgcttctaagccttatgttgaaggacgattccgttttgcattgtctaatggtggcgcaggtacaacttatactgtgactgcacgaactggttatgaagacttcaaggctaaaacacctgacgccaaagcgagtttattgccatttattgcgggtaatgtatctatcaagatcaatggtaaagaagttgcgcatactcgaaatcgcagtaaatcaaaattttcaggcaagatttctgctattgctgagaaagacgtagtagtaaacggcgttgaatatcgtgttgttggtagcgaaattgatatttcagctagcaaaattagcgtgacattaaatgaagcattaccagctggtgcgaaaattgaagttcatcttgtggcggattttgatgcgcgtgatggtaatgataactatctattaaccccagtaggtgttgatttcgaacctgaatatgaaacattgattgcgtcacctatcatggcacgggtaacagcttcaacactattacaatctcagctaactaacgaacttaagcttggttttctgggtcaggctttagcaattgtgcaaggtaaaatcttcttagaacaaactgtacgtttattaggtgaagcaaaagatttagctgaatactccgctcgtgaagttacttttgatgcttctcgtggtgtgactggaaaattagcagctgcatttaatacttcaggtgacttgtttgcggaagtaaataaatttattgcagcggccaaattggatattaaccaacgtactggtggctctaccgtagcatttgacttatatgttggcgatactgggtcagtattctttaatcaactgtcaagcgacaagatgccagttaaaaccggatacactgctggttacggtcaaattgtccgtattggtactcttgcagatggtactaacgtttaccacgcaccgtcagcacaagagcttgtagctgaagcagatacagcgtttgatatgcttttagttggtcgtggtaatgagccaattcgtgcgccgttcgttggctttattcaaacgcctctttcagttattgaaactcgaccagatgcgcgtgaatcagtacttactttaatcggtgctcaagcagccgaaatgaacccgttagaacgttatgctgatcaaagctatgtcatccactgtatcaatatgccatccctcaaaaattcgtaa

SEQ ID NO: 71040 - DNA, 942 bp, Acinetobacter baumannii; identical to SEQ ID NO: 49421

SEQ ID NO: 71041 - DNA, 288 bp, Acinetobacter baumannii
atgacgcgcctgcacgatttcgcaccgcttccgtctttacaggaatcatcaaagagttggaccgatcttttgcttgatactgcaagtagtatttctgaaaactgcccaatgcctttatcagatgctttaaaaatgcctttgagttttgaaagtacttacttcaattcatcagcatgggaaaaccgcaagaagtatttagaaaacgaaattgaacgtcacaacgtattcttaaaattaggtcaagaagtcattaagggattaaatgccctagcaagtagaggcagatag

SEQ ID NO: 71042 - DNA, 909 bp, Acinetobacter baumannii
ttggcattggaagatgaatcgttaccatcatttaatccagatgaactatataagattctgacgagtcaattaagtacaccagcatatctgactttaccaaatcctcatgatttaccaatttatgttgcggcacaacgtgcagctacaaagttacgtattcctttggatgctgaaatcaacccaacttttacagctgagcaagcagctcaatttgcgacaagtgtagatgcacaatcacagtttgttcaattcatttggagcccgaacctttgccgcccatctgatgctgtcacgctaagaggtcgaaaggtcccagcttattatttgggccattacatcggcgataaattattacgtaacgcaaagttaaataaacaaggctttgcgccgttaaaaaatgcagtagcttggaaagattatccatttacagcaaaaaacttaagccagatgccgaatattgatcttgaagatgaacagactcaagaaatgttggcaaaggctaaagtaaatgtagttcgcccagttaagtttgaaactacattattcgttttaagtgatgtattaacccagtatcaaagtaaaaatagtgcattgcgtttagttcctgcagctgagattgcggcacgagttacgaataaatgtatcgaaatccttagaacttacatgttccaagctacaccggactatatcaaaaaagctggtgatgaaattcaagagtttttagagggtgcttctagtgaaacaaccggttggttgcaaccggctgaagacctagggggtaaaccttttgagttcagtttaatacctgacaaagactatccatatgagcgtgtacgactctatttagcccatggagttgttggtacaactcgtgccgcaatttttgatgacgacgttttagttaaataa

SEQ ID NO: 71043 - DNA, 618 bp, Acinetobacter baumannii
atgacggtacgtccaattttatttaattcagaaatggttagggctattttaaatggatctaagacgcaaacacgccgaattattaagagtaaagttcaaaaaaaaattgatatagctgaatatcttggagagttctttggtttagaagattcaaaatcaaaaatatcttcttattttcagaaaatttgtccttttggagcaattggcgaccagctttttgttcaagagacgtatggcaccaaaattagaagtttaggtggaactcctcatgagtcatttgtctacaaagcagataacccaaatgaaattgcttattacgactgtaagggaaaggggtatccagttagatggaagccatcttctcgtatgcctcgtaaagcatcacgtattttgcttgaaatagttgatatccgtgttgagcgtttacatgaaattagtgatgtagatgctaaggctgaaggttttgataaacctaaaactgattcaactatgcaaagcaataattctcataacccagttcttaactttcaaaaacattgggaagcaataaaaggtaaagaatcttggaatgaaaacccttgggtttggtgtatttcttttcggaggattgatcaatga

SEQ ID NO: 71044 - DNA, 513 bp, Acinetobacter baumannii; identical to SEQ ID NO: 50974

SEQ ID NO: 71045 - DNA, 714 bp, Acinetobacter baumannii
ttggcggtaccagtcagcagaaaagctggtttagtgcacttacttacgaatgccggtccaaatagtaaagtcttaaatcatcacgttgagattgagttttcaaactttaaatctgtcgtatttgatatcgacaagcaggcattaaccactgtaaaaaaccgcttggctaaaggcaaaatcaaatttcagtgtgattgcgaacgtcatacattctggtaccgctatatggcaactattggcggctacaatttaggacgtgatgagggcggctttccgaaaatacgtaacccgcatttatccggtgtggcttgtaagcatgtattgcgcgttgttaagtggattagttcaccagcagggattgcctaccttaaaaaggaagtagagaaagaccgtaagaaacaagtaggtgcacggtataagcaaacagataagcaaatacagaattcaataaacgagcaagtaaaggatttgatgaatggttctgttaagccgatcaaagccaatatccaaaaagcagaaaaagaaatgatgcgtagagctgataaagttgccaaaaagctcttagaacgcgaattaaaaaccctcaaacgttttgaagtggaaactgttagagcgagtcaaattgaaagaattcaagccttacataaatcaggcgcaatcgacaatgacatgttaaatgtctttatgaagggtttaagtcgaaatgctaaatag

SEQ ID NO: 71046 - DNA, 243 bp, Acinetobacter baumannii
atggtggttgagcatgcccatggcctccgtcagcgccgagggcccaatgccaaaagctctctccacaaggcgcacctcgcccctgatgccgggctgcaggcaccaggggcgagcctgtcctttgcgcagggctcgcatgacttcgaatcccttgatcgtggcataggccgtggggatcgatttgaagcgcgaaggaaagctggaccgggagacggcccaccggcaggtgaagtatctcaataa

SEQ ID NO: 71047 - DNA, 243 bp, Acinetobacter baumannii
atggtggttgagcatgcccatggcctccgtcagcgccgagggcccaatgccaaaagctctctccacaaggcgcacctcgcccctgatgccgggctgcaggcaccaggggcgagcctgtcctttgcgcagggctcgcatgacttcgaatcccttgatcgtggcataggccgtggggatcgatttgaaacgcgaaggaaagctggaccgggagacggcccaccggcaggtgaagtatctcaataa

SEQ ID NO: 71048 - DNA, 279 bp, Acinetobacter baumannii; identical to SEQ ID NO: 57302

SEQ ID NO: 71049 - DNA, 279 bp, Acinetobacter baumannii; identical to SEQ ID NO: 53681

SEQ ID NO: 71050 - DNA, 168 bp, Acinetobacter baumannii
atgcctgtatttggttcaatggtacagaacggaaagttttcagcagcaatcgctgcctttgttaatgcattaaataatgtagatttacctacgtttggcagaccaacaataccgcaattaaaacccatgaaaccactcacaaatgtgttatttaaaaattgtcgctga

SEQ ID NO: 71051 - DNA, 759 bp, Acinetobacter baumannii
  misc_feature (724)..(733): n is a, c, g, or t
atgggtggacgtttacttagccgaacactcatgcaacctgttcgtgatacagcattacttgacgcacgtttagatgcgattgagcaattgattcaaggctaccatgaaagccctgttcgtctggtacttaaagaaattggtgatattgaacgtgttcttagtcgtgtggcgctgggtagtgcgcgaccacgtgatttagttcaacttcgtcatgcttgcgcgcaaattccatttttacgaaatgctttagcacctgttgtacaagcaaagaaatctaagttattaggacagctcgatcaggaattgggtgactttaaatcgcttcatcaacatttaatggctgcaattgttgaaaatccgcctgtattacttcgtgatggcaatgtaattgcagaaggttatgatgctgaacttgatgaattacgccaaattcgtgatcatgcaggtcaattcctcattgatttagaaataaaagagcgtgaacgtactggtattagcactttaaaaatcggttataaccgtgtgagtggttactacattgagctgactcgcgctcaagccgagcaagctcctgccgactatatccgccgtcaaacattaaagaatgccgagcgctacattacgcctgaactaaaaagttttgaagataaagttttatcaagtgagtcgcgtgcattagctcgtgaaaaagcattattcgaagctttacttgaaaaccttcgtnnnnnnnnnnttcagcaatcgcgcaaattgatgtaa

SEQ ID NO: 71052 - DNA, 264 bp, Acinetobacter baumannii
atgctaaatcgcctaatccaaaaaaaatggtacaagtaccaacaagcaaaaaaagcaaaaacttttgactctcattggtatatgcgttttggctggttagaacaaccttttacaacacttgagcaattagattctctctttgaaatccattctcctggaaagtttacctttgccgatagcttttatgctcatgaaaatggacgacatttattttctttgaagaggtggatgatcaacatccggtgggctttctttcagttttag

SEQ ID NO: 71053 - DNA, 183 bp, Acinetobacter baumannii
atgaagttaactaaacaacaacgggcagagttaaaacaaaaatttggcggccattgtgcgtattgcggtgaaatgctcggtgataaatggcatgcggatcatatcgaagctgtgaaacgagatttaattcatgttggcggtggcaagttgattactggagaaacgacactttggaaaacatga

SEQ ID NO: 71054 - DNA, 300 bp, Acinetobacter baumannii
atggcgcttgcattagcctcttctggttcagctttagtaaatgcaggtttgctctatttttatctgcataagcgtaatattttccgatttggtgcacattggaaaaaactggcacttcaatatggtttggctaaccttgcgatgattgcagcactttggttcgggttaaattggtataacggtgaactctctcaatggattcgtgttgcagaggtagtcggtttatgcgttgtaggtgtgatcgcttacttaattggcttattactgacaggctttagaccgagagatttaaaacactaa

SEQ ID NO: 71055 - DNA, 516 bp, Acinetobacter baumannii; identical to SEQ ID NO: 71013

SEQ ID NO: 71056 - DNA, 291 bp, Acinetobacter baumannii; identical to SEQ ID NO: 50900

SEQ ID NO: 71057 - DNA, 1002 bp, Acinetobacter baumannii
atgagtaaaacagtagtaaaagacaaaacagtacactacaaaaaagtagattttctaaaaggcgcgaaccttggaaacttacttaaagcccaactattagataaagactctttttatcataaagctattaataggcagcaatttgtatcggctactaaagatgattttatccttataaatcacgcaagttcacatcaaagtatgttctttggagagctaatcatagtggagtctggtaaagctcaagctgttttaaaaatagacaatgatagtgctaccgaattcccaatcaaaacttacttaacggaagatttacctgatgatgaggatgaatctgttgaagtagtgcgcaaagaatttattgatagtgttttatattttggagtgattgataatcatgttgcaattattcaatccagatcattaacagcaagaactcttgagtcttatttaggttggcttttgggtgaagcagctaaagccttaccagcgaatagtgccttaatcttaaaagatgctccgaacccggcaattaaagaaaaattggaatcaacgccagccaagaccatctcaatctcatctggaattggatcaacagaattgcaaccgattcacaaaatagagtcgaacgtaccagctaagattgattacaaaatcgaagaaaatgtggttgatgttttaaaaactgcatttggtgtcgatttggatgatttaaaacttgaagatggccttgatgacgctaatttaaagcttaaattaacactcacctataatcgaaaaacatccaaaagcgggcaaaaagtaattgatactgttgcatcatctatgagacataatgatgattatgttataactcttgaagatggtactaaggtcacagcggataacttaaagatgagtggaaaaatatctgttgaaacaatcaataataaagtttataacgacggccttaaagttcaattgtacaattggatgactaccaatattaattttggtgattaa

SEQ ID NO: 71058 - DNA, 276 bp, Acinetobacter baumannii
  misc_feature (13)..(22): n is a, c, g, or t
ttggtaatattannnnnnnnnnatattattcctcaagatgcgattgatatttcaccactatttccacaaatttcagctgctgtttctgcatatttacaagctaaccctgcgcaaacttctgatttgggtggtttgttaaaactgggtgacttggatgtgaatattagtacagttgatttaaaaaatagtcctcttactttaaatttaagtaatttacagttaaccaatcaaaactttaaaccaaactgccatggctcaggtttaactttttgttaa

SEQ ID NO: 71059 - DNA, 588 bp, Acinetobacter baumannii
  misc_feature (570)..(579): n is a, c, g, or t
atgaacacaatggatacttttcatcaaatggataaatctcaccaaggctatatcaccgaattcaacgataaaagtgagtttgaacaacgcattaatacagcttggcgacgtgccgaacctgaagctgtagaagagctattacaagctgctgcggtatctgatgatttagatcataaaatttatgaccttgcatttaaccttgcccataatttacgtgaacgtaagacctcttcaggtaaagcaggtattgttcaagggttattacaagaattctctctttcttcacaagaaggcgtggctttgatgtgtcttgctgaagctttgcttcgtattccagacacagcaacacgtgatttgctcattcgcgataaaatcaatcaaggtaactggaaagaacatgttggccaaagcagcttaatgtttgtgaatgctgctgcatggggtctcatgttaactggtaagcttatggaaacaccaaagcaaaccagtctttcaagtgtacttactggccttttagcacgtagtggccgtggcattattcgtaaagcagttgacgttgcaatgcgtatnnnnnnnnnnagtttgtga

SEQ ID NO: 71060 - DNA, 219 bp, Acinetobacter baumannii
atgactaagaatggttataggactaaggaacctgtagagttggattttcctaaagaaaaggctgtaactatagatcaaatttttgaatactatagagaagacttaggttactcaattgatgagttatctaatttattgcaaacaccaaaagaagacattgattcactctactcattaaatatagtcaagaaaaaaccaaatatacgaattttagaataa

SEQ ID NO: 71061 - DNA, 144 bp, Acinetobacter baumannii
atggctatagctgaagaattacatgttaaaagtttaatccaaccatattctaattctattattcaggctattaaggaggcgtggtcattgtggctgcaaagtcctttttttggaaaatggagttcacgcggacgtggcagatag

SEQ ID NO: 71062 - DNA, 645 bp, Acinetobacter baumannii
atgacctttgaacgtggcgtgccaattaatagtccagtcatgctttcccttcctcaagaacgtcgcaatcaactcggtgaagcttcactagagattgcagttcgtgagatttttgaatggggtgaaatgcaaactgaccctaactttggtaactaccttgttcgtttaggtaatggccaagacattcaggataaaattgtactattagactttggtgcgatccgtcagttcgatgaacatttactctcagttgcacgcaatcttatacaagcgggttatcagcatgataaacatgcgatggttcaagcaatgactggatatgagtttttcgatgcaatgcctgaaagtattaaacccggcatggccgatgtctttttacttgcgacagaagcattcagtacccctgcaaataatccagatatgccagctgggctgatggatgaacatgaacgttatgactggaaaaagagccagttacatagtcgtgttatgcagcaagcaagcaaatcaatggcgtctcgatatttctcggttcctccaaaagaatttatgtttattagccgtaagtttattggcgcatatacatttatgactgttattgatgccaaaacaaatgtacgacgtatgattcgtaactttgcttaa

SEQ ID NO: 71063 - DNA, 501 bp, Acinetobacter baumannii
  misc_feature (463)..(472): n is a, c, g, or t
atggatttcaatacccttgaccaagaaacggtacagaaaaaacaaaagtttcatcaaattttgtatgtacaggtcatctttgcaattattttgggcattttaattggtcatttttacccagaacttggcgaaagcttaaaaccgcttggtgatgcattcatcaaaatcgtcaaaatgattattgctcccgtaatctttttgacagtggttaccggtattgccagcatgacgaacatgagtcgagttgggcgagtgacaggtaaggcaatgctatatttccttactttctctagccttgcgcttgtggttggtatgattgtggctaatatcattcaacctggtaaaggcctaaatattgacccggcaaccttagtcaacgataaagtaaatagttacgttgaaaaggctcatgctacaaatatcactgactttttcatgaatattatcccgcaaacattagtgnnnnnnnnnnacattagtgagtccgcttgctggtggtga

SEQ ID NO: 71064 - DNA, 1254 bp, Acinetobacter baumannii
gtggttattgaagagcctaaagagccttatattctaatcatgcatgacgttgggccaagtgatgtcgctcgtctcaacaaagaccgtgtcgcaggtattctaactgctataggtggtgcaagtgcgcatagtgcaattgtcgcacgtgctttaggcattcccgctattgttggtgctggtgaacaagtcctagaaattgatccgaaaagcactttacttattaatggtgatacgggaacttttgttttagatccagatgttgcacaaatcgaacaagccaagcaagagcgtgagcaacagcgtcaaattcgtgaagaagctgaacgtcatagccacgagccagcaattaccttagatcaacaccaaatcgaaattgcagccaatttgggtaaagttcaagcgacagcacaagcagtagaatgtggtgctgaagcaattggcctacttagaaccgaacttgtttttatgtctcatagcagtgcacctaatgaggctgttcaagaagctgattaccgagttgtattagatgcacttgcaggtcgcccgcttgtggtacgtacattagacgtaggtggtgataaacctttaccttacttaccaattgctgaagaagaaaacccattcttaggtttaagaggaatccgtttaactttaagacgccctgaacttttaaaacagcaattaaccgctctactaaaagcatctgataatcgtccgttacgaattatgttccctatgattggacgcgttgaagaatggcgtgctgccaaagcaattcttgacgaagtaagagcccaacatccatgtggcaatttacaagttggcattatgattggggttccgtctgctgctttacttgcaccggttcttgcacaagaagtcgactttttcagtatcggcacaaatgacctgacccaatatacgttagcgattgaccgaggccacccaatactctcagcggaagcagacggattacatccaagtattcttaatttgattgatcaaacagtgaaagctgcccacaaacatggcaaatgggtaggaatctgtggtgagcttgcagcagacccgaaagctgtccctattctcatgggattaggcgtagacgaactgagtatgtccccaaatagcattcctttagtaaaagctcaaatccgcacactaagctatagccatgctcaaaagcttgcgcaacaagctttactatgcgatagcgcccctgctgtgcgccagctatctgaacaagacttataa

SEQ ID NO: 71065 - DNA, 1164 bp, Acinetobacter baumannii
ttgaaaagtgggagttttggtttagaaattgccaaacaatttgccgaacaatttaaaaaaaccgcagttgagcgagacgctaagcgaattttaccgtataccgaaattgatgcattaagccagtctgggctttgggcaattacagtaccaaagcaatatggtggtgccgaagtttcaagccatacagttgctcaagtaattgcgcttttaagtggtgcagacggttcaatcggacaaattccacaaaaccacttctatgcattagaagtgttacgcaatacaggtacagaaactcagaaacaacgtttatacggcgaagtgttaaatggcacccgctttggtaatgcacttgctgagtttaaaactaaaacttcaacccataaacaaactaacattcgtccgcatgaaaatggctatcttattcagggtgaaaagttttactgcacaggaagtttatttgctcaccgtatcccaaccttagttttagacgatgcaggacgtgagtatctggcatttgtaaaaagtggttcacaaggattaaaacttgtagatgactggtctggctttgggcaaaaaaccacaggcagcggtacagttaaatttgatcaggtttttgtcgatgcagatgatgttattccttttgatacagcatttttacaaccaaccttagtcggtccttttgctcaaatcatgcatgcatcgattgaggtaggcattgcacgtgcagcctttgaagaaagcttgcaaagagtacatcaagctcgcccatggattgattcaaatgtagaaactgcaaaccaagatcctttaacgatttatgaattaggacgcattgcggtagatgtacgagctagtgaagtcctattaaaacaggcagctcaatcaattgatgccgcaaaaattgaaacctcacctgaaagcattgctaaagcatccattgatgtggctaaagtacgtgctcatagtaccgatatcgcactcaaagcatcgtctaagctgattgaacttgctggtagccgtggtagtcagtctcaagatggcctagaccgtttctggcgtaatgcgcgagtacataccttacatgatgctgcgcgatggaaatattactttattgggaactacgttcttaacggtgttctaccacctcgtcgggggacattgtaa

SEQ ID NO: 71066 - DNA, 1005 bp, Acinetobacter baumannii
gtgctagaccaaagaaatctttggctgtcgctcagcatattatttacactgaacttatttaaagttttatctgcagcggtaaaaattcaggctgataaattccctgaacacaaaattattgtggcagaaaaagatgcttttccaacagatatttacattattgaaggtttcattgacttaattcaaaagggctatcaggttgaattaattgatggcgtagaagacttatctcgtgctttagagaaagatgttgctgtagtagtactttcccatgtgaattaccgcactggttatttttatgatatggcaactattaatgaacaaattcactctaaagatgctttggtgatttgggatttatgccactcagtcggtgcggttcctatgcaccttaatcaaactgatagtgattttgcgattggttgtacctataaatatttaaatggtggccctggttctcctgcattgctctgggtcaatgaaaagcatcgtgatcagttctggcagcctttatctggttggtggagtcataaaaaaccatttgatatggcacagcattatgagccagcgaatagtatccgccgatatttatgtgggactcagccggttatttctatgagtctgattgaatgcggagtagatattttcctgcatgccgatatgcaaaaaatccgtgagaaatcgttgaaattaacagatttatttattcaattggtacatcaagaatgttctgaattcggatttgagttaattacgcctttagatcataaccatcgtggtagtcatgttagttatcgtcatgaattcggttatgaaattattcaggcacttattgcacgcggtgtgattggtgattatcgggaacctgcagtcttgagatttggtattacacctttgtatctgggctttgaagatatttggaatgcagtacagcacttaaaagaaaccatgctgaatagtgaatggaaaaacaaacagtatttagttcgtggtgaagtgacctga

SEQ ID NO: 71067 - DNA, 174 bp, Acinetobacter baumannii
atgattactcgtgaacagtgtttgtattgggatcaggaagatgaactcaaaaaatttaaagatgaatttgcattgccagaaggcgttatttatttagatggtaactctttaggtgctagaccaaagaaatctttggctgtcgctcagcatattatttacactgaacttatttaa

SEQ ID NO: 71068 - DNA, 162 bp, Acinetobacter baumannii; identical to SEQ ID NO: 46255

SEQ ID NO: 71069 - DNA, 177 bp, Acinetobacter baumannii
atgaaaaataacgtatctcttggcctcatgaagcagtttatctgggcctatccgcaagtcatgttcgattcaattacaattgatacgacccaagccccaaatggcttctttgttgaaaatacactttactcaccaattagtgataacacaccgtatccaccagatatttacctttaa

SEQ ID NO: 71070 - DNA, 246 bp, Acinetobacter baumannii
  misc_feature (176)..(185): n is a, c, g, or t
atgcaacaaacaaataaacgctaccctttaggggctcatcttattgtaaaacatctcggctatagccatcatggtatctatgctgggagaggtcgagttattcattattcaggcctcgcacatttcatcaaaaaacggcccattgaaatcacttccctagatgccttttctcatgnnnnnnnnnnggtctatatttcttttttcggctttttctcatggcaaaaaaattcatgtacgttcttatga

SEQ ID NO: 71071 - DNA, 225 bp, Acinetobacter baumannii
atgaaaatactagtactgtgtatcgtgaacttcataatctttacacaatccgctttagcactagagtatcggcagattagaaatactactgatgatcagtttgaagtaattgaaatttctaatttagaacaattacgcttatttctgaaaaatccgcaaactgatcaatattataaaagtttcgacaatattcaatataacagcttgtttgtcattccatgctag

SEQ ID NO: 71072 - DNA, 453 bp, Acinetobacter baumannii
  misc_feature (414)..(423): n is a, c, g, or t
atgctgaagtggtttgaaaaacttgtagatccttatccaaccaaaggtttggatgagcccttaccaacacgctttttcccatttgtttggcaagctactgaaggtgtgcgtccatatttattgctacttattatatgtacagctggtgcagctagctttgaagccctgctcttttcaaaaattgggcaacttgtagattggcttagtaatagtcagcctgaaagtttcttaagccaacatgcgtcaaacatccttattctcattagcgtgttatttgctaacattttatttgttaatattcaatctattataaaacatcaaattttatatagtacttttccaatgcgcttacgttggcgcttccataaccttttattaaaacaaagcctagactttttccataatgattttgcnnnnnnnnnnggtcatgcaaacagctttagcagtccgtga

SEQ ID NO: 71073 - DNA, 306 bp, Acinetobacter baumannii
atgactctacgtaatgattggactcgtgaagaaatccaagctctatatgaacaaccttttttggatttagtttttaaggctcaacaagtacaccgtgagcacttcactgccaatacaattcaggtcagcacccttttatctattaaaacgggtaaatgtcctgaagattgcaaatattgctctcaatctgcacattacgattcaaaattagaagcagaaaaacgtattgctgttgaaaaagtaattagcgaagcaaaagctgcaaaagattcaggttcatctcgtttttgtatgggtgctgcttga

SEQ ID NO: 71074 - DNA, 189 bp, Acinetobacter baumannii
atgaaaaattcaaataaagatttgtataatcatttaggttgggctgttgatcttttagatagtatttcagataaattttcttcaaataaagatattcctaaacaagtattcttagaaatggaacgtattaaaaaagatatagattctttgcgtgttttggttgatcaggataactgtccttttagttaa

SEQ ID NO: 71075 - DNA, 702 bp, Acinetobacter baumannii
  misc_feature (686)..(695): n is a, c, g, or t
atgtacatagttaaaaaaggagatacattaacatctattgcaaataaaaatgggtgcacagttgagcaaattattaagcttaatagtataaaaaataaaaatttgatatttgtaggacagaaattaaaattaaaaaatacgcctacgcctacgcctacgcctacgcctacgcctacgcctacgcctacgcctacgcctacgcctacgcctacgcctatacagaatttaggaggtaaggttggtatagctatagttaataaaaaaggagaaccaatttcaaatttcaaattaaaaatacaagtaggaaataatatatatagtaatcagctaaccaatgcgagaggtgttgtaacccttccaaggcaaaaatcaggagaaaatataattattcaaggatggtctaagacaaataatagctataaattaattagtaatagatttattactgagaatagaaaccttggtataggtatttcattagatactattaaatttgaaacaaaaacagacaatcataaaaagcctataaataataatgtaaataataatggccaatcgacgacaactaatggaagtaatagtcaaaataatcctatagctagaacttctgtagagggatgtagtaattgcacaaaaattacagaaaatgagctgaaacagatatttacacaagctaattctaacgnnnnnnnnnnattctaa

SEQ ID NO: 71076 - DNA, 1326 bp, Acinetobacter baumannii; identical to SEQ ID NO: 52624

SEQ ID NO: 71077 - DNA, 414 bp, Acinetobacter baumannii
ttgaaatggttaaaggagcttaaagcttggtgggcggatgatgaaacagcgtggtgcggtactttcgttgctcattgcttgaaatcagctggaattgcttatcctaagcattggtaccgtgcattggattatgtgaattatggtaccaaattagctaaaccagcttacggttgtgtagctattaaaacccgtaagggaggaggccatgtctgttttgttgtaggacgtgataagtctactggaaaacttgtttgccttggtggtaaccaatccaatagagtgtgttacgcgctttatagtgattcagatttccaagagttccgatggtatggatgtacacctcagccagcaagtaaacgttattctttaccgcaattaaagggcgtaacagctactagggtttctgaagcctaa

SEQ ID NO: 71078 - DNA, 264 bp, Acinetobacter baumannii; identical to SEQ ID NO: 49318

SEQ ID NO: 71079 - DNA, 702 bp, Acinetobacter baumannii
atgctaattttattgccggcactacaatggggtgttgattatgaagttattcctgaaaaatatcacgcatttgttactggtactttaatgctagttctgtcatggattggtaagaaaatttctcaaccacgacttaacggcccgcaattaacaggccagttagtaggaatcaacactttaatgaatattcctacaaagacaaagtttgacgaattagcttggatagctgaagcaaaaaaacacattggtctgcaagaaataccaggtaaacagcacaatccaactattttgaaatggttaaaggagcttaaagcttggtgggcggatgatgaaacagcgtggtgtggtactttcgttgctcattgcttgaaatcagctggaattgcttatcctaagcattggtaccgtgcattggattatgtaaattatggtaccaaattagctaaaccagcttacggttgtgtagctattaaaacccgtaaggggggaggccatgtttgctttgttgtaggtcgtgataagtctactggaaaacttgtttgccttggcggcaaccaatccaataaagtgtgttacgcgctttacagtgattcagatttccatgagttccgatggtatggacgtacacctcagccagcaagtaaacgttattctttaccgcaattaaagggcgtaacagccactagggtttctgaagcctaa

SEQ ID NO: 71080 - DNA, 216 bp, Acinetobacter baumannii
atgtacgcgccaactgtaactggtgtcttaataaccaaagtacccgaagtcgtgattggtttacgccaagttaaaggcttaacgaaaattttacccgcacctgaactcaatggctgcacactcatagcattggtatattcagaagtaattttctgtgatgatgctgcaattgcacgctcaacattagtatttgttatatctgcattcagaatataa

SEQ ID NO: 71081 - DNA, 279 bp, Acinetobacter baumannii
atgagaaatgattatcgaaatgctattagagacttaattcaccggaatcttcaacaaaataatattcagaatctgattgtttgggaaatcaaagacgatgaatctcaagatccatcactgttgagtttgaaattatatggttcaagaacccatattgatgcagtacttgtggcgtgtggtgtgaacggcgtttgggaaaagttacctcttcataagggggcttttccaaggcttgttgatcttttaagacctcaaaaagaatacttgcaggataattaa

SEQ ID NO: 71082 - DNA, 267 bp, Acinetobacter baumannii
atgcgccaagcaatgttaatgagggctaaagcattgaattgcacgtttgataagcaacgtggcacttggattagtccacctgaatttaacggtatctcagatcaacaaagagatgaacttcaaaacttcatagctgaacgcggcctagacgtgaaaacagtttgtgaacacttcggcatagatgcccttatccaaattgaagcagcaaatctgccagcagttaaacaagacattgaaacattagctaaaacggggatgacagcatga

SEQ ID NO: 71083 - DNA, 813 bp, Acinetobacter baumannii
atgtccaaagctttagcatatgcaccagctgttaatacagctaaaacaaagttgcccagtactgaatcagatcctttctatggctcaatttcaaagcataaatatgctgaattctcactttgtgataaagatggtaacccagtagcctcaccagtaattcgtgctttgttgactgacggtgataaaagtattgagagccaatggcaaactccatttgaaaatagcaatccagaactaaagatgccaatgttgatggctaacttgcaaactgggcaaatgcttcaagctgcagcaacgttaggtgagaattcaccattcatttcagcattaagtgatatggcatcaggacctttagcaacggctgaaaatgcacttaagagcgttgaagggcgaacaaatttaactaaagtgaatacaactcaagtattcctatctacatcatcagtacgtcttaatttatcaatctttttcttggcctttagtgatgcaaaatccgaagttgaagacaagatcatgcagttggaggcttggagcgtaccagtatcattatcgtctgattctacgctgcaaaatgtcgttaatgattcaaatacaaccttagaaggcttgttttcaggggttatcccacctttcgtatctctcactactcatggcaaaacttataaaccctttattcttgaaagtgtttcagcaccaatagtcgcgccaattgatgaaaaaggtaaccggttaagtttagctgtcaatattagtttaatgagtcgaactgcatgggactcaaaggatatttactcattatatggaggcaactaa

SEQ ID NO: 71084 - DNA, 279 bp, Acinetobacter baumannii; identical to SEQ ID NO: 53681

SEQ ID NO: 71085 - DNA, 279 bp, Acinetobacter baumannii; identical to SEQ ID NO: 53681

SEQ ID NO: 71086 - DNA, 159 bp, Acinetobacter baumannii
atgtttgtaacgctattgttgagcgtaacgatattatttgatgccgaagttaaacgaccgtcgatgtttgtaacttttgaagttaaatcagttacggcggacgaggttgcttgcaagtcggttgctaatttcttattacctgtaatgttacgtacttga

SEQ ID NO: 71087 - DNA, 279 bp, Acinetobacter baumannii; identical to SEQ ID NO: 53681

SEQ ID NO: 71088 - DNA, 279 bp, Acinetobacter baumannii; identical to SEQ ID NO: 57302

SEQ ID NO: 71089 - DNA, 255 bp, Acinetobacter baumannii
gtgttgcttgtattatttttattgttaatgattgctcctagtttttatgctgaatatctcaaaatgaatatcggttctctaatggaagaacagaaaaaacatgaatctatgttaaaagagtggaaggaaaaagcaccattggcagagttctctaagtgtggagagtatagggacgtatgcgtgttagttgatgataaaagcggatattattccaatgaacaaaccccaaataaaaaatatgccatactgaaatag

SEQ ID NO: 71090 - DNA, 456 bp, Acinetobacter baumannii
ttgcctttgattttcataaggaagaaattttttcaaattaaatttattttagcttctattacttctatatttgctatgattctcttatcgggctcaaaatctgaagtagataccggagaaacatctccattgcttttttttgctgttgtgtgcgctggaatgctgatttttttatcattgaataaattaatattatataaaaaaaatatagatttatattatataaatatgtactgcatatttgtatctcttttttctgttttatttttatctaatgctccagcaaaaagaatttgtatgattgctttaatttttttattatattcaatttattggtttattgaagataataaaaagaatattcttgtttttagatttgctttggtatttgttgctatagtcccaacgtttatattcccatcagtttttaatatgcttttatatgtaggtctttaa

SEQ ID NO: 71091 - DNA, 201 bp, Acinetobacter baumannii
atgttagatttatttacacctattgttgaaagcgaaaaacagcataaaatttttaaattgttattaaatgaagcaatgtatgctgaaaggaatgttttattagattgggcaaatggatttgttgatagggatagtaaatttgtaaaagaattccaaactacttttgagtcttctttttgggaattatatcctgaaatctga

SEQ ID NO: 71092 - DNA, 288 bp, Acinetobacter baumannii; identical to SEQ ID NO: 46657

SEQ ID NO: 71093 - DNA, 291 bp, Acinetobacter baumannii
atgatgcgtaacatcccagactctttgtcgcttccgttcacagtatggatgtgtgaaaacggattttatccatctcaaaaaaatggattcatggttttaaaacgtggcaaagaagtagcaaagatatcaatgaatgaaacaaaatacggtttcccaatgaatgatatttgccaaaagaaatttgcctcgttctgcagagcatggatgaacagagataaacactttattgaacaattacgtttgcgtggtttagcaagattaaatcaaaaaagttatcagttggtggcgtaa

SEQ ID NO: 71094 - DNA, 246 bp, Acinetobacter baumannii
atgttccaagctacaccggactatatcaaaaaagctggtgatgacatccaagagtttttagaaggtgcttctagtgaaacaaccggttggttgcaaccggctgaagacctagggggtaaaccttttgagttcagtttaatacctgacaaagactatccatatgagcgtgtacgactctatttagcccatggagttgttggtacaactcgtgccgcaatttttgatgacgacgttttagttaaataa

SEQ ID NO: 71095 - DNA, 186 bp, Acinetobacter baumannii
gtggattctggcgcagcgattgctcgccgaacggcctggctgttagaacatgaagccccggatgcaaaatctgccgatgcgaatattgccttttgtatggcaatgacgccagaagctgaacaattattgcccgttttacagcgttacggcttcgaaacgctcgaaaaactggcagttttagactga

SEQ ID NO: 71096 - DNA, 966 bp, Acinetobacter baumannii
  misc_feature (336)..(368): n is a, c, g, or t
atggtcgtggtcgcagccgttatgatgacgacgaagatgatgaccgaggccgttcaagtggtcgaggccgtggccgcagtcgttatgatgatgacgacgaagatgatgatcgcggtcgctcaggcggtcgtggccgtggtcgcggtcgtgatgatgacgacgaagatgatgatcgcggtcgctcaggtggccgaggtcgtggtcgcagccgccgtgatgacgacgatgaagatgatgatcgcggtcgttcaggcggtcgaggtcgtggccgcagccgtcgtgatgacgacgatgaagatgatgatcgtggccgttcaggtggccgaggtcgtggtnnnnnnnnnnnnnnnnnnnnnnnnnnnnnnnnnttcaggtggccgaggtcgtggtcgcagccgttatgatgacgacgatgaagatgatgatcgtggccgttcaggtggccgaggccgtggtcgcagccgtcgtgatgacgacgatgaagatgatgatcgcggtcgctcaggtggccgaggtcgtggtcgcagccgttatgatgacgacgatgaagatgatgaccgtggccgttcaggcggtcgaggtcgtggccgcagccgtcgtgacgatgatgacgaagatgatgatcgtggtcgttcaggtggccgaggccgtggccgcagtcgttatgatgacgacgatgaagatgatgaacgtggccgttcaggtggccgaggtcgtggccgcagccgtcgtgatgatgacgatgaagatgatgatcgcggtcgttcaggtggtcgaggccgtggccgcagtcgttatgatgatgacgatgaagatgatgatcgtggtcgttcaggtggccgaggccgtggtcgcagccgtcgtgatgacgatgacgacgatgatgaccgccgtggccgttcagatggtcgtggtcagaactctcgtaatcaaaaacgcgatgcttatggacgctttacgtcttaa

SEQ ID NO: 71097 - DNA, 516 bp, Acinetobacter baumannii; identical to SEQ ID NO: 71013

SEQ ID NO: 71098 - DNA, 651 bp, Acinetobacter baumannii; identical to SEQ ID NO: 64698

SEQ ID NO: 71099 - DNA, 306 bp, Acinetobacter baumannii
atgcgggttttgtatcagtttcctttgtctcattattgtgaaaaagctcgctggttgttagaccataaagaacttgattacgttgcacataatttgattcctggatttcaccgtgcttttgcacaacttaaaacaggtcaaaatttgttgccgattttaaaagatgaccatcgctggattgctgagtcgactaaaattgcgctttacgccgtgatgaacaacttagacagcaaactcttaaaattgatagtttggcagatgaacttggggtgcatgtacgtcgttgggcacttgctcatactttag

SEQ ID NO: 71100 - DNA, 303 bp, Acinetobacter baumannii; identical to SEQ ID NO: 53684

SEQ ID NO: 71101 - DNA, 297 bp, Acinetobacter baumannii
atgaaaatatgtaatcgggttcgaggaaaacttttacctgaagaattgtataaccaaaaaattcttaaagtggattacgattatcttgaaaaacttgcttatgcttatgcatatgttgtagatcgtaaaatggcacagatgttggtcgactatcatcaaccgataaaaatttacgaccattggcaagaccttgtagggcgtggtgaatttagtttttatgtcagtttcttattcgatcatcccattattgagaacaatgatgctttaagctatttggagaaggaaagaagcacttaa

SEQ ID NO: 71102 - DNA, 366 bp, Acinetobacter baumannii; identical to SEQ ID NO: 46656

SEQ ID NO: 71103 - DNA, 279 bp, Acinetobacter baumannii; identical to SEQ ID NO: 53681

SEQ ID NO: 71104 - DNA, 210 bp, Acinetobacter baumannii
atgttccgccttcttcagtgggaatgcgttaaagtctttttaagtgatactggtgagattgagcaaattatttttctagataaagaagaccaaaagtttaagtcgagtattgaaaaggcgatatggcgtgcaagtccctttgttttaccttttaatccggaagttagaaaacaagtaagaaagttcaatattaaatttactgcaaagtaa

SEQ ID NO: 71105 - DNA, 279 bp, Acinetobacter baumannii; identical to SEQ ID NO: 57302

SEQ ID NO: 71106 - DNA, 210 bp, Acinetobacter baumannii
gtgggttatacacctaacgtcatcggtttcggtggtccattcgaccaaaacacaggtaatggctatgaacctgacggctcagcaacggaacagcccgcaatcaacgacaaagttgtagtgcaagctgatcagtacacatcactcgatcaccagcgtgtgaagggtgatagagaaacaggtgaaattacagttgagcgtatagatgactga

SEQ ID NO: 71107 - DNA, 339 bp, Acinetobacter baumannii
atgatgatcgtggtcgttcaggtggccgaggccgtggatgatgacgacgatgaagatgatgaacgtggccgttcaggtggccgaggtcgtggccgcagccgtcgtgatgatgacgatgaagatgatgatcgcggtcgttcaggtggtcgaggccgtggccgcagtcgttatgatgatgacgatgaagatgatgatcgtggtcgttcaggtggccgaggccgtggtcgcagccgtcgtgatgacgatgacgacgatgatgaccgccgtggccgttcagatggtcgtggtcagaactctcgtaatcaaaaacgcgatgcttatggacgctttacgtcttaa

SEQ ID NO: 71108 - DNA, 171 bp, Acinetobacter baumannii
atgctcggtgccaacgggattgtgggtggtgggcctcctttagcaattggtgctttattatttatagcgaaatatataaaactcgctgaaacttggttgatttttaataatcaagataataaaggaaaaggatatgcaattaacggaagagcaattactcgcagcatataa

SEQ ID NO: 71109 - DNA, 192 bp, Acinetobacter baumannii
atggaagattttcgcccggaaaatgttgtacagcaagttgatccattaaagaaattggttgaggcgcgtgagcgtttaaccgatttaagaaacaaaatttcaaacagtgagcgtttagaagatctgcttgatgaggttcttaaaaatactgatcaaatccgtaaattaagtgccgaggccgatcatgaataa

SEQ ID NO: 71110 - DNA, 300 bp, Acinetobacter baumannii; identical to SEQ ID NO: 51169

SEQ ID NO: 71111 - DNA, 822 bp, Acinetobacter baumannii; identical to SEQ ID NO: 59049

SEQ ID NO: 71112 - DNA, 711 bp, Acinetobacter baumannii; identical to SEQ ID NO: 49722

SEQ ID NO: 71113 - DNA, 228 bp, Acinetobacter baumannii
ttggttagtaaagcagaagaaaaaaccgaccaagaaatcgttgatgaaactgataacgtggcagagctacttttcaaactagatattgaaatatggcatgcagtcagaaaacaaaaaaaacagggcgaattactggttgctgttgcagaagatcagacactcaaaaaaccgatggaattaatacggcaatgtttagttgatcaaggttctttgaaaatccaaatatga

SEQ ID NO: 71114 - DNA, 660 bp, Acinetobacter baumannii; identical to SEQ ID NO: 60224

SEQ ID NO: 71115 - DNA, 639 bp, Acinetobacter baumannii; identical to SEQ ID NO: 49241

SEQ ID NO: 71116 - DNA, 432 bp, Acinetobacter baumannii; identical to SEQ ID NO: 49240

SEQ ID NO: 71117 - DNA, 336 bp, Acinetobacter baumannii; identical to SEQ ID NO: 50830

SEQ ID NO: 71118 - DNA, 627 bp, Acinetobacter baumannii; identical to SEQ ID NO: 53983

SEQ ID NO: 71119 - DNA, 237 bp, Acinetobacter baumannii; identical to SEQ ID NO: 49237

SEQ ID NO: 71120 - DNA, 354 bp, Acinetobacter baumannii; identical to SEQ ID NO: 49236

SEQ ID NO: 71121 - DNA, 294 bp, Acinetobacter baumannii; identical to SEQ ID NO: 49235

SEQ ID NO: 71122 - DNA, 579 bp, Acinetobacter baumannii; identical to SEQ ID NO: 49234

SEQ ID NO: 71123 - DNA, 723 bp, Acinetobacter baumannii; identical to SEQ ID NO: 49233

SEQ ID NO: 71124 - DNA, 1317 bp, Acinetobacter baumannii; identical to SEQ ID NO: 53977

SEQ ID NO: 71125 - DNA, 723 bp, Acinetobacter baumannii; identical to SEQ ID NO: 53976

SEQ ID NO: 71126 - DNA, 261 bp, Acinetobacter baumannii; identical to SEQ ID NO: 49230

SEQ ID NO: 71127 - DNA, 645 bp, Acinetobacter baumannii; identical to SEQ ID NO: 53974

SEQ ID NO: 71128 - DNA, 2727 bp, Acinetobacter baumannii; identical to SEQ ID NO: 53973

SEQ ID NO: 71129 - DNA, 396 bp, Acinetobacter baumannii; identical to SEQ ID NO: 53972

SEQ ID NO: 71130 - DNA, 501 bp, Acinetobacter baumannii; identical to SEQ ID NO: 53971

SEQ ID NO: 71131 - DNA, 639 bp, Acinetobacter baumannii; identical to SEQ ID NO: 49225

SEQ ID NO: 71132 - DNA, 1044 bp, Acinetobacter baumannii; identical to SEQ ID NO: 53969

SEQ ID NO: 71133 - DNA, 708 bp, Acinetobacter baumannii; identical to SEQ ID NO: 49223

SEQ ID NO: 71134 - DNA, 2058 bp, Acinetobacter baumannii; identical to SEQ ID NO: 53967

SEQ ID NO: 71135 - DNA, 813 bp, Acinetobacter baumannii; identical to SEQ ID NO: 49221

SEQ ID NO: 71136 - DNA, 330 bp, Acinetobacter baumannii; identical to SEQ ID NO: 49220

SEQ ID NO: 71137 - DNA, 1428 bp, Acinetobacter baumannii; identical to SEQ ID NO: 49219

SEQ ID NO: 71138 - DNA, 3003 bp, Acinetobacter baumannii; identical to SEQ ID NO: 53963

SEQ ID NO: 71139 - DNA, 519 bp, Acinetobacter baumannii; identical to SEQ ID NO: 49217

SEQ ID NO: 71140 - DNA, 993 bp, Acinetobacter baumannii; identical to SEQ ID NO: 49216

SEQ ID NO: 71141 - DNA, 1293 bp, Acinetobacter baumannii; identical to SEQ ID NO: 49215

SEQ ID NO: 71142 - DNA, 1041 bp, Acinetobacter baumannii; identical to SEQ ID NO: 49214

SEQ ID NO: 71143 - DNA, 234 bp, Acinetobacter baumannii; identical to SEQ ID NO: 49212

SEQ ID NO: 71144 - DNA, 1176 bp, Acinetobacter baumannii; identical to SEQ ID NO: 53956

SEQ ID NO: 71145 - DNA, 1083 bp, Acinetobacter baumannii; identical to SEQ ID NO: 49210

SEQ ID NO: 71146 - DNA, 1266 bp, Acinetobacter baumannii; identical to SEQ ID NO: 53954

SEQ ID NO: 71147 - DNA, 525 bp, Acinetobacter baumannii; identical to SEQ ID NO: 49208

SEQ ID NO: 71148 - DNA, 381 bp, Acinetobacter baumannii; identical to SEQ ID NO: 49207

SEQ ID NO: 71149 - DNA, 375 bp, Acinetobacter baumannii; identical to SEQ ID NO: 49206

SEQ ID NO: 71150 - DNA, 192 bp, Acinetobacter baumannii; identical to SEQ ID NO: 49204

SEQ ID NO: 71151 - DNA, 168 bp, Acinetobacter baumannii; identical to SEQ ID NO: 53948

SEQ ID NO: 71152 - DNA, 216 bp, Acinetobacter baumannii; identical to SEQ ID NO: 49202

SEQ ID NO: 71153 - DNA, 477 bp, Acinetobacter baumannii; identical to SEQ ID NO: 53946

SEQ ID NO: 71154 - DNA, 327 bp, Acinetobacter baumannii; identical to SEQ ID NO: 49200

SEQ ID NO: 71155 - DNA, 189 bp, Acinetobacter baumannii; identical to SEQ ID NO: 49199

SEQ ID NO: 71156 - DNA, 297 bp, Acinetobacter baumannii; identical to SEQ ID NO: 49198

SEQ ID NO: 71157 - DNA, 333 bp, Acinetobacter baumannii; identical to SEQ ID NO: 49197

SEQ ID NO: 71158 - DNA, 405 bp, Acinetobacter baumannii; identical to SEQ ID NO: 49196

SEQ ID NO: 71159 - DNA, 690 bp, Acinetobacter baumannii; identical to SEQ ID NO: 49195

SEQ ID NO: 71160 - DNA, 237 bp, Acinetobacter baumannii; identical to SEQ ID NO: 49194

SEQ ID NO: 71161 - DNA, 207 bp, Acinetobacter baumannii; identical to SEQ ID NO: 49193

SEQ ID NO: 71162 - DNA, 498 bp, Acinetobacter baumannii; identical to SEQ ID NO: 49192

SEQ ID NO: 71163 - DNA, 777 bp, Acinetobacter baumannii; identical to SEQ ID NO: 53936

SEQ ID NO: 71164 - DNA, 774 bp, Acinetobacter baumannii; identical to SEQ ID NO: 49189

SEQ ID NO: 71165 - DNA, 1257 bp, Acinetobacter baumannii; identical to SEQ ID NO: 49188

SEQ ID NO: 71166 - DNA, 1230 bp, Acinetobacter baumannii; identical to SEQ ID NO: 49187

SEQ ID NO: 71167 - DNA, 234 bp, Acinetobacter baumannii; identical to SEQ ID NO: 49186

SEQ ID NO: 71168 - DNA, 270 bp, Acinetobacter baumannii; identical to SEQ ID NO: 49185

SEQ ID NO: 71169 - DNA, 1104 bp, Acinetobacter baumannii; identical to SEQ ID NO: 53930

SEQ ID NO: 71170 - DNA, 717 bp, Acinetobacter baumannii; identical to SEQ ID NO: 54006

SEQ ID NO: 71171 - DNA, 510 bp, Acinetobacter baumannii
atgatttctagtggaccaaacctgaacccagaattacctggaacttatattaatttattagtcgatatggttaagcgcttgaatatctctgctgagcagtttttagatggaagtggcataacattagaaaaattaaacaaaccgtattggtatgttgaatttaattccttaaataacttacttgagcatgcgattcaactcacttatgagccagcattggcgggttatttggctttggaaatgaaagcgtcttgttatggttcagtgggtatggcggccatggtcagtacaaatttgggagaggccttaaaaatacttgagcaatttataggggcccgttgtgatgcctttaaacctgagttaaaacaagaacaagattatatttactggtctatacaccaacctttgaaagcttttcagttgagtccagatgcgactattttttttgttattaggtttcgttcaaatcgcgaagcatctcacaggattatcttctttaggtacagttaa

SEQ ID NO: 71172 - DNA, 192 bp, Acinetobacter baumannii
atgaatggtgatcagctccatcaagttgcaatagagattgcgtgtaatcttccttttagtgagcaaagccaaccctttggtccagaatgcgatgtctttaaaattttagaaaaggtgtttttattagtaggggaaggaacgggcacaaaaatgattactgttaaatgtgatccatataaaagtcaggaataa

SEQ ID NO: 71173 - DNA, 204 bp, Acinetobacter baumannii
atggttaaaatcaaatttaaaaagattacagaggcaaatcagaaaaaagtaacaaagcattgtgcggctgagattcaggcgtggaaggatattgatgttaagaattacacctgtgcacttcagagctactttgatttatctgtacatttatttgtcgagttagcagatgcacgcgcaaagcttgcgaggttgaataaaaaatga

SEQ ID NO: 71174 - DNA, 207 bp, Acinetobacter baumannii
atgctagtacttgcgttgatacttgtccttattattggcttttacaattgcttcaatggagcaactattgcttggaaagcgcgtaatcatacaggtttaacagtttttcaacgtcgttccaatatttgcaaagctggggcactacttacccttgcagtactcgctttaattagtctttgcgatacagctaagggagtattttggtga

SEQ ID NO: 71175 - DNA, 291 bp, Acinetobacter baumannii
atgaaaactatgaatttgtcggaggaagaagtaaagataatttcagaacgtcgtgctgagaagcatcatgaaaaggcaacatttgcttttcaagttaagtctattcagattgcaaatgaatattttgcatggtgcaaaaaggaaggattttatacacctaatttcggaacatttgttaattccttttgttatgagggacctgatgcagaagttatgtgtgaagccgtacatcaaatatggaagcttgtattttcacttcaaattccaaaaaaggagaactcatcatgctag

SEQ ID NO: 71176 - DNA, 219 bp, Acinetobacter baumannii
atggctgatcccgtagatatggctgaaggcattgctgaagagcgcatccagcaaaccctttctaatcgcccaacatttgatggtgaaagtgaacatgaatgcatcaattgtgggaatgaaattccagagcgtcgtcgtgctctgggcaacgtaaagctttgcattgactgtcaaacagcagttgaaagcaactcaaagcatattcgaggtgttctatga

SEQ ID NO: 71177 - DNA, 141 bp, Acinetobacter baumannii
atggataagagcggaacagcactaggtctaatcgctatctttcttatttttttaggtttttttggctggtttatggctgaacaagacaatgaaatcttacgcaatcaacttgtatcactcaaatatgggagtgatcactaa

SEQ ID NO: 71178 - DNA, 219 bp, Acinetobacter baumannii
atgcaaaccaaatcagcacctttaacgaaggaacagatcaaagagaaccttcgtaaccaaggtaaaaccttggcgcaattcgcaaaagaaaatggctttgatgttcatgacgtttatcgagtgattggcggatcacgtaaaggtcattatggcaaaggtcatcagattgctgtggctttaggactaaaagtccctcctcaaactgctgatatagattaa

SEQ ID NO: 71179 - DNA, 459 bp, Acinetobacter baumannii
atgtctgattcttttggtagtcgtattcgaagcattcgtggaaaagaatcaagagcttcttttgcagaaaagttagatgtcggcacgaccacactgcaacgttatgaaaatgatgaaagatcacctgattttgaatttataaataaacttcaacagcttacgggttattcatttgattatttgatctctggtaaagaaccagatttgccaattgaagaaaatcttttattgagtaaattcagagaagcaacatctgatgtaaaaaataaaattcttatgcttttattaagtagttcagaggcgacagaaaatgtcgttataaataaagaaaatactgttcaaggtcagcaagttggtgataataatcaacagcataaccactttggttcagttcaaaaggcaacagtcaaagtcaagaaacctaaaaatggaactatagtgggaataaaaaataattga

SEQ ID NO: 71180 - DNA, 423 bp, Acinetobacter baumannii
atgagtgaacggtatagagttaaacaacaatatgtagatattaacgttgcaaatcctataaaaacgaaaatagttggtattgaaaaccatcttacaaattattctacgtttatcccacctgagcccaataacccagagggaatgtattgcccaagagaatcatgtcgacgctggatttatagagacaataaagagtgtgaatactgtaaatatgatatacaggcttattggtatcgtattgatcttagaagaagaaaagctttttttgataaaagagttagccaaatgtattacactggcgttggatgtctagtgttaacatttatattacttcagttcacatcatcaatatttgtcgggatactatttattgttggtttattaacatttgcagcagcttctaatgctaagtttcaagaataa

SEQ ID NO: 71181 - DNA, 615 bp, Acinetobacter baumannii
atgaaaaaattaattttaattgctggggttattgcattggttagttgctctaaggagtcaactcctcagaaaactgataatgaaaatatgacacagccagcagttgcacagcctgctgttgagaaaacacctgaacaagaaggtcttgataaactattagccgcaaagagtttgccagaagctcttaatttgattaaacctgttatgtctgatgaagtggatgcatttccagcttcagcaggtgttttagcaatttggatgaatagtaagcatactactcttcaagatattaaagccttagactcaaccacaaagggaaaaatcctaaaagattcctacaatgagcgtgggaaacgcttatgtgtcactggtaagattgtggaaattcaagtagataggtcaggaaactttcctgcatatcatgctggcattgtgtcaaattatagtgacgtaacacgtgttttagctattggttctacaggtgacttggttgaagaatctaatgctacgttttgtggtgtagtcattggaaaagtttcttactctaatgctggtggcggcacaacacatgcaccatatttggtcggtttgtttgatttacctgagaatagataa

SEQ ID NO: 71182 - DNA, 504 bp, Acinetobacter baumannii
atgagctttattcaacttaaaaatgatgctcttgctgctcgcttggctcaagcagctgaccgaatgtttgataccacccctttatcggcagcgattgcaaatacttttgcgacggttaccgaggataactttgatgcaggtggacgccctaaatgggcaggtctttctccggatcgctcacaaccatcttacttatacaggtcaggaaatttacgccgaagcattacaacccaacatacccgtgatcaagccgttattggcacaattgtcccttatggtgcgattttgcattttggtggaagcacacgaccacatgtgataagacctagaaacaaacaggctttggctttcaatggtcgggtatttaaacaagtcaatcatccgggaagcaaattcaaaccgcgtccatatttgccaatggatgaacatgggttcttacagcgtgaagctgaggatgctgtccttgatgatgttgattactattggcacaaaagctttaaataa

SEQ ID NO: 71183 - DNA, 1086 bp, Acinetobacter baumannii
atgcctaaatcaattcttgttgcttcatgctcatttgacttgaatgccacatcatctcaactagtacttgttccggaaggaacatttagaggggttgatggacgtccttttgatgcaccacactgggaacttactcctgagcgtggacagcagattgttgctgcattaaatcaacgtcaggtggacatggtgattgattatgaacatgccacattgaaggcacaggaaactggtgaaccagctccagcttcaggatggttgaaggcagcatctttttcatacgtcaagggagttggaatatgtagtactaattttaaatggctcgataaggctaaaagccatattgagaaggaagaatataaatatttatcgcccgttcttttttataccaaaactggtgaagtcgttggacttcatagtgtcgcattaaccaacacccctaatctggataatctgcccgaggctcgtcttgctgccttggcacaggattactttacccaaaattcaccacaggattctgaaatggatgagttaatcgaacaactccgctggatgttaaatctgccattgtctgcaacaccagaagaagttatggcagaacttaacaagcttatagcgcaaattaaagacaaaactggcgttgcagtagctgcaaatggtcagcacttgttcaatgttttagatgaaattgaacaaatcaaagtggctgcaaatagtcagactcaagttgatatgactcaatttgtgccaatggctgtgtatcaagaagctattgcacaagcgagcaatgctgttgttgcagctcaagaaaaagaagttgaagagctgatcacagctgcatgtagtgatggtcgcctaactggtcaggcaacaattaaatactataaggatcaggctaaaaccaaccctgaacatgtcaaaacgctgattgaaggattacccaaaattgcagctttaactcagcgtcaaactgaacaagtgaacttggctgcaaatcaccagcaacaaccagttgttgatgatattaccgcgagtatcgcaagccaattaggacttgatccagcagatttaggagctaatcaatga

SEQ ID NO: 71184 - DNA, 2145 bp, Acinetobacter baumannii
atgagcggaagcaactcaaccgtttctcttacattgcagatcaaaggccagcaagctactcaagagatgaagcgaatctcagaccagcaagtccaagccacaactaaaatcaatgcgcaatggacgaagattggttctgctcaggcaaaatttgtcaatacagctagagctggcacacgggaaactttaaatactgcccgtgctggtgaacaattgttacgtaccaatcgattgcttgaaggtgtactacgtcaacaatcgattcaaaccaagattcagagccagcttttaaggcagcagcttagttctgcccagcagctagtgaattcagcaaaaaaagtcgagcaatcaactaagcgaacacaccagtcaactcaacaaaccgtttctctatggcaaaaagggtcacaagttatgggtggtcttgcgggtgggtatatggcagcgaaagctgttgttgctaccccgcttgagcgtaaccgtaactttgcagcaactgtgtttgacgctacagcaagtattacaaatggttttgctggaatgaccacagcgcaagcaaaagcagcaaatgcggaactgatgggttataccaaagatgcggtgcgtaaaggtcatggtacggttgaaggagtatctgaagcagcgggaatattatctgcatctggcatctatgacaaaatttcagatttaagagaaccattaattgcagttgcaaagtcggcatttgcagctggtgcttctgaatcagatatggctaagcttgttcaacaaataaaacaatttggtattgcgccaaatcgtacacaagctgctttggatcgaatgactgcatcaggttttgctggtggttttgaattgaaagacatggctcaatttctgcctgaggtgcttgctacagcgacaggtgcaggctttagtggtgagaaaggactaaacactgtaacaacccatttacagcttgccagaaaatatacaggtacgccgggtgaagctaaaacaaatattgaggacctatatggattaataaatcaaaaacattttaaagatgccattgccaaaaatattccaattagagatggtgaccccaccaaacttggtaaaaaaggaaaaaccgtttttgatttaacacaatatttggtgaacaataaattaaaaggtattgatacaaccgatgccattgcaaatttaatgaaccgtgaattatcggcaaataaggaatataacaagttaaataacgatctgagcgttgctctaaaaaataagaatgctgaacaggcagaaagaattaagcaagctattgaactcgttattaagggacaatttggggacatctttcataataaacaatcactatcaggtatttcatccattgttactggtatgaaaaatggctcttatcaagaaatagatagtaagtcatggaatggcctaggatcagttgaccgggttgcagatatcaagggtgataatgagtttgctcaagcagctgctttacagcaagaaactattcttgcccaagtaaaactatatgagtcggtaaacggtaaattaggggaatttgagaaaggttttgttggcgtcatgcagaacaatcaaggacttactgctgccaccattgctgcaactggagctttaactgttttagcagcaaccgctggtggtgcttcacttgcaggagtccttagccgtaaagcatctgatttaccaccaaccacaggtggtttagcatctaaagcttcaggtgcagctaaaacagctggccttgttggtgcagcctatacgggttatcaaatctttaaaccaatggatgatgctggatacagtctagtcagtaacctcttggctaaagttgggattggaagtggtggtgaccgtcctgattttgttcagcaagccattgaacaaagcaaagctcagcaagcttcggctgaagaaaaaagtaatcaattaatctcagagcaacaaaaacaaaatgctttgagtcaagaattgattaataaaatgaacactttaattggggtctctgggcaaagcaaaccaattaattttagtggtggactattgggagcaatttccgaacacgcagcaactgaagaaaaacgccatggtgcttctaatgtgcctttttatctacaacggcactaa

SEQ ID NO: 71185 - DNA, 1050 bp, Acinetobacter baumannii
atggcttatccaatcaagacatttgaccaattacgtgctgatattattcaggaaattcataatttaacaggcttaacgttagatgatgaagatgatgcagctatacgtgcagatggtgaagcttctgtggttgaaggtctttatcaccatcaaacttatattcaaaaacagctatttgttgctaccgctgacgaacctttcctttatattcacgcaaagcgcttagagtgtccacgtaatggtggttctaaagcttctggtcgcgttaaatcagtttcaaatactgctgtgactattcccgcaggctcaaaaatcacggatggtaaaggtcattactggctaactgaatatacagagcagctttcagtaaataaggctaaacaaatccaagtgattgctgagtttgaaggcgtgagctggaattttgatagtgagcaactgctctgggttagtccattaccgggtgttgctgcacaagtggatgttattgaagaaatatcatctggtgttgatgttgaagatgttgaaaattggcgtcagcgcatgatggaaaaagaggctttaggtcagattcgtgatcgtgaagccgatctaaaacgtatcgttaaagatgtgccgggtgtggcagatgtttttatttttcctaagcgtcgtggattgggatcattagacgttgcaatcacagcagcaggtaacccgccaaactcaccaagtactgctttattggctatagttcaggctaccttagatgattacagtggattttggggcgatgtaagagcttatgcaccgactaaagaatatctcaacttatcagctgtattctctggcacagcaagcgaaacagacgttgaaagagtcattcgagattatgtcgggttgctaaagccgggagaaacttttgttgcctcaacagttgttagccgggttaaagatttgcaaggtgtaacggactttcaacttacaccagcaggcaatcaagaacctacaaatacggtatttattacgggttggctccggatcggcacacttacggtgaaacgactatga

SEQ ID NO: 71186 - DNA, 537 bp, Acinetobacter baumannii
atgacttttgaacagactgtagagctttatgcttctgtacttcgtcaattattgccaactggtggttatgacacttcaccaaataccgatattgcaaaagatatctatgctcatgcaaaagtgctggcgcaagcggatattgatgcaaaacgtattttgactacgctggaatatattcctgaagaattattgaatgagtatgaagctgctcttggtctaccccttaaatgtacagtaaatacaacaaaaacaattgaagaacgtcttcagatcatcaaatgggttttggagacaaagaacgttttaaacctttcttatcttaagcagcttttgactttatttggtgttgagttaattaagctcgttcgtttcacaccaatgcaatgcacagccccatgtagttcacctgtcaacaccgaaagcctacggtttaaggtcaaactcatattaaaggcaccgattaaagcagatatggcctgcattatagaaaactatttaccagcttatttgcgatatgacattgaggaacaagtatga

SEQ ID NO: 71187 - DNA, 1539 bp, Acinetobacter baumannii
atgaaacgaattgatagtgtaaatgcacggcctgacgtgaacggagcgggtaaaactggctttcatgacaattcagattcaaacggacaggatgcaacttatctcactcccgattggcttaatacaattcaagaagaactagctaatttactggagcttagaggcattactttagatccagataaacgtcgtcagctgtttgatgccttggcaggtaaagatgatgtaaacgcagcactcgctaccgctcaatcattgattattgatgagagaaatgcacgtattgcagaattaaaaggtcacttagatgccttaaatccacacccacaatatgtgatgagaaaggattttagattgctttatagaacattgacccctgaaaccacggtcaatcctcgtatctataccgatgatcctcaaaactggcagataaagcatacagtcgaaaatatgagtgctcatatcatgccgaatggagttattaaacagactctaaaggttagaacggtttacgcagactataatgctcaagtgtatctaccaataggcatgtctaatatccttagtgtttctgcccagtatcagggtcaaaaagaaaatccaaacggtgaagatgacacaactattcgtttattagatatttataatgaaatagtccctttagaagacggtttacaggaatgtagaacagtcattaacttccgctttgactatgtaagcccaaatacaccgggtcagcgcgaacgttttgcttatttagaagttactggtttcggtgcttcaaatactgatcttgagaacttaaacagctatccttatccgtattacaacaatcagaatgatttagatggtcaagttgtttatattgatcagaatcttactaacataagcttgcttgaactattcattcaaacttacggtgcgccaacagcagctacacgagctattttcgttgtttcagcgaacgttactattatagctatcacttcaggaagctggttggctggctctagtcgtcaaatcattaactatggtcatatatatggtactggtggctctggtggttactatgatgtaaatacagctaaagttggcgatggtggcacagcaattattgctcagaatgacagtagctttattgatgtacgcaactacggattaattgcaggcggcggtggcggtggtgcagctggtaaatctgaatactcagttggtgctcaagagtattatgcagttggtgcaggcggcggtggcgttccattaggcactggtggtattaatatcaatcaaacagcacctgaaggtaaaacactcgtaaacctagttggcacagcagcaacattgtctgttgtaggtaatggagcacatggaacaggtttagcagctggtgatggtggtaaagctggcgaggatggtaaagctggcgattcaacacttcaaaatggtgttgctggtaaagctggttatatttaccaaggtaatgtcacaatcacgaatattggtggcggactagtgaaaggtagaacgccttcaatttga

SEQ ID NO: 71188 - DNA, 666 bp, Acinetobacter baumannii
atgccgtattggaatttatatcttcaagatcaagggtttaattatcagcagataggtatcttatcatctattgctattgtgacgcgattctttgcgcctttagtttggggctggatcgcagataaatctggtaaaagaatgcttttggtgcggctcgcaacttggatggaagcttgtatatggttggctatctttatagttcccaatacatttcaatctgtcgctttacttatgcttatttttagctttttccaaaatgcaattttggctcagtttgaaggggtaaccttattttggttgggcgaccaaagggcaaaactttatggaaaaattcgaaaatggggatcggtcggttttattgtaggtgtgtttaccataggtgcaattttagaaattattccaatctctatgttgcctattttattactcataatagcatcgcttgcatttatttgggcttttacgattcgtgaaccagaaggggctcctacttcacaaaagtatttagaacctttattgcctgtgttaaagcgtccagaagttgctgctttttttactattgaatttattcttcttttttcacatgcccctttttatagtttttatagcaattttctaaaatctttaaattacagtaccactgaaattggctttttatgggcatga

SEQ ID NO: 71189 - DNA, 795 bp, Acinetobacter baumannii
atggcttatatggatgaagtcttgagggaaatgaataaaacctcaagagaaaaagcggaagaatattgccccattatctatttaattgaagattttgcgaatagttttggcttaactattgagaaactctcatattacttgcttgcaaaaaactttgctgaaaacatttatgcttatgtgaatatcaataaaaccgactatataaagctagacaaaaaaaactctaaaaaagctattaaccatcttttaaatatctttaatgataaaaaatataattattctctactttcagtaatagatgatgacaatattaatgaacttgaccacatccatataaaaagagatgacttgtataatttcaccccattaaaagaattggactttgattattgtattggctatcaatttatcggtaaagtaagcctaaaagatgtcgactataaagaattagaaaaagcaaggaaggagtatattgatgttcaacccgagctttttagtgaagaatggtatgccctgcatccaaaattacaagaactaagaaacacgccaattgatgagccaaacgcaactatttcgtttcagcatccatcacttgatcaagaaaacgaaaattatgcacctgaattactattagcaatacaagcatgggaagcgaaatatcttaataatgagtatccacatcgcgaacatactccagcaataaaggcgattcttacaaaaagaggttatacaggcgtgcgattacaagaaagaatttccgcaataacaaatccaaaaaatataaataaatcatag

SEQ ID NO: 71190 - DNA, 216 bp, Acinetobacter baumannii
atgactatcaaaccaatccgaatccaatttaaaaaggcttgcgagctactagacgtaagccgtgaatctttgcgtcaaattgtacgaacagataccacatttccaagacctattaaaactggagaaagtagacaagcaccagtctattttgactatgcagagcttgtagagtggcataacaagcaaaagcaacgcctttcaggaatggaggcttaa

SEQ ID NO: 71191 - DNA, 507 bp, Acinetobacter baumannii
atgaacccatctatttttaatttcaataatcacggcgttcgtgttgttttgagcaataccaacgagcctttattttgtttgactgacgtatgtagcgtcctatcagtgagcagaacatcacgcttattacgtgaattagattcaaagggtatggcggattgccacatccttacaaatggcggtactcaaaagctcaagttcattaatgagcctaacctttatcgcattatttttcgatctaataaaaaagaagcgttgaatttccaaaactgggtatttgctgaggtactgccaagcatccgcaagactggctcatattcagcacggcagacagcctatgaagaactgaaccgcctatgtatgcaagcaaagacccaaaaggctaaaggttcatttcatggcactggcttggcaaaccaccgctattcaatgcgagatttaaacctaagaattacaacatgcaaagccaatttacagcttacttttgagggggtacacagtgattga

SEQ ID NO: 71192 - DNA, 336 bp, Acinetobacter baumannii
atgaaaaatgaatcattcgatattgctaacatgcctaagtatggttatgctgtagacctctcaaaacatattagcgtcaccccacagcgtcattgtggttttattgtgcctaagttttgcctagcctctcaagctgtgcaagaaacaagcgcaagcatctcagccatgcaaacaaggctgtactccctctatgaggggatgacacgacaaaataagccagtaatggtgaatatgtcgggcggttctaatatgccgagagtgaatcctctcaccataatttctcaagttatggtgaatcctcaaaactcaaaaatattaggaggcaatcatgcctaa

SEQ ID NO: 71193 - DNA, 1350 bp, Acinetobacter baumannii
atggaatttaaacaatacccaagttataaaaaaagtggtgtggaatggttaggtgatgtacctgagcattgggaatctaatcgtttaaaaaaatatttgattgaaagaaatgaaaaaaactcgccaataaaaactgataatttattatcagtcacgatgtatcaaggtgttatacctgtatcagaaaagcaaggtaatggcggtaataaacctaaagagaatttagaaaattataaaatttcttatcctaatgacattgttcttaatagtatgaatgtcattgttggttctgttggtcttaataagtatacggggcttattagtcctgcttattacgctctatataacaggaataaaaataataatattaaattctttagctacattttccataacccatttttccaaaaaggtctgtttggcttgggaaatggcattatgtataaagaatcagaggatggtaagctcaatactattcgcttaaaaatcccaatggagaaactaaaccaagtagttctcccttgtccaagtataagtgaacaaaaccaaatcgttgcattcctcgacacggaaaccacccgaattgacaacctgattgccaagcaagaaaagttaatcgagcttttagaagaacagcgtaagtcgattatttctcatgctgtcactaaaggtttaaaccctaatgcacccatgaaagatagtggtgtggaatggttgggcgaagtgcctaatgattggaattttagtagattagatgctgtatcaaaaatcgttagaggtaattccgcattttctaaaatggatttattggaaagtggtaaatatgtagcactacaatatggaaaaacgtacaaagttaatgagataaatgaaagcttcggctcttatgtgaatcaagagttttttaaaaaatctcaaattacagaatttggagatattattcttatttccacatcagaaacattagaagatttagggcactcgtgtttttatgctcgacatgatgttgggttaattggtggagagcaattcttattaaaacctaagaaccaaaattttggtaaatatatttattatgcaacgaaagcattttcttcatatttgcagagatatgccacaggtcttaaagtttttagatttaatttagatgatttaaaaaaaatctatatccctgatatatctttagttgagcaacagaaaattgcagagtttcttgataaagaaaccgcaagaattgatatatctgttttaaaacaaaaatctttaatcgaaaagctgaaagaatatcgtgcttcgattatctcccatgctgtcacaggcaaaattgacgtaagggagttcggtgcatga

SEQ ID NO: 71194 - DNA, 258 bp, Acinetobacter baumannii
atgttattcaaaaaattcgctgttgctgctgctgttgccgctactttagctttcgttggttgttctaagaaagaagaagctccagctgctgctgctgcttctgaagctgtagctgctgcttctgaagctactgctgctgcttctgaagctgctgttgctgttgacgctgctgcttctgaaactgctgctgcttctgacgcttctgcttctgacgctgctgctgctgcttctgacgctgctgcttctgctgcacactaa

SEQ ID NO: 71195 - DNA, 234 bp, Acinetobacter baumannii
gtggaaacaacaaaaagtaatggcgcattagaattcatgaaaaagttcgttgatggtcatcgtatcgtttcaactggtgatcttaatgaattccagatatcagaagctcgtgttgaagatcgtttgtatgtagaaccgggtgatgggttatgcctaggttgggttgcgcttccttgggagctaacaacaactaaagatcgtgaacgtgaaaagaaatatctatgtaaggattaa

SEQ ID NO: 71196 - DNA, 252 bp, Acinetobacter baumannii
atgttccatagtgcgaatgatgggaaaggtagacggaaagtattagtcaacggcaatgaagttaagcgagtggtttgggctaacgaagagcaagggcttgcatgtatctatcgatatccttatcaaatagataggcgtaaagacgaagtaaagacaatgctattgcgtggtgatgtgaaagttgagtttataaatgaaactacaaacactgaagccgagactacatgcacaaagaacaccaaggcagaatag

SEQ ID NO: 71197 - DNA, 279 bp, Acinetobacter baumannii
atgaaactacaaacactgaagccgagactacatgcacaaagaacaccaaggcagaatagctggggttcaggtcgtggtggtcgtccatggcgtagactcaaggcaaagatacatctaagagataagtacacatgtcaatgctgtggtgttgtgaccatggagcttgagttagatcacatcgttaatatcgctcaaggtggtaatgatgatgaatcaaacctccaatctctttgtgttccatgtcataagaagaaaacccaacaggagagccggcaatga

SEQ ID NO: 71198 - DNA, 207 bp, Acinetobacter baumannii
atgattattactggatctattcacatttcattcaaagatgaatgcaattgcgttggttgtttctatacacgtaagcacggcggctatatgccttgtcaaaagaattgttctatcaatatcaataagcagaataaggcaattaatggtcagccaattcaaccacctaagaagccgcgagtaaatcaaaatgaaatgtataactattga

SEQ ID NO: 71199 - DNA, 315 bp, Acinetobacter baumannii
atgaaatgtataactattgaacatcaagttgatgcttatgaaactgaatggcttttgaatctttcaaagcaagattggtccaagttacctacttggtttaaaaagatgcaccaagaaaataagttattcgttggtggtagcaagattcaacttgagactgagcactttagagttgaagctgataagaatgatgtaatttttcttaaaccggatggatttgtagaggtcatgcctaaagataaattctataaaacttatagagatatgtttagtgtccctaatgaatttcaacctaatgtgagttccttaaaatga

SEQ ID NO: 71200 - DNA, 228 bp, Acinetobacter baumannii
atgatttcacaacttgtttcagtgagagattcgagcacaggcgcagaggtgtactttgacccgcaaggagttgaaggcgccgttttcaattggaatggtaagaaagattacgaccaatacatttataacactatgttgtatatgcgaagcggcaatataatcagttttgttgtgaaggatgatggtaagaaaaagattttagaccatattcaggaagcaccaaaatga

SEQ ID NO: 71201 - DNA, 132 bp, Acinetobacter baumannii
atgggtattcgggaatatttatttggatgtcaatgttgggcatgcaagaacattcgtgcaggtggtgggtatcaaccatgccacaaggctaaaaaatctggtgagctaagtaagccaccaaaaaaaccatga

SEQ ID NO: 71202 - DNA, 516 bp, Acinetobacter baumannii
atggcaaagattacagctgctgttctgaagcaaagcatttcgaccttaaatattcccgttgaaaaaactgtcaaatggaatgttgaagtgactgaatgcaacattgaatcacttaaaaagctaacaaatgagccaaaacttgaacttggtgaaattgttgaacttgaagctgatatttttgttaaaaaaatgaacttcaaagaaagtcgagaagctgctaaagctatcgaatgggatttagattatgcaaatcttgaacattcgaaagtaaagaaaattgattcaacacatatgcaagctgctcagttgcttggatctatttgttcagataaaaaaggtactccatttttcactaatgtgaatgatatttacaaagctgaacagagtttgattaatgctctttatgcggctgcggatgaagttaataacttcttgggaaagtcacggacgaagaacttgacgacagagaactccttattgagctcgtcctcaacggagtcggtggaaacaccttag

SEQ ID NO: 71203 - DNA, 216 bp, Acinetobacter baumannii
atgtattggagagcctatcgtcaaaaatatggctctctattttttggccgccgtcttgaacaaagtttcggaagctggatggcgcactatacaagtttcaaggttaaagttggaactaaggtagatccacgcgttttcatgcctcatgaaaaacaatcagttgaagaaaatagtgtttcacttgaagaatacttaatgacatttcatagtgattaa

SEQ ID NO: 71204 - DNA, 264 bp, Acinetobacter baumannii
atgaccgatttagggtactacggattagagcaagatggctttaaattattgatgccaataaagaaaaagaagaatttacccttatttgatgttgagaaaaagtacaataaaatgattggaaaaatacgagttgtgatcgaacatattaatagtcaattgaaaacgtttagaatattaagtgaacgctatcgaaatagacggaaaagattcggtttacgcattaacttaatcgctgcactggtaaatcggatgaacttgcaataa

SEQ ID NO: 71205 - DNA, 264 bp, Acinetobacter baumannii; identical to SEQ ID NO: 47948

SEQ ID NO: 71206 - DNA, 336 bp, Acinetobacter baumannii
atggtaacagcgaattttgccgctatcgccggattcagcttaattgctgtcgcgcttgttgctgttttcttttctccttaccgtcgttggcttggttttatgcttgcagggatgtttttttgggggctattggaagtggtccgttttggagttcaagtcacttttgaaatgccagtcacatatagttatttaactgcactaagtctagcgatggtaatggtcacatttattttattacgtgaggataaacaggcacagaaggctttggcaaatcgccaatatatagaacatacgccagtatatgaagatgatcagcagcaatgttctagccgataa

SEQ ID NO: 71207 - DNA, 1224 bp, Acinetobacter baumannii
atgcgagaaatcattcttatatcctttttaggaccggaccaaccaaaccagtttacccgattaatgcaagtactatccgtacattcattgcaaatactggatgtaggtcaggccgttattcataatcaactgacattgggcatcgtggtcgcttcagataatgaaactgcgacagcgttggcaatgaaagagattttgattttagcacatgatattggcttaacagtgcgctttaaaccaatctcgggcgcagaatacgatcaatgggtaagcgaaggtggacgaacccgttatatcgtcacggctttggcgccagaactgactgctgcacatttacaagcagttacacaaattgtgtctacgcaaggctttaacatcgaaacgataacgcgtttatctggccgtgtagaccttgaaaaagatagtacattgcctcgtcgtgcttgcgtacagtttggtttaagcagtggtccaactttagatgcacaagccatgcgtgctgcttgtttacttctttcaagcgaattaaatattgatgttgctgttcaagaagacaacgcatatcgacgtaaccgccgtttagtgtgcttcgatatggactcaaccttaattgagcaagaagtgattgatgaattggcgattgaagcaggggtaggcgcacaagttgctgaaattactgaaagagcaatgcaaggcgaacttgatttccaacaaagcttccgtgcccgtgttgcattgttaaaagggcttgatgctgctgttttacctaaaattgctgagcgtttaaccattaccgaaggtgcagaacgtctcatttcaacattaaaagcacttggatataaaacggctattttatcaggcggtttccaatattttgctgaatatttacaaggtaaacttggtattgatgaagttcatgccaacgttctagacgtacaagatggcgttgtaactggtgaagtaaaaggtgtaattgttgatggtgcacgtaaagcagagttgctgcgtgagcttgccaacaaactcgatatttcactagagcaggcaatggctgttggtgatggcgcaaatgatttaccaatgcttgcgattgcaggacttggcgtagcgtatcgtgctaaaccgcttgttcgccaaaatgcgaatcaggcgatttcaagcgttggtttagatggtgtgctgtatttacttggtatgcatgacaaagatttaaaccgtgcttaa

SEQ ID NO: 71208 - DNA, 333 bp, Acinetobacter baumannii
atgaaaagatttttcttaaaatactttaatttattattggataaaattctttatagatcatttgttttaatagagggggattctctgcctaaaataatgccaatgagagcaattgtagtagctgctgaagatgatgagttctggtgtgtaggattaaaatgtccttgtggctgtggttatacaattgagttgcctgtaattaaagaggcaaagcctagatgggatattaagatcaattcgcagaataaaattagtctatacccctcagtatttctaaaaaaaggctgtaaatcccatttttggattaaagatggaaaaattatttggtgttaa

SEQ ID NO: 71209 - DNA, 1371 bp, Acinetobacter baumannii
atgaactcgaaatcacattttagaattactgataaagatttagatgctctaaaacagcatctatttcctggggatggattagaagcgagtgcaatagtacttgcagtgtgtaatcacataaatgatcaagttattttcatggttcaagatatcattctggtaccttatgatgaatgtaagcgagaaattgattatttaacttggcctggaaagtatattgaagatgcgatagaaaaaggggaaataaacaactttagtatatttctcatgcattcacatccttcaggtgtgaattggttttcaaaagctgatgatgctagtgatctaaaagtgtttccatgcatttttgctgcttatcatcaattacatggttcaattatcatgacacctgagggtgagttggttggtcgttattatcaatcaaacctatctaaacaatatattgataagtttctgatagttggtaatgatattgaattgatatggtcctcttcatcaaaaaaagcattgcctttttcttccgaaatgacgcacattctaaaaaaatttaaaattggtgttattggtgtttctgggactggctctattatagcggagagtttagctagattaggcgttggacatcttgttctaatcgatgatgatgttatcgagcataagaatttaaatagaattctgaattcaacgatacaagatgcggagaatgagagagcaaaggttgaagttatagcgaatgcaattcgaagctatcgatcagatatagaattaacttcattaaattgtaagatcggtacatatgaggctattttagaggctgcaacttgtgacgtattgttctgttgtgttgatactgtttctgcaaggatgtatgttgatttaattaatgagttctttcttttacctgtttttgatattggagtaacaattccaacgggtttaaaagatggacgaacctttattacagaagtttgtgcacgtttagattatattcagccacataaaagctcattaaaggatcgaaaagtttatacttctgcttctttaaatgcagaatatctaaaagatagctctcctgagacttatgagcagcaacttcaagctggctatataaagggagtacacgaagaagctccatcggtgatttcacttaacatgctggcatctgctttttgtataaatgaatttattgcccgaacttttccatttcgccaagagagtaatgataattatgcaagggcaattgtttgcttaggggcaaatgaaactgaatattttaaagaagatgattttgaaccaatctctaagataaatactggtcatggagtgactaatcctttgctaggtatacctaatcttggagaggggaaatga

SEQ ID NO: 71210 - DNA, 1062 bp, Acinetobacter baumannii
atgcaaaaattttcttattctcttagcgatttaagttttaaaaacggaacaatagatgaccgttcacctattggttctcaacttttaagatctattggctattctcaaaaagatgatgttctcttatatcaagtgctcaagcaacaaggtatggaagaaattagccttgaagaaaatattgattttgaaaaaggtgataaatttttcattgttgagggagatcgaagtcttaaatttaaaattaatggttttaactatgagtggccagaaagccaaattacgttaaagcatctacatttacttacaggtattacagataagtcattcttcttatctagacagacggaagaagacttattaatcacggatggtattgttgtaaatttgaatgcatctggtattgaagatatttataccaaagtggttaagcagtattttgaattaaatgttaatggaacaataatcaaagttgataaagcccaaattgttgtttcagaggcattagccttagctggtattcaagatgggcataattatcaaatgtttttgaaaattcaaggtgagccaaaagtagaggtgcaatctaactctatccttgatttgtccaagcccggtattgaaaaattacgcctgattccgcgagaagttaataatggtgatgcttctctgggacagtttgaagtattgccgaaagatgatgagtatttgaaacaggtttttggagatttcagaaccattattgatcaaggacgtagatggttagttattgaaaattatgaactccctgatggttatagccataaacaagttacattggcgattgagatacctagtttatatccgcaggcggagatcgatatgttttatacatgtccacgtatctatttgcctaatggagtgacaccatcctgtacagaggtagaacaaattattgagggcaaaagctatcaacgatggtcaagacatcgtagtcatgtatcgcagtggaatcctgtaatagatagtgtagttacacatttttcattgattgaggagtctttattgcgtgaggtgcagcaatga

SEQ ID NO: 71211 - DNA, 552 bp, Acinetobacter baumannii
atgaaccagaatgccaagactatgaaacttttcgatctatgtaaacataagaaacctcatggaaacaagattggtaaagaggtatttacccaaatgagaaactatgttgaaaaacatagaggaacaactatctttgagatttcattcacagatattgaatttgcggattcttcttttgcaagagagagtattgtgcttttagctaaactctatagaggcacaaaagggtttatcattattaatctggatgatgaagatataattgataatatagactatgcagcggtagctttggaccaaccattgacaataagattggatacagaaacaagaactttaggaccaaaattaacaaagtcaaatctagaaatatttaattttttgaaaaataagaaaaaaacaaccacctctcaaatcgcatcttcaatggatttatctgtgcaaaatgctagtagtaaacttaaaaagttagtagatgatggttatattctacgctttgaagaaacggctgaaagcggtggcattgagttcatttatcaagctatagaataa

SEQ ID NO: 71212 - DNA, 1149 bp, Acinetobacter baumannii
atgaatgatttattaaaagatattttaacggtattagaggataacggtcctttaaaagctccccaaattgctaacattcttggaaaaacaaagggtgatgtcaactctgtactttataccgcacttagaactgtggacggtttagagaaaaatgatgattatatctggagctataaagggcataggatgatcaaaatttcgtttgattgttcggctagctggcttagtgcagaaatagttgagcaaaagcttaaacaatatcctgatcttttaaaacaaaagtgcataatcgaattcgacttctctgataaatatttattattagaatgcatacttaaaatcttaagtttagtgaaccagctgactaaagcaggtgctaaagtagtaattaaattttcacctaaatctaaaggtttcagctatctacaacgttgcggtttttttgataatgtagataaaacagtaaagattcttccttatcggcctaaagagtctttagcaaaaaagtataattctaattcagacaatctatgtgaaatttttgagataactcgtgaatatgatgactcgttattagatcgaattgcagaactagtaggagctaaactttcagaagaagatgtacaaaaattattaaataaactactgactcttataggtgagcttgttgacaatattcgtgagcatggattatcagcggtaagtggttatattgctctacaaatttatagttctggaaaaattatgatagctatttcagatagtggatctggcttgatacatacattaaggacagaagctttaaaccattatcaagataatgaggatttgaatgattttgtgacccaaagtatggaaaatgatattggtttgttagggtatgtttttaatcatggaaatatatctagaactggtgaaaatggaagaggcctaggcctatctaaaagcaacaatactttaaaaaaattatcacatgaccaagttgctggaattgttttaacaattagacaacaagataatgagttaagttttcctttcaacacaaatggtatagaaatagaaggttgtaaatcgcaattaaacttaatgtacatacagggaacacattatgttttaacgattcagcttgacaaaatgacaataaactga

SEQ ID NO: 71213 - DNA, 678 bp, Acinetobacter baumannii
gtgaaaattcaaaggtttttaattgaaaatcatggttcaaatattgatgcttttaagatggcattgactgaggcaataaaattttcaggtgcaaatagtattgataaaattactttaattgtatctgttatgcggggtttccctcatacagtaataggggaatttcttggtgaacaagcttctaaactattatgtaaaggagaaactatagatttagggtatgggatatccatgaatttagaaactcctaataatctgtctttgcataaaaagtttggcgttgtactagctgcttacttaccagagaaagatatgtccattattgatactataagatccgttcaggcagttgtatatttgccttggcatgaagatgatggaaaaaaatggttagcttgctgggatgcagctatttggggaaattcttcatggagcgttgaacctcttatattttcacaagagattgaagatgccttaaaatatgtaactaaaggaattaacttgtctacagggttaacacatacacgtgataaagaatttactaagcgtatttttcaaaagctgaaaaatgatggatatgacttagaaccagaagatattaaatcttgggcaattaaaaatggttggaatgctaaacatgcggaagagtttggaaagttagctgctaaatatttttga

SEQ ID NO: 71214 - DNA, 264 bp, Acinetobacter baumannii; identical to SEQ ID NO: 47948

SEQ ID NO: 71215 - DNA, 264 bp, Acinetobacter baumannii
atgactgatttagggtactacggattagagcaagatggctttaaattattgatgccaataaagaaaaagaagaatttacctttatttgatgttgagaaaaagtacaataaaatgattggaaaaatacgagttgtgatcgaacacattaatagtcaattgaaaacatttagaatattaagtgaacgctatcgaaatagacggaaaaaattcggcttacgcattaacttaattgctgcactcgtaaaccggataaacttgcaataa

SEQ ID NO: 71216 - DNA, 264 bp, Acinetobacter baumannii; identical to SEQ ID NO: 47948

SEQ ID NO: 71217 - DNA, 297 bp, Acinetobacter baumannii
atgagtgaatttaaaaaagtaagtaatgtgatgcttgaatctaacggcatttactttattgaatgtcccggctgtaaatatctgcaccccatacatgttggtcagcaacaccacatacgatgggattttgatgggaatctagaaaaaccaactttttcgccatcattgatggtgaatggtggtggatctaaccaatgtcactcatttattagaaatggtcagattcaatttttacctgattgtcgccatgagctcgcagggcaaaccgttgacctaccggaagtggaggatctttaa

SEQ ID NO: 71218 - DNA, 264 bp, Acinetobacter baumannii; identical to SEQ ID NO: 71204

SEQ ID NO: 71219 - DNA, 270 bp, Acinetobacter baumannii; identical to SEQ ID NO: 54737

SEQ ID NO: 71220 - DNA, 264 bp, Acinetobacter baumannii; identical to SEQ ID NO: 47948

SEQ ID NO: 71221 - DNA, 261 bp, Acinetobacter baumannii
atggcaaataatcagcaggatgatcatcgagtcgtaaaaataggttgtgcctctgggttttggggagataccaatactgccgcttttcagttagtgcatttgaccgatattaattatttggtttttgattatttgtctgagattaccatgtcgattatggcaaaagcgaagatggtagaaccgaaacatggttacgctttagactttgtcagccgagtcatggcacctttgctgaaaaaaattgctgaaaaaaattgctga

SEQ ID NO: 71222 - DNA, 264 bp, Acinetobacter baumannii; identical to SEQ ID NO: 47948

SEQ ID NO: 71223 - DNA, 1350 bp, Acinetobacter baumannii
atgttagatgtatgggaaagtcgtcgtgaagaaaataaacgtagagacaatgataagcgtacggagtgggagcgagattatgctcgtttaattcattcagcagcctttagacgcttgcaatcaaaaactcaggttctaggattgggagagagtgacttttatcgtacccgcctgacccattcaatggaagttgctcaaattggaacaggtattttgcgaagtttaaaagcaaaatataaaaatcaagatcaggaaatttatgatgttttgccagatgaagctttaatgaatgcgatttgcttagctcatgatattggtcatccaccttttggtcacggtggtgaagtcgctctaaacattcgtatgcgtgaacatggtggttttgaaggaaatgggcaaacattaagaattctcacgcaattagacaagtacactgagaattatggcttaaatccaacccgtcgtttgctattaggggtactaaaatatccatcctcttatacagcaacagtacaagaaagtgcctatggggagctcaaatctccacgttggttatctgagtctaaaaaacagaaacctcctaaatgttatttagataccgaagataaagttgtagattggattcttgaacctctaaattcaaacataattgagtttactaaattagaaccacataaatcaggtcatttgaaaccagccaacaaagctttggatacatctattatggagcttgctgatgatatttcatacagcttacatgacttggaagatgctatttctttaggaatgatcactcgtacagattgggaagatcataatcaagctcaagaaaaggatagtaatgttcttaaagaagaacgttttaatagttgtggatttaatagcattactatagccgagaagctgttttcaaaagaaagctatcaacgtaaggatcaaatcggggatttagtcaatttctttattacaaatattgaggtgaaaacttcggctatttcatctgcatcttgtaatttgattaaatggaatgcagtgttaaataaagagcacagattacttttagatcatatttttgaattagtggaaaacaaagtaattaaaagtaccaatgttcaacagcttgagtttaaagggcaaaaattagttatggagttgtttgatacactggcttctgatcccaaaagacttctgccaagttcaacattatctcgttatgagcgacaagattcagattctaaaagaatgagagttatttgtgattatgtttctggaatgacagatgattatgcgactcgtttgtatgagaagttacattctccatataaaggatcaatattcgatagactttga

SEQ ID NO: 71224 - DNA, 264 bp, Acinetobacter baumannii; identical to SEQ ID NO: 47948

SEQ ID NO: 71225 - DNA, 2454 bp, Acinetobacter baumannii
atgtcagtaccagctcaaacgccatcaaaagaatatattgcgaatggaacaacaactgcttttccattagagtttaattgtgataaagcagaatatttaatcgttactcttaatggtgaagatgcgcctgtaggctcatggactctagctaatgatactgtcacctttaatgtagcaccactaaatggtgtggtcgttaatttggaaagaaatacgccatttcaacgcaccactaattaccaactatatgacaactcttttcgcccttctgctgtaaataaagactttgatttaatctggtggaagcttcaagaacttgggtatcgtgatcaagttatttggcttgcattgattaaagagatttcggaccgcacaaatggcgatatagaattacaaaatcaaataaataccattgagcaacaagtagatcttaatacacaagatattgccaagctgataactgacctttctcaagaaatcgctgatcggattaaaggcgaccaaattttaaaagacatgttcctttctatgattgatgaagcaatcaatgaagggactataaatgcattagctgtaactcatcttgattcattagaagctttagaaggagtaactaatgtatgggatgggcgcacaatctatgtgaaagatttaggcaactatcgttacgatgcacgaactacatcgtggataaaagcatatcaagatgctgataatgtgattgataggaatgaatcacaaaaagaaattaatagtataacccctcgatattttagttcagtagatgagatgttagcttacccacataaaagaaacggcttgatagcaataacaaaatcctaccatgcaggtttaaataaaggtggcgcaaaatatgtatatgactcatctaaagtagggataaataatggtgtaactgtaattggtggctgggttctccaatatgatgactgcattagtgttgagcagggaggaaccattggggatggaataacagacgattcaaatactattcagagtattctaaaagtcatttatcctgaaattgcaaaccgtattcaagatttcggagttaaactaatttttaactcaccaagatacaagataaatgaagagatcctaatcccaccatacgcaaatctagtgggtaatagaacaatcatgcttggcaactcacaagcaaatgactgttttagaagtgctagatatgtatctggcgtattaacagataacacaagtgagacagatcttgataacccaatcttctattcaaaaatcaatggtttcagatttcgtgattttgataaatcaattaaattaaagggctggacacaacagtgtattgtcaatgatgtagaatctaccgcatgtaatcaacatttagtcacatatggatgttactttctaagtctcaataactcaactgcagatggcgttggtttggggttaattcctaaaaaacctgcgtatgtttttgagaagtcatatgggatgttaaagtttggcggaaaaattcaagcatcgtcttgccctgttgcttatgagttctctcaagagcaacaagccccaacacttggtaatcttgatgctgaatcttgcgaagtcgcaattcgtttcagaaacccaattgatgtaaacaatcacggtggattcttaatcacgggatgttattttgagaattgccaaaccattcttgagtttattgatatgggcggggcagttaatgttattttaacatacacgttaaaaaataactttattaactgtcatgatggcgctttagctagattaaatgacagtcaaaacgtaaaagtcatctttaatgaagaagataacaaagtatttcagcttgagaatttggtagttgctgggtctggtacgaccattttattaagcgatactactaagaacgcaaactataactatactgctggtattgcgcccaactcaccacttgatgttacatttgttgataaaaacacttatggtggaaatggcgtgctttatggacattgggggcaaaactttcagagaattgtacagtgggatagtgattctgggcgtgttcaagcaaaacataatgattacatgcgggggatgattccgtatacatattatggtaatcaaggtactcctcaggatgggacaatacctttctgtagtcatgaaacacaaacgatagatgcttctttaattcggctccgtattgtaactgcaatcgcctctaatgagatggtgcaagcaagttttaatttaaaattacgttcgcaagcaactctcgggtatatgagtggccggttctacaataataaggtcgcaattgatcgtaatgatttcataggtgctacttttagagtttctgttgaaagtggtgtttatgttttaattattgagaacatatcatctacagatgcttcaaattatagtgtatatgggcacgtaaaattgatttag

SEQ ID NO: 71226 - DNA, 702 bp, Acinetobacter baumannii; identical to SEQ ID NO: 58446

SEQ ID NO: 71227 - DNA, 303 bp, Acinetobacter baumannii
atgagtgttgaaactttagagcaaaaaattgcaaagcaagaagaacgattaagacaactaaaagcacaaaaacaagctattgctgctcgtgaaaaaaagaaaaattctgatcgacaaagaaaagatgatactagacgtaaaattctactgggagcttgggttctaaacaaactgaaaaatgatgaatcttttaagggtcaactaaccgattttgaaaagtttttaagcacggaaagtaagactgaagaaaataggcagaaagataaagatctttttaatggcgttatatggaataacacctaa

SEQ ID NO: 71228 - DNA, 951 bp, Acinetobacter baumannii
atgaataaagaaaatagttatgataaatcttatccagtaacaacaatggctattcaaaacaaagttactgaatgctttaaaagcatgtctgtagatgaaaaaagaattttaattatggcttctccgattgctagaaatgtcgatgcaagtgaacaagatcaaatcttaatatctgctcaacaatttgctgatgactgtggtatcaaagtcaattctgcttataaacaaattgaaaatgcgtcaaaaaaactagtagatcggtccttttcatacgttaatgatagggggaaaaaggtctactctaactgggtaattgatgctacttatgaagatgcagggatatctttaaggtttacatctattgttttggtgatgttgaaaattttagataaatacaatccatacactcgttataaaaaagatgtagttctaaaattaaaaaaagactactcaatagacttttaccatttagcgaaaaaaaatcaggcaaaaaatggctttgaattaacgctagatgaaatgtttacagagtttggtttaccagaatcttatagagatttgaggaacttaaaacgaagagttttgaagagctcattagatgaaattaatgaatttaccgatgtaacagttgactatagtccagttaaaaaaggacgttctgttgtcggctttaagttcactgtgaaagaaaaatctaagccaaaattaatagctcctgagcgagatccaaaaacaatagatatgttctgcaacctgtctgatgctcaaattaacaagtacagtgctattttatctaaactttctgagctatcagacctaagtaacttccaggactatcctagttttgccctttggattagtggcatcttacgagatccgaaaagtgtaagagaggaaacagcaaagcggatttttaaagctcttcatagcaagacggattttaaaccatga

SEQ ID NO: 71229 - DNA, 288 bp, Acinetobacter baumannii
atgaaaactagagctgaattagatgcaatgagccatcaagaactcaaagactatgagcaaattttacttgctctgtggacaccaagaatggctattgaaagtgacattgaaaggttaagcactaatcgcaacgaattattagaaatttttaatcaattaaaaaatcctgatgctcctgaaaatgagcgtttaaaaaattctattttatcgctcaaatataagattgaagatttagaagataaattggatgatcttattcaagataatcgcttaaatcgtgcagattga

SEQ ID NO: 71230 - DNA, 138 bp, Acinetobacter baumannii
atgtctaaaaataatattcagtacgctaatactgttaaggattctaataacacgtttggttatcagcctacaaaatcctctagcaatactccatcacatatacctgtacaaacatcatcaccacccaaaaaaccttaa

SEQ ID NO: 71231 - DNA, 189 bp, Acinetobacter baumannii; identical to SEQ ID NO: 54757

SEQ ID NO: 71232 - DNA, 276 bp, Acinetobacter baumannii
atggtacaaatgcgcgcgaaagaaaatggtcgctggtttattcgtgcaaccaacacaggtgtaacagcatttattgatcaaaatggtcatatcactgaacaagcaccgattgataaagagtttgtcttgagaggtaatttaccggctatgcaaggccaaactctctataaccgtttaggtgattatccaattttaggatttgcagtattactgttggttttaggttggatctatcgtccacgtaaagttgatgtgtcttataaatcacgtcgctaa

SEQ ID NO: 71233 - DNA, 339 bp, Acinetobacter baumannii
atggaacaaatcgagtggaatgattttttaaaagtagagcttcgtgtaggtaaaattattcaagctgaggtttttgaaaaggcgcgtaaacctgcttatattctgcatgtagattttggtgaagaattgggtgtacgtaaatcgagtgcccagattactaaactttatcaaccgcaggacttgattgataaattagtggttgctgtcgtgaatttccctaaaaaacaaattggtcctattcagtcagaatgcttagtgacagggtttcataacgcagatggggatgttgcactttgtatcccagagtttgaagttcctctgggtacaaagctattataa

SEQ ID NO: 71234 - DNA, 261 bp, Acinetobacter baumannii
atgaaaaactcaaaatctttatctagttttagaaaacttccaaatcgctatacctctatcgttttaccctttcttttatcgatcattatgacttttgtggtttcaatgattagtacattacgaagtttgggattagaagaattttccctatatgtatggatgtctgcatgggcaatttcttggataatcgcttttccaacattacttttagtcttaccgatcgtccgtaaaatcacgacactattggtacagcctgcttaa

SEQ ID NO: 71235 - DNA, 345 bp, Acinetobacter baumannii
atgaaagcatttctcgtacttgatgaactgaatcagtttcattgggcgatgcttaagtctgtcctattgattttagcattattaccaattgctgaagtttcattaaaactatggctgagtacagaaggtagcagccaaatcatgattggtttcttcgcattaagtattgtcagtgcatggttaatggtgagctttttcactgcattaaaagcgagcgtatggcaagtgaaacaaatatcatctaaatatgagcaattagtttttaaagcttatcgctatgtaccaatggtttttttatcaagtctagttgcttatttatctttgcagttatctatcgctttttaa

SEQ ID NO: 71236 - DNA, 264 bp, Acinetobacter baumannii; identical to SEQ ID NO: 47948

SEQ ID NO: 71237 - DNA, 348 bp, Acinetobacter baumannii
gtggaaaaagatacttgtgttgaaattagagatagcaaggttaacgatacaaatattaaatatcgtggactcattcagaaattaacagcaacattatcattgtcctttttgtcacttgggtggggctccacagtgaatgcagcagaacaacaaatcgctttagtcggaacttggacatcgattcctgatgcaccacttgttcaaaaaccggaaaaggccagtgaaggtttatatcaattgcaagttaatgctgacgggactctaactccggttaaagtgttaaaaatgaaaagtccatcttggattgtgaaatctaaagatggtcgtttttgcatatacaacaaatga

SEQ ID NO: 71238 - DNA, 918 bp, Acinetobacter baumannii
atggtcgtttttgcatatacaacaaatgaagaaaatttaggagaagtcactgcactatcggttcaaaacggaaaggtagaggttttgaacacggtgaatagtcatggtggacatccaactcatgcctcaattagtttagatggtaaattcctgtttgtgtcgaattattcggcatttgataaaggtcgtggtggtgtggctgtttttccaattttgccgaatgggcatttgggtgaaatggtacaaaatattgttttttcggaaggttctggtcatgttaaggggcgtcaagagagtggacatgctcattcgacaacttttagtccggatggtaagtatttatatgcaagtgatcttgggaatgacaaagtctatgtctttcgttataacccaaacaaaacgcaaccactcgaagcggataacggtcgagatgtgacgtttaaccatggctctggtccgcgtcatatggtcttttcatcagatggtaagcatgcatatgttaccgccgaaatgcgaagtgaaattgtgacctttaatgtgcaagatggctatttgaagaaaactgctgagttaaagctagttcatgaagacaaaacgcccgaatttaagagtgcaagcggaattattcttagtccagatggcaaatatgtgatcgctgctaatcgtggctcagacaacaaactcctcgtatttaaaattcaagaggatggattgctggctcaaccgactgtttataaagctaatggtattgaaccacgtgctttctcattcgatgcaactggtaaatatctgtatgtaacaaatgtttttactaataatattagtttgttccgctttgatgccaaaaacggtaccttaaaatcagttggagatgctgcaaaaatatcaacacctactgatattaagttttttaattaa

SEQ ID NO: 71239 - DNA, 483 bp, Acinetobacter baumannii
atgaatctcgaatcgcagttattgaaaatcatcgaagaacaacagcatcaattgaagcaacaacagctagaacaagagaaagcactgcaacttattcaattgcaatcacagacaatcgagcagttaaagagctacacgagaactttacaagagaagcacagcgaaacagtgaagatcgtgcagaaatatcagcagatcgtgcagaatctatcagaacagactatttctccaaatttttcgaagaaactacacgaaaatttggaatctcagcttcaagaacatttgagcgaattagtgatgagtttgaatatagattcagaagtgaagcaaataattcgcaaagagctaccgaagttagtgcaagcagagatagagcaacaattgaagccgatgacagatcaaatcatcaagagaatgaattcagtagagcaatatcaacaaaaattagcggaattaatccaacaggtatcttcacggctttag

SEQ ID NO: 71240 - DNA, 162 bp, Acinetobacter baumannii
atgatccttcggcataataatttatgcaaaagtattttgctaattttgttgtcgggtggttgcttaaatattgctctcgctggagatttacctccaccaccaaaaaatattaatgagattaatcaactttttaaatcagcaagtcgtacctgttattgttaa

SEQ ID NO: 71241 - DNA, 636 bp, Acinetobacter baumannii
atgagcaagattttagacttacagaaacgagccaacaacttactatcgcagcatcagaacgatatagacgagaagctaaacagcgaaatcagtcagatattcaaagatatgcggaatacagtgcaaagcgaagcacagagcttgagcagcagtatagacagcaccaaaacgtatatacagcagaaacagagcgaagcaacgaacgagatattgcagcagatcgaccagactacagctcaaaccaagaagcagcagcaacaaggcatgacagccctattgcaagaacaacaacagcagatcaaacagctacaagcgaacttgcagcagttgaacagcttgagccaagaaacagcccaagcagccaaattaaagaaaacccttattacatcgaatatagccttgatttcactggcatgtataacgcttatcagcagtatttgtctggggtacgtcagcaagagcaaatacagcgacatcacagagatggagaacaaagtccagtggttaaaaagccaaggggcgagcctgaatattcagaagtgtgggacagagaaaaaatggaactggtgcgtccagatcgacccgaaagcgcagcagtacagcaacaacatgcgaatagtgcaggaaaccaattaa

SEQ ID NO: 71242 - DNA, 963 bp, Acinetobacter baumannii
atgctcaataaaacgcaattttcagacgatttttacgaaaaactcccaaaaaaaccgtattgctcggatgatttagggcgtggggtgattattcgcccaaaacgtaccgcaatccagaagccatacattcagcataatcccccttgtcttgttagctcgttggtgttcgatatagaccgccaagacgcttattttgcgtggtctgacgcaaatttaccgaccccaacatggatagccaaaaatcgccaaaatggacatgcacatattggctatatgcttttagctccagtgtgtaccacgcatcgagcaaagcagaatgtcatacagtaccttgccaagattgagcaggcgtatagcttggcgttaggtgcagatcgtggctatacggggttaatcactaaaaatccatgtcacggaacatgggaaaatcatacctttggcgctcaaccatacgacctaaattatttagccgattttgtagagcttcaggaactaaaaaccgacttaaaagaagtttcagggcttgggcgtaactgtatgatgttcgataccgttcgtttttgggcgtatgaagcgattagagcgtttatttcggggtcgcctgatagttggtatgcggaagtgctaaaagtcgctataaacgcaaatggtgcgtttttagagccattgccatattcagaggtaaaggcaaccgctaagtctattgctcgttgggtatggcgcaatcacacagaagcacatgccaaatttatcgagcgtcagactgtcaaagggcgtaaaggcggtctaagcagtgattccagtcatggcggtaaggctaggtcacagcaatacagtgatatgcgtcaggaagccttaaaactgcatatacagggcataaagcagaaagatatagccctacaattgaatgtttcggatagaacaatcagaacgtggataaaaaagcggaaagtgcaagcctaa

SEQ ID NO: 71243 - DNA, 363 bp, Acinetobacter baumannii; identical to SEQ ID NO: 54898

SEQ ID NO: 71244 - DNA, 507 bp, Acinetobacter baumannii
ttgtcgtgtacagagaacatttttacttccattccatatttattattagttcttgcgatagctgccgtactgcaacaaaagggcattttatctattgttttgattttaggtttaacgggttggactggtgtttaccgtttaattcgtgcggagtatatgaaacatacctcacgtgaatatgttctggcggccaaggcaattggtgttggccattttcgccgtatgtttattcatatttttcctaatgtcagccatatcgctttggttcaaatgtcgattttggtggtttcctttattaaatcggaagttattttaagtttcttgggcttcggtgttcctgtaggggtagtgtcttggggcagtatgttaaatgaagctcaaagtgaacttcttttaggaaaatggtggcagcttgttgcagcctcggtagcaatggctgttttggttacggcattttcaatgtttactgatgcactgcgtgatgcattagatccaaaactaaaataa

SEQ ID NO: 71245 - DNA, 666 bp, Acinetobacter baumannii
atgttccgtggggaagatgggtatttcttctataagggattcttttttcttgggctcggatttgtttatgcttacattcgtggtaaaaaaatattagcagcatttttaatactatgtattttcttatctcaaacgcgaggcttattgttagcatcaatatttacagtgtgtttgcatttgatgcttacagcacgtaagcaaacggcatttttgttatttattttgtcaccagttgcaattttcattatttatatgctgataatgaagattttatttttgcgggaagatgctggtgactcaaattcagtccgtttcaaagatggagcttacattcttgcagaaaatacattcctgcagaatattgttggaaatgggtggggatctgaaattaatggacgagcaagattagaaaatatattcatggaaatattttttaaaactggattcccaggattgcttagctcattagtgcttactgtatatgtatttattagcagtaaaacaaaatacaatcctttcgtttatctaatgttcttctcatttatagtttcccaaacaaacccttttatctttacacctatgggtattattttaacaggtgtttgtatccttagttgtcgttattactacaatagggatgggacattacaaaccaccacaacttaa

SEQ ID NO: 71246 - DNA, 2292 bp, Acinetobacter baumannii
ttgtatcggactttagatttaagtgggcggataaataaaattcaaatcggaactgattctacatcaaattggaaaacattaggttatgacggaaatggtaatgttatacaaacaaaaacagcgcaaggaatcattgaaagctggacttatgatgcattaaatcgacctattagtcatattgatggatcaggtaataccgatactaaaacttatgatgctttagataatccaattactgtacttgatgcattatcctctggaactaatccttatctctatcggaatggtaatgtcttggctcaagagactaataaagattttggcattaaaagttatagttataacgaggctgatcaattagttcagagtatatacggtaatcgcaaatgtagtttctcgaatatagatgaaattgggcggaataagactattcagtgtcaaagtaatagttctagtacacctgatatgcttacttatgatgatacttatacatttgattcaagtcgttatagtcgattagataaaatagtctctaataagccttatggagttgatatcagttatgtctatgacttatatgatcgcattattgggaagagtcaatctaataaagctttaactgcatttggatctagtgcaaatactttatcgaatacctatgcatggagtattggtaataagatcacagggataactttaccttctggtcgtaagcttacttataattatgacaacacatcgaaaggccaaattacaggtttaactttagatggcaatgctttgttgagtaatattggttatgacgcaagtggacaaatgacaggctggacatggggaagtaatgctggaagttacacatggacttatagttcagcaaaagatggtgtcattaatcaaattagtaataaaaacagtggaggggctgttacttatagccttaattatagttttgatcgtgataaccgtattataagtattaagcggaataataacttaaatgataattttagttatgatcaggaaggacgtttattgacagaaagtcgaagtaatgatgcaagctctatctacgctattacctatacttatgataaaaatggcaatcgtttaagtttacgagcgtccggcactcatttacagcctgctgcaaatgtggattatgcctatacaggtaataaacttaccacattaacaaaaaatggaacagctcagccacttaattatactgcaaatgcagaattatatatgggtgaaatcttaccgagttacgattatgcagggcgacgtcgaggtgaagggacatcaacaactattaatcgttatatgagttataacgctaataatgaaagaacactaagtggaagtacaagtgcatggagtaatacggcagttcaattcatctacgatgaaaaaagtcatttgattggtgaatatacagctactggaattccacttgtagaatatatttggttaggagataaaccagttgcagcagtttacgagagtggagcaactaccaagatttattatattgtaacggatgtacaaaataccccgcgtcgactaattgatagcaatggtagtgttgtatggagttgggacagtacagcttttggcctaggtagtcctgtaagtacgataacatttaatttacgttttcctggacagtactatgatgcaactacagggcagttttataaccataatcgtttttataaccctgaacttggtcgatacatggaaccagatccgattggtcttgcaggtggattaaatccatacatatacgcattaaataatcctgtgatgtatgtagatatgactggtgaaaacccaatattaattgcaatgggtgtgagcgcagcaacagcaggtgcattttatacaggagaagtattttttaatgcagtatatgacgcatataaaaatgaccaaagtatattagatagtttttctaaatcattttcaattaaagagttaggtcaacaaatggttataggtgcagcatttggtggagttggtaaagctgcttttttagctgctgatgtacatataattagtaaagctgcacctactatcattccagcgggaacatcggttctgaaacggtgggggttaaaaggtttaaatgcaattaacaatatggctaaaactagtaaaattaataaaataagagaagtaactactcctgctggattggttctcacaggaaatataattgcaggtaaaacaacaacaaacttgatattaaatgctttgtacacgacaaaaaaagataactcattgaaataa

SEQ ID NO: 71247 - DNA, 639 bp, Acinetobacter baumannii
ttgaaatcaaaaggaaattttggttttggatatggtcacaatcaagcgataaataaatatgctactgattgtgattttttcctgatttgtaatcctgatattatgtttgaagaatctgaatttgataatttagtcaagtttgcaagtcagtgtaatgagggattatttcttccaaagattgtttatactaatggggaaaaccaatttggtgcacgccttttacctactccattgaatctttttgctcgaagattttccaaaaaatgggctatgagtctagaccaagaatatttattaaaaggttactctattcaacaacctatttttgctccttacctttctggttgttttatgttatttcgctctagtgctcttttagatcttaaaggctttgatgagagattctttatgtatatggaagatgtggatttatcaaggcgttgtgctgagagttttggtgctatatattatccacatgctcaaatagtacatgttcacgaacaagcatcatacaaaaacaaacaattacttaaagctcatctgaaaagtgctatacaatacttcaataaatggggatggttttatgacattgaccgtagtaagcttaacaaaaaatgcttaaaccagtttcacatataa

SEQ ID NO: 71248 - DNA, 1554 bp, Acinetobacter baumannii
atgactgctcaaatgaaaacaaatacatcagcaaaaaaagctgtcaattcgcctagccatatttacgatacctttattgtgggtgccggaatttccggtattgccgcagcaattcgtctcgaccaagtgggctataccaactacaaaattattgaaaaagcagcacgtgtaggtggtacttggcgtgaaaacacgtatccgggctgtggctgcgatgtaccttcagctctgtattcatactcgtttgccccaagtgcaaaatggagtcacttatttgcacgccaaccggaaattttaagttacttagaagatgtaagtaacgagtttaatatcacgtctaaaattgagtttaacaacgaactgctcaatgctgcttgggacgaaacacgccatttatgggtacttgatacaactagtggtcaatatctatcgcgaactgttatttttgcaacaggtccaattaccgaagcacaaattccacgtcttgaaggtttagatacctttactggtgaaatgttccattcggcaaaatggaaccatgactatgacttaactggaaaacgcattgctgtaattggtactggtgcatctgctattcagtttgtgccacaaattcaacctaaagccaaagagttgtttgtattccaacgtacagcaccttgggtactaccgaagcccgatacggacttgggcgagttgagtaaatctgtcattgccaaatatccagctattcaagcgacttggcgacagactgtggcgggtactttaaatgtcattaattttggcctacgcaacccaaaagctttaaagcctgtcaattttgctgcaaaacaattgttaaagctgcaaatcaaagatccagtcttgcgtaaaaacgtaacgcctaatttcgatattggctgtaagcgtattttgtttgccaataactattatccagcgttacaggcacctaacactacgcttattccacatggtctagttaaagtcgaaggcaatacggtgattgcagctaatggtgaacgccacgaagttgatgtgattatttggggtactggatttgaagtgtctcatccccctattggtaaacgtgtacataacgaaaaaggggaatgtttggctgagctttggaaagactcctcaccagaagcttatttaggaaccaatattgaaaatgtacctaatgcatttcttatgcttgggccaaatgttttggtctatgactcatttattggtcttgccgaagcacaactgcaatatattatagatggtttgctacaaatgaaggcaaaaggtattgctaagctttcagtgaaatcagaagtgattaaaaagcacaacgacttggtacaaaaacatctacaaaccacagtattcaatagcgggggatgtaaaagttactatctcgatgcaaatggtcgcaacttcgcggcatggccatggtcgttaaaaaagcttaaacagcgtttacatcatttaaagttagaagaatatgatgtggtttatgaagctgatttgataaaagcaaaacctaaagctgaagaagttgctggttaa

SEQ ID NO: 71249 - DNA, 174 bp, Acinetobacter baumannii
atgacaataaaaagccagttgtatgcactggctgttgtttgggatttacttacccattacgatttttaccgtgcctctcataaattaacagtcaaagctgaagaagtgttctgggaaacaagaaaggaatgctttttgaatatcgctgtattcaccttctggatgttcttctag

SEQ ID NO: 71250 - DNA, 738 bp, Acinetobacter baumannii
ttgattcagattactcagcaagctgctgatatctggaaagagggtacaggtaaaaattactttacttatgacccaaatgcaaagttagaaattcgtcttgtatacgatgatagccaaaatcgttcagcagagcgtcaaaaaatttctgctcagtttaagcaagatcaacaacgtgtaattgatgaacagcagcaaattaagcagttgaagcaaaatttaagtcaaactcaatctgatcttgaaaacaaaaaacagatcttaaatgagaagttgaaaaattttgatcaacaaatgatgcagtttaacgaaggtaaattagcacctgaatacacagcaaaatctcttgcgaagactcagaaagatttacagaagcaaactgtttctttgaagaaagatattgccgcttataatcagcaagctgcagatttaaacaaaaaggttaatcactttaatcagattaacgatcagttcaatcaatctttaaatcagtttaagcaaaatgcccaagctgatgtatttaagaaagggatttataacggtaaacaaatcacaatttatgagtatagctcaattgatgatttacgtttaacgattgctcatgaattagggcatgcactaggcttaaaacatagcgatcaaccgggtgccctaatgtactcagttcgcaaagacagcgataaaaaaagtaatgttttaactgatgctgatcgtgatctattaaacgctttacctcaataa

SEQ ID NO: 71251 - DNA, 426 bp, Acinetobacter baumannii
ttgggcatactttacgaagaaggctatggggtaacccaagattataaaaaagcatttgattggtatagcaaagctgctgcacaaaataatcttgcagcactttatgcacaaggtaagggcgtagagctaaataataaaaaagcctttgagttatatagcaaagcggctgagcaaggaaatgaaaaagcacaaaataacttgggggccgtatatgctcttgggataggtgtaaatcaagattataaaaaagcgttcgaatggtatagcaaagctgctcaacaggaaaatgatgaagcgcaatttacagtagggatgatgtactataaaggtgagggtgtaccgcaaaacaatgaattagccgaaaagtggctaagaaaagcagccgaaaatggcaataaggatgccttatcactatttgaagaatag

SEQ ID NO: 71252 - DNA, 264 bp, Acinetobacter baumannii; identical to SEQ ID NO: 47948

SEQ ID NO: 71253 - DNA, 465 bp, Acinetobacter baumannii
atgttttttattttaagaaaaaaacttcaaaaaatcgccattattttcgtagcaatcaatttattagcttgtagtcatcaaccagattttaaagatatttctcgtttagcagaaagaggtgatgcaggagctcaagcaaaacttggtgaattatatgtagagggagaagttgttcctcaagattataaaaaggcctttgaatggtatagtaaagctgctaatcaaggaaatgcagaggcacagaataacttgggagcaatgtatgctcttggacaaggggtagagcaaaattataaaaaagcattcgaatggtatagtaaagctgctgaacaaggtgaagtgaaagcacagaataatttaggtgcgtattatgcaaatggggatggtggtgttaaaaactatcagaaagcatttgaatggtttaacaaagctgctgcacaagataatgccgaagctaaatactag

SEQ ID NO: 71254 - DNA, 264 bp, Acinetobacter baumannii; identical to SEQ ID NO: 47948

SEQ ID NO: 71255 - DNA, 855 bp, Acinetobacter baumannii
atgacaattcaaacagtaaatctaggtacggcacctactggcgcaggcggtgatacattccgctcaactggcgcaaaaattaatgaaaactttactaacccgagccatgctgcaagtcgttatgttggttctgctgctggtaacttaatggaagttggtttttgtggattaggtactacagttgcaactaattttggcccagtcgatttaaatacagctaaattacaaacaggtttttattcaggcaataacattaataacgctccatttgcaaataataatgatacttggggatatcttattcatcaaaatttagcaagtgcaggtgctggatcatatgaatttcagatgatgggtacaattgatggtagtttttggacaagaactaaaataggagggcaagccaatgcttggttaaaagttcttaatagtggcaataccactacagatgctaatggttttattaaagcagcatccccagtcgttagattgttttccaataaaattgaaccaaatcaagaagctgctgaacaatctctctcatttgaaaaattaggtgttggtcattatcttataaaaggatcatccggttttgcaaaagaagggtggtatatcgaaacacctaaagatgcaaacgggaacattctttttgctgtgatttatcagcagttagaaaataaagatattgaaatcaaaacttttaaaaagaagtttgatgttgagtctgcttcaattattgctgatttggataatccagttgatatttcaacgggccgctggatcgatattcgcttgcaagaaattcctaaaccagtacccgaaatgccagtggtgacagaaaatgaccctgaatag

SEQ ID NO: 71256 - DNA, 264 bp, Acinetobacter baumannii; identical to SEQ ID NO: 47948

SEQ ID NO: 71257 - DNA, 264 bp, Acinetobacter baumannii; identical to SEQ ID NO: 47948

SEQ ID NO: 71258 - DNA, 267 bp, Acinetobacter baumannii
atgaaatttgtcgtgtacagagtattaaatgatattaatgaacggagttctgctcgtagacaagggggtggtgaagttggtaatagtggtattaatcaaggctctgattatttaggttttaaaagttatcaacctaatggttatgtagcaggatattcagagatgtatattaacggtgtatataatggtaggttatggactatttactttgattcaggtgatactgttcaatatggttgttatcttaagtgcgcattgccattgtaa

SEQ ID NO: 71259 - DNA, 156 bp, Acinetobacter baumannii
ttgtcgtgtacagagaaatttgtcgataatttagtagtcgatttaggccttaaagcaggctatcgcgtacttaatattgacttagatgattatgataacaatgaccttaaatttgagtttaaaggcccttatgttggcttagaagcacatttttag

SEQ ID NO: 71260 - DNA, 597 bp, Acinetobacter baumannii; identical to SEQ ID NO: 60038

SEQ ID NO: 71261 - DNA, 516 bp, Acinetobacter baumannii
atgcgattaagttaccgtttggtgagtggactgcttgtactggcaagcattgtcggcatgtcttttgcgttatatttggaacatgtaaaagggttagagccatgtccgctctgtatttttcaacgtgttggcttaatggcaatggggtttgtggcgctcatagcatttttgcataacccagtttctaatgcgattaaacgcttctatgcatttttagcaggcattgcaattttatggtcagtgggcgtggcaggccgtcatgtttggttacagcatttaccaccagaccaagtaccaagttgtggaccaggtttaaattatttaatcgatgcattacccatgaaagcagttttacaagaagtgctttcgggttcaggtgagtgtgctgcaattgactggacttttttaggtcagtctttaccagtatggtctttagtttatttccttttacttttactggtttgtttatggcagttattccgtttttatccggcatttaagactgctaaaaagtga

SEQ ID NO: 71262 - DNA, 1578 bp, Acinetobacter baumannii
atgagtcaacccactacaccatctcaatcagttattcctgcttgggtggattcgtcgctactacaaggcatgttacgtggaatagaacgtgaaagcctacgtatgcaaagtaatgggttcttatcacaagagttacatccaaacgctttaggttcagctttaacacatccgaaaatcaccacagattattctgaagcgttaatggagtttattacctcaccacagccaaccattgaggatgccctacatgagctcaccgatattcatgcagttgtgcatcgtcatttagaaaatggcgaaaagctttggcccttgtctatgccatgtatgctagatgacaatgaagaacgaattcgtttagctcaatacggtacttctaatattggtcgttttaagacactttatcgccgtggtttgggtattcgttatggtcgccgtatgcagaccatttcaggcgtccactataatttatcttttcccgattctcttttttctgccttgcaggaacatgaaactgacgaaaaattaaaagcactcagtctgcaagattatcgtagccatcgctattttgggcttattcgtaactttattcgtttaacgccactggttatgttcttagtcggggcgagtccatcggtttgtcgttgtttcttgaccggacatgaacatcatttgttgcctttaatcaaagggtcatactatttaccttatgctacagcattacggatgggacgtttaggctaccagaactcggcacaaaagagtttaggtatccattacaacaacttatctggttatctggctggtttacaaaaagcagtacattctccttacccgccatttagccgtttagggttaaatgatgcctctggtgaaccgttgcaaattaatgatcatgttttacagatcgagaatgaatattacagtctcgtgcgtccaaaacaggtcccgcacgcgggagaaacaccttctcaagccttgcaaaatcgaggagtgggttatgttgaacttcgtgcagtggatgtaaatccatattcgccaattggtgtaaatgaaacaacggctggtttccttgaggcactggcgctttattgcttactcagtgatagccctgagttgttatgtcccgagcaggatttgattgagaagaaccagacagaagtggtcaatcgtggccgagcgccaaatgcgacgattattgatttaaacgggtcttaccatattgaagattgggcacgtcagcacatttctaatatgcaggattgtgccaagttactcgatcagacctatgcgacagatctgtacagctcggctttggccgtgatgcaagaacgtattgatgaagtagatgaaacactatctgcgcatgtgattgatgacacgttaaagcatggtggaacctggagctttggcagtcatatggcacagatgcatgctgaaagttatgaaaagcatgaaatcagtgcagagactttgcaatattttgaacaattggctgcacaatctttacagcagcaagaacaacttgaacaagatagtcagatcagttttgatcaatatcttgaacaatatagataa

SEQ ID NO: 71263 - DNA, 540 bp, Acinetobacter baumannii
atgaacgatcaagacattttaaacttctggttttcacctgaacaccgttcactttggtttgcaaaaagtgatgattttgacaaaaaaatccgtgatcaatttgcagatgttcatcggcaggcaactcgagcagaactttggtcttggcggaaaaccccagaaggtcgtcttgcagagattattgtgctagatcaattttctcgcaacatttatcgtgatcaacctgaatcttttgcgtatgacagcctcgctttagctctgtcacaagaagcaattagcttacaactcgatgcacagcttaatcctgaccaacgctcatttttgtatatgccatttatgcatagtgaatcaaaattgatccatgagtttgctttaaaattatttcaacgcctcggcaatgaaattaatttaagctttgagaaaaagcataaagtgattattgatcgctttggacgttatcctcatcgcaatgccatccttggacgtgtttcaacaccagaggaaaccgaatttttactagaaccgaacagtagtttttaa

SEQ ID NO: 71264 - DNA, 564 bp, Acinetobacter baumannii
atgaaatatctctctctttgtttagctttaggcactgccttaactctaagtgcttgttcaactataccaagcaaaccaaaaaccttcgatcagcttggccagttttcagcctatccgttaaatgctcaaacgtttcgaatcagtttccaagctgactcaaacatgagctatggaacagctgaagaaattactttagtgaaatcagcacaaacgaccgtacaaaaaggcttccgcttttttaaagtacaaaatgacccaagtaatcaaagccaaaaaccacctcgtcaggctgtggtttatccagctgcaccgagtttttatccgtatggttatgggcgtcgttatccgggtttctggcatgatccgttctatgatttcccacaagtggtcaatatcgaccctgttcaagtgtcgtatactattgaatgttatcgggatcaaaagcaggcccctcaagacgcttttgatgcaacgttaattctcaaatccatcggacaaaaatatggcttaagtccgacaggagagttgttgccaccgcctgaaccgccagtaaaacaaaaatga

SEQ ID NO: 71265 - DNA, 1311 bp, Acinetobacter baumannii
atgaatatggcagaagaagtacaccatgcacccaatctgaagcgcagcaaatatttcgctactatggcgcttgttattgtagtagtgctgtggattgggttattgattgccaatcgctttctgcctgagtatacaaacttaattcatattttgatgttaggtgcggaagctggcgtagtgggtggactagcagattggtatgcgattaccgttttgtttcgaaacccatttggtaagcttcctatccctaaatttttgcgggatcataccgaaattattccgcgcaataaggcccgtattgcagagtcaatgggccgctttgtgcaggaaaactttctgtcacctcaagtggtagagcgaagcttagaaaaaactgacctaagcctcgccattggacaatggctagccagtccacaaaacaatacgcaagtggtacagcttattcagcaaactgtacctaaagtttttgaatttgtgagccaagaacaaattgccaatttcgtgcaaaacaacagcgtgcaatgggtgcgtaatactcaagtcaataaacttgcgagtgaaatgctgcgtgcagtattggaaaatgatttccatcaagatgtattgcagcgtggtctcgatatcgcgcatgagtgggtggtacaaaacccggataaaactcgtgaattaacccgaaaaatgtttaaagcactaggcgtctggtcacttgcaaaaggtgcaagctggattggtattgatgttcagcaacgtactattgactcactggttgaaaaagtagaatccatgctggccgaccacgagcacccatggcgacaggaaattgaaactattgcccattcgcttatgctggagctagcaaatcctgacagtgttgccagtcaacgcttaaatagcggtaaagatgcgctactagatagccctcaagttctaaatttcattagtggtgctgtcactattttgtgtgatgccattaaagaagatttaatgaaagaagactctggtattgcaatgaacctcagagctgccattcagcagttgggtgaaaaccttgtccaaaatgtaaaagtacgtgaagttctcaacaaagaaatgacaggacttgccatgaactttacggaccaatatagccataaaatcatacgctatgtgagtgagcgcattcatgaatgggactcacgtgaaatgattggaaaaattgaaaacgaagtcggtggcgacttacacatgattcgtgtcaacggtgttgtggtcggtgcatttatcggtttaactctaggtgtaattcgcgcagcgattgaatcgattttataa

SEQ ID NO: 71266 - DNA, 1155 bp, Acinetobacter baumannii
atgctacagcttcagtcaaaattgcccgcacaaggggtaactatttttagtaccatgacggcaatggcacagcgcttaggtgcacttaacctttcacaaggtttcccggattttcctgcaccgcctgctttgctcgaagctttagctcaggcaactttggctggacataaccagtacccacctggtgatggcattctcgcgctacgtgaacagctcgctttacagtttcagcagcgtgatcaaattcaacttgaccctatcacagaaatcacaatcacccctggcgcgaccatagcaattttctgtgccatacaagcctgcatcaatgcaggtgatgaagtcattatttttgatccgagttatgacagctatggaccttctgtcgagttagcaggcggtaaagctgttcgtattgctctacaagcacctgactttaaagtgaactggcaacaagttaaagatttgattaacgataaaacccgtatgattgtggtgaatacaccccacaatccaactggcaccatttgggaaaaacaggactggttagaacttattgaactgattcaagataaaaatattttggttttatccgacgaagtctatgaacacttagtttttgatggtcaacagcactttagcgcgttgcattttccagagcttagagaacgtagttttgtgattggctcttttggaaaaacctttcatgtgacaggctggaaaaccggttactgtgttgctgcacctgaattaatgcgtctattccggcaaatttatcaatatgcaaatttctgtggtacgaccccttgtcagattgcgcttgcgcaatatatgcagcaacatccagaacatattcaggaactttcacagttttatcagactaaacgagatcgttttaatcaggcaattcacaatagtcgttttttatttaaaccatctcaagggacttatttccaaaaccttgattacagtcagattagacccgacttaaacgatgttgaaatgtgccagtttcttgccgagcaacataaaattgtggctattcctgtttcagtgttttaccaacaagcacctgagtctttacgcctgattcgtttctgctttgctaaaaatgatgaaacattgcaaaaagcaggagaaatcttgaatgaatgttaa

SEQ ID NO: 71267 - DNA, 1368 bp, Acinetobacter baumannii
atgccaccaagacagtctttaatacatcagcaaaatctatggaaaacattttttgttttcttattgccgctcattgctaccaatatcttgcaaaatttatctggcaccattaataccatcttcgttggacaaatgatgggtgtcgatgcaattgccgcagtctctgtttttttccctattttattcttgctgctcgcttttattatcggaatttcgacaggtaccaccgtgttagtagggcaagcatggggtgctcaaaatattgaaaaagttcaaagtgtggtgggttctactctttttatgaccatcattggtggaatcattacagcgattattggtgtattttttgcccatgatattttagagcttttaggcactgatccaaaggtaatgcatctgtctttaccttatgtgcaatggatgctcgcaggtagcccacttctatttgtttatattatctatacctcaattttacgtggtgtaggtgacagcactacccctttactggcgctggctttaaccagtgtaattggtttagtgattacaccgatcttacttaaaggttattttggtttacccgctctagggattattgctccagcaatcgcaacaattacgggttatgtagctatcttaatttttcttgcgatttatctaaataagaaaaagcacccacttcgaccgaaccgccaacttttgcagcatatccgccacaacccagaattgagcaaaattattttacgtctgggtgtgccaactggtattcaaatgattaccacctctatggcgggactcgtgattgtaggtttagttaaccgctttggtgctcatgccacagctgcctatggtgccgtgaaccaagtactcaactatattcagttccctgctttgtctatctcaattgctgcttcaatttttgcagctcaagcaattggtgcaggtaagtcagacttagtcgcacgtgttacccgcacagctttaggcatgaactttttattcacaggtgtgttaattgcacttggctatctattttcaaaatatttgatggccttattcattaccgacccaactgtggtggtattaggacagcagctcttatttattgtactttgggcaattttattttttggtgcaggtgctatttttgcatcaatcatgcgggccagcggtacagttaccgtcccaatgctgttaaatatctcggctattttgttaattgaaatcccatgcgcttactggtttagctcaatgtgggggcttaaaggaatctggattgcttatgccttggcatttgtgagcctttgtatcgttcaaggcttgtattaccagtttatctggaagaaaaagaagatcaaagttcttatttaa

SEQ ID NO: 71268 - DNA, 834 bp, Acinetobacter baumannii
atgaaaaattttaaaaacaaagtcgctgcaatcacaggtgcaggttctggcattgggcaacaattagcaattctgttggcgaaacaaggctgccatctttcattaagtgatattaatgaaaagggtttagagaaaactgttgagctattaaaaccgtacagtaatattactgtaacaactaaaaagttggatgtttctgatcgtgaagcggtaaagcagtgggcacaggaaaccgttcaagatcatggctctgttaatctcatttttaacaatgctggtgtcgctttaggttcaactgtagaaggcgcaagctacgaagatttagagtggattgttggaattaatttttggggcgtggtttacggtaccaaagaatttttaccgttcattaagcaaactcaagatgggcacattattaacatttcgagcttatttggtttaacagctcagccaactcagtctggctataatgcaaccaaatttgcggtgcgtggatttaccgaatcgttacgccaagagttagacattgaaaaatgtggcgtaagttcgctatgtgtacatccgggaggcattcgcaccaatattgctaaagctgcaaaaatgaatgacagtttgagtagtttgggtatggacccagctaaatctattcaaaactttgataaattcctacgtactccaccagaagaagcagctcgtcaaattctagatgccgttttgaaaaataaacgtcgtttattgattggtagtgatgcaaaatttcttgatgcacttcagcgtttgttcccaactggatatcaacgtgcttcaaccgtggtaaccaaatggatgaaataa

SEQ ID NO: 71269 - DNA, 672 bp, Acinetobacter baumannii
atggcgacaaacgactcaaccaataaaaagaaaacaaaaactgcgggtaaagaacgccagttcaaaggattatctctttctgagcgtaaagaggcacgccgcgaaaaactcattgaagccggtattgcgacttatggaacccttggctttttttcagtgacggtaaaagatgtctgccaagaagcaaaactcactgaacgttatttttatgaatcatttaaaaagagtgaggatttattccaaactatctttttaaaaatgattgaagaattacagcaaaacttaatgcaagctgtgattaaggctgcaccagatccagaaaaaatggtcgatgcagggttgagagcgctactgacaaccttaaaagatgaccctcgtttagctcgtatcgtctatgtggatgccgttttggttcaggaattacataatcaggccaccattcaggaaacccttgcccagtttgaccgtatgattcaagcgttcgttatgctgaccatgccgcaaatacagcacaaggaaaatgagctctctttaattgcaacgggcttaaacggatatgtgactcaaattgcgattcgatgggtcatgggtggctttgagcagtctcttgaacaagttttaacagcctgccgtatcgttttcttgtctttgttggcacaagtttcaaaataa

SEQ ID NO: 71270 - DNA, 711 bp, Acinetobacter baumannii
gtgaaagatgactatattttaattgtcgatgatgagcttcctattcgtgaaatgatccatacttctttggatatggcaggctttcaatgtttacaggctgaagatgccaaacaggcccatcaaattatcgtcgaccaacgtccagcacttatcttgcttgattggatgttacctggaggcgtaagtggtgtggatttatgccgccgcttaaaacgcgatgaaaacctagcagaaattccagtcattatgctgactgcgcgcggtgaggaagaccacaaagtacaaggtctagatgccggtgcagacgattatatgactaagccattttcaacacgtgaactggtttctcgtattaaagctgttttacgccgtgcaaatgcgctaagcggtgaaaaaaccattgatgccaatggtttaattcttgatcctgtaagccaacgcgtgagctttggtaacagcattttagatatggggccaacagaatatcgcttgcttgcattttttatgacccatccagaacgtgcatatacacgtgcccagttgctcgatcaggtgtggggcggtaatgtatacatcgaagaccgtaccatcgatgtacatatccgtcgtttgcgtaaagtgttagaaccttttggtgttgaccgatttgttcaaaccgtacgtggtacaggttatcgtttctctacacgtgcagatttagccgcaggttaa

SEQ ID NO: 71271 - DNA, 1359 bp, Acinetobacter baumannii
atgtatgaaccttaccccgtccctgaacaggtacgtgaacaaaagctttcccgttacagtagtttgtggacgtttgctaaacaagatttacgacttttattatttttcctgattattgcaggtttagtcggtttaggggttgggtatttctggagctgtatttttatcgctttcgtggtgttttttgcgctccagttacgttctttatatttggtgaatgactggattgccaacaatccttacgatgttcctcccaacctaagtggtatttggggggcattattatttaatgtgtatcgtgctcagcgtcaggaacgaattgttcaggccgaaatggttgggctaattgaccgtgcccaatcttctttagttgccctagctgaggcagttgttttaattgatgatcaacatcaaatcgaatggtggaacccagccgcagagcgtttactgggaattagtccacttgaccgtggtcgcaacttattaactattttgcgtcagcctacttttattgaatattttaacaatattgatcaagcgcccgatgggattaaactccattctaatcttgatgatgaccgttatgtacaggttaagctcacacggttcggtggagaaagtcgcttacttgtagcttacgacgtaacgcgtatgcacaaccttgagcaaatgcgtaaagacttcgtcgataatatttcgcatgagcttcgcacccccttaactgtactgagcggctatatcgaaacatttaccgaccaagaagatatcagcccacgctggaaacgtgcatttgaccaaatgcaatcacaaacaaaacgtatgaatgcgttagtgaatgatttattgctgttatcaaatttagaaaacaacaaaaaaattgcaaaaaatcagattattgaaatgccgagcttaatgaatcaactgtttgatgatgctcaggcctacaatgccgattatggccacacactcaatttgcatattgatagccactgtgacctgattggttccgacatggaaattgccagcgcatttagtaatttaattaccaatgccattaaatacacacccaaaggtggaaccattaccattggctggcatgatgacggtgaacatgcttactttagcgtacaagataccggtatcgggattaacccgaaacatttaccgcgtctgaccgaacgcttttatcgcgtagatagtgaccgtagtcgccaaacaggtggaacgggtttaggccttgcgattgtaaaacatgtactgatgcagcacggtgcttatttagatgtgcaatctaaagaaaatgaagggtcaacctttaccgcagtttttccaaaagaaagactatataacatgacctaa

SEQ ID NO: 71272 - DNA, 1197 bp, Acinetobacter baumannii
ttgattagaaaaagtaattctttattaaaatttttattgagcagtatttgtttggcatccggttctgctatggctactccaatgacaaatttgagtaagcaaatagtgagtgaaaaaccgggttctatactgtccatcgaacaacaagatgtgacgagtttatttcctcatgcagatcaacgtttgctggtcaattatcgtagtcgaggtgtgaatggtgaacctatcgttgcctcagcatttattttattaccaaaaggaacgcctccaaaaaatggctggcctatactggcttgggcgcatggcacgaccggagttgctgacacctgtgcaccttctggtgactatgtaggtggccctgttcattcttatcaagaagttgcttccaaagctttagattcttggcttgcacgcggctatgcggtcgttgcacccgattatcagggattaggtacgctaggtgcacatccttatatgaatgccaagagccaactgcacacggtggtagatgccgtacgagcgttacatgcagttaagccaaaagattttaataaacaatggctagtgatgggccatagccaaggcggagctgctgctattgccgtggcggcttatgggcaaaaagatgcacctgaactagatttaaaaggagcgattgcgcttgcgccaggtggctatcaatatgaaggcattgcagagtatgtaaaaactaatccaaacccagaacctagcgtggcagctttcttcccgattgtgttattgggagcgcaagcagcagaaccaagtattgtccctgaaaatttagttagtcccgaaatgaacactgtgctaacgcaagcacgtagccgctgtttatctgaacttcaatctgacttgaagaaatctccttctagtatatttaaagctaatgcagatttaagacctcttttgacttatctgaagcaacagtccattgaaaatatggtgcctaccgtaccattaatgatcgtacaaggttctaaagatcatttggttgacccgagagggacatatgcttattaccaacagctatgcaaatcaaaaaagccaactatttatcaaacaattgatgggggagatcatcgcgatgcactgcgtcagagtagtacttttgccaccaactttttaaatgttatagagaaaaatcagactaaatcttattgctttaattttaaataa

SEQ ID NO: 71273 - DNA, 420 bp, Acinetobacter baumannii
atgtccccaactcctatcattagcctatattttgcttcggttttgacttttgtggccgcgttacttcattttatttgtgtgttttggggagcaaatggttttcggtttttgggggctgggaaaagtattgttcagatggtcgaaaaagggcattggtacccaaattttatggctatagctgtaggttttattctttgtattttttctttttatgctttttgcgcagcaactcgttttatgaatttaccatttgaaaaaatgattatttctctagttgccattccatttattttgcgtggtttggcatttccatggttaaaggctagatttagtggaaatagtgatctattttggtatgtgagttctttcatttgcctcttgttgggttcgttatatgcaataggggcatattctttataa

SEQ ID NO: 71274 - DNA, 852 bp, Acinetobacter baumannii
ttgagttttacatctcgcttaaaaaaagaattatttattaaggcacaaaatcttgttcctcagcatcagttaagccgtgtggtgggtaaagttgctgcaagtgaaaatccggtattaaaagctgcggttattcatgcatttaaaaccaaatacggtattgacttgtcgattgctgaacaaggcaatgcacttaaatataaatcttttaatgatttctttactcgtgcattgaaagatggcgtacgactggttgatgaaaacccagatagtattgtttcaccagcagatggcgcaatttcacaaattggtaaaattactgctggcgaagtttttcaggcaaaaggccaaagtttctctgtagaaaaattaattggtgacccacaacttgctcaacctttccaagaaggtgagtttgcaacggtttatttgtctccacgcgattatcaccgtgttcatatgccattttcaggcacattaactgaaactttatatgtaccgggtgagttattttcagtaaatcaggtgactgctgaaaatgtaccgggtttatttgcccgtaatgagcgtatggtttgcttgtttgatactgagcttggtcgtatggccgttgttttggtcggcgctatgattgttgcaggtattgaaactgtagcaacaggtaaagtaaaaccatcgggtcgtatcgaattacaacatcatcagttgaagctagagaaaggtgcggagcttggtcgtttttatttgggttctactgctattattttatttgaaaaagataaaatcgagtgggaaaaacgttttaaagccgagtcagttgttgtgatgggcgaacgtatgggccacacgatttaa

SEQ ID NO: 71275 - DNA, 855 bp, Acinetobacter baumannii
atgacgatgacactccctgattttaaactcgatttattaatagaagcagaagagttagtgccttatttaggcaatgaatatatccgtattgtagatttgagccgtgcatcagtttatgagcagctccatattccacatgcaattcatttacagcctaaatggttggtcgttcagcatgaagaagccactggtattttgccagatgaagcaggtttacaagccctcattgaaaaattaaatatttcaccaaatcaccatgtggtggtctacgatgatgaaggtggagcatgggcaggacgtttaatctggaatttgcattgcttaggatttacacgtacgagtttaattaatggcggtattcatgcatggcttggggcaggtttaccgactacagctgaggttgaagaactgcctcgagttgatgatttaatccagattgatttatcacatgctgcacagttccgagtgaactatgaagaattacgtaaacaggttgaacaagaaagcattcaattgtgggattgcagaacgattgatgagtacagcggtgttcgtttagcagcgcgacgcggtggtcacatcccaaatgcactccattttgaatggagtactgcacttaatcgacaaaatcatctaaaattgcatccgcttgaacgcacgcggcagcgtcttgaacaacttgggttcgatttaaaacaacctgtagtcgtatactgccagtcacatcaccgttctggtttggcctatattttggctagacttttgggttgggaagcaaaagcctatgatggtgcgtggagtgaatggggcaatcgcctcgatagtcctatcattactggagaatcgccgtcttga

SEQ ID NO: 71276 - DNA, 1215 bp, Acinetobacter baumannii
atgtctccaattatccattctttacttgatacagacttgtacaaatttacgatgctacaagtggttttgcataaattcccgcaaacacatagtgtctaccattttcgttgcagaaatttagaagatactgtttatccattagtggatattttggatggcttaaacgagcaactcgaccatttatgtaatctcaaatataaagaagacgaattacaatatttaagaaaattacgctttattaaaagcgactttgtcgattatttagaattattccaacttaaacgacgttttattcaggccagtattgataatgaaggtcgactagatattcggattgaagggccaatggttcaggccatgatgtttgagatttttgttttagcgattgtaaatgaattatattttagccgcattaaaacagacgaagtttgggcggaaggcgaacgacgtttacaagcaaagcttgaattgattcagcagtacgaaaaatctcaacagccgaatgaccctccatttttagtttctgattttggtacacgccgtcgctatagttttgaatggcaaaaacatgtagttgctgcatttcataaaactgtgccaaatgtattccgtggaacaagtaatgttttgctggctaaagaattaaatatcacgccaattggaaccatggcacatgaattcttgcaggcgtttcaggcgcttgatgtccgtttacgtgattttcaaaaagctgctttagaaacatgggttcaagaatatcgtggagacttgggaatcgctttgaccgacgttgttggtatggacgctttcttacgtgattttgacctgtattttgccaaactatttgatggcttacgtcatgacagtggtgacccatatgaatggggtgataaggcttatgcgcactaccgtaaattaaaaattgacaccaaaaccaaaatgttgacttttagtgatggccttaatttgccaaaggcttgggagctacatcaatatttcaaagaccgttttcaggtgagtttcggtattggtacgaatttgaccaatgacatgggccaaacaccgctcaatattgtattgaaactggttgagtgtaatggtcagtcggttgccaaaatttcggatagccctggcaaaaccatgactgataacgatacgttcttggcttatttacgtcaggttttccaaattgaagaacttgatgaagctgtttaa

SEQ ID NO: 71277 - DNA, 444 bp, Acinetobacter baumannii
atgcgcgctttaatacaacgagttcttgaagctaaagtggtggtagacggtgaaacgaccggtgaaatccagaatggcttattggtttttttaggaattggccgagacgatactttagccataggtcaaaagcttatcgataagattttgaaatatcgtatttttgatgatgagcaaggcaaaatgggctggaatgtatctcaagcaaatggcggagtcctgcttgtctctcagttcacgctcatggcacaaacccaaaaaggcttacgtccagactttggtccagccatgccaccgagcgacgcaaaagcactctatgaacagttggttgaatatacccgttcacagtttgaaaatgttcaaacaggtatttttgctgctgatatgaaagtacacctcattaatgatggaccagttactttcaatttagaagttgaagcatag

SEQ ID NO: 71278 - DNA, 486 bp, Acinetobacter baumannii
atgttcatgaaactttcttctatacctgtagtcaagttaccacttgttgatgtcagtacagacccgttagatttattggtagcaggtttggcactgcgtatgaaacagttggcacgtacaagtcctaagtttattgagctagtgcatgaccgcgcattccgcattcaaattggtactgatttaggtgtggctcgccaaattattattaatcatggccatatcgatacagtcgctggctcacctgaaaaagctgactttattttgcagtttgcagatagtaaacaaggtgtaaaaaccttactcaaaggcgacccaactgcattcatgacgggtatgcaagagggtagtatcaaaatggaaggcgatttcagcctacttgtttggtttaaccaggcagctaaattgattccaccaaaattacctaaaccagtaaaagataaagtacgtcaggcgcgtgcctttattaaagaaaagactggtcgttag

SEQ ID NO: 71279 - DNA, 336 bp, Acinetobacter baumannii
atggtaacagcgaattttgccgctatcgccggactcagcttaattgctgtcgcgcttgttgctgtgttcttttctccttaccgtcgttggcttggttttatgcttgcagggatgtttttttgggggctattggaagtggtccgttttggagttcaagtcacttttgaaatgccagtcacatatagttatttaactgcactaagtctagcgatggtaatggtcacatttattttattacgtgaggataaacaggcacagaaggctttggcaaatcgccaatatatagaacatacgccagtatatgaagatgatcagcagcaatgttctagccgataa

SEQ ID NO: 71280 - DNA, 1224 bp, Acinetobacter baumannii
atgcgagaaatcattcttatatcctttttaggaccggaccaaccaaaccagtttacccgattaatgcaagtactatccgtacattcattgcaaatactggatgtaggtcaggccgttattcataatcaactgacattgggcatcgtggtcgcctctgaaaatgaaactgcgacagcgttggcaatgaaagagattttgattttagcacatgatattggcttaacagtgcgctttaaaccaatctcgggcacagaatacgatcaatgggtaagcgaaggtggacgaacccgttatatcgtcactgctttagcgcctgaactgactgctgcacatttacaagcagttacacaaattgtgtctacacaaggctttaacattgaaactgtcacccgtttatcgggccgtgtagaccttgaaaaagacagtaccttgcctcgtcgtgcttgcgtacagtttggtttaagcagtggtccaactttagatgcacaagcgatgcgtgctgcttgtttacttctttcaagcgaattaaatattgatgttgctgttcaagaagacaacgcttatcgacgtaatcgccgtttagtgtgtttcgatatggattcaactttaattgaacaagaagtgattgatgaattggcgcttgaagcaggggtaggcgcgcaagttgctgaaattactgaaagagcaatgcaaggtgagttggacttccaacaaagtttccgtgcacgtgttgcattattaaagggtcttgatgcatctgttttacctaaaatcgctgagcgtttgaccattactgaaggtgcggaacgccttatttcgactttaaaagcacttggatataaaacggcaattttatctggtggtttccagtattttgctgaatatttacaagctaaattaggtattgatgaagttcatgccaacgttttagatgtacaagatggcgttgtaacaggtgaagtaaaaggtgtaattgttgatggtgcgcgtaaagcagagttgctgcgtgagcttgccaacaaacttggtatttcactagaacaggcaatggctgtcggcgatggcgcaaatgatttaccgatgcttgcgattgcgggtcttggcgtggcatatcgtgctaaaccgcttgttcgtcaaaatgccaatcaggcgatttcaagcgttgggttagatggtgtcttgtatttactcggtatgcatgacaaagatttaagccgtgcctaa

SEQ ID NO: 71281 - DNA, 1290 bp, Acinetobacter baumannii
ttgattgcgcctagacaagggctatttgctagcctactgatcattagttttgcattgcatacctttttattggtgattgcaacgacacaccagctcaatgaaaaccgtgcgagtcaaggtcagctcatgaccagtcaactcgtagcagacagcttatctgagcttgagcctgccaatacggtatctttggcgcttattgccaatcgctatgcgaccaatccaagtgtggcatctatccgtattcttgatgccaataaacaagttttggcaacaagcggcatgtcaaaaactcgcgaaggtgaaatttttgttcgtgatgctcttcaaaacgagaagaaagtcggttctattgaaattacgcttattcaaccaagtattggggaaattcttcgtacccaatggcttgcgattttagcttcactgttcctacatattttattatggcttgcttaccgtgctatcgctcgtccaacccgtagcgaatacttggcccgtattaacgaagaaaatcgtttaaaacatgagattcaagagttaactcaagcactcgcactagaaaagcaaaatacagtgaccttggtcgcacaagctcagcagcaagctaaagctaaaccactggttcgtacacaaccagaaaaaagcgctgagtctccagatcaagataccttggcacttaatattcagttttatgaccctaaacagttgttaagtagcgttaaccagtctgtttctgttccttactttaaactttgtcagctctttttaaataaaagtattgagctatgcacgaagcattatcatttaaagtctacagatattgaggtagtagatgagttccatgccgaaggcgcaacactcgcaatctcaacttcacatgcacacgctgtagagtgcctacttatggtaggtacagtgttccaattactgtcagacgttttatataagcgttaccgtgaagataaacgctttgcactgcaaacccgtagtgccgtgtgtcatgctgtagaagcaatgcaaattgatgctaaagaagctgctcagcgtttagcacaacatcttcatgcgaaagagtctgcactttatcttgataatgatcagcttaaagcgattcaagacagctatcagcttgttgctatgccaaacccaagtaatgtcatgactcgccatgcatttatgattaacggcatgaatgctgaatgtgcagagcttgcgcaaaatattcgaactgaaattttgatgggcaaaaaatcaattccacaaaatgatagcccaagtagtgcagcttcttaa

SEQ ID NO: 71282 - DNA, 1122 bp, Acinetobacter baumannii
atgccgctgagtcgtgttgaagatcttgtcgccgatattcgtgcaggcaaaatggttattttgatggatgacgaagatcgcgaaaatgaaggtgatcttgtcatggcagcaacgcatgttcgtcctgaagatattaacttcatgattacacatgcacgtggtctagtttgcctaacgttaagccgtgagcgctgtaaacagttaaatcttcctttgatggttgatcaaaatggcgctcagcatagtacaaactttacgttatcgatcgaagcagctgaaggtattacaacgggtatttcagcagcagagcgtgcacatacaattcaaacggctgttgcagcgcatgcaaaaccaagcgatatcgtacaaccgggccacattttcccactcatggctcagccaggtggtgtattacaccgcgcaggtcataccgaagcaggctgtgatttaacacgtctagcgggctttgaacctgcatctgtcatttgtgaaatcatcaatgaagatggcacaatggcacgccgtgcagatttagaaatttttgccgagaagcatggcctaaaaattggtacaattgccgacttaattcactaccgtatgacgaatgagcaaactgtagaacgtctggatcaaaaaacgattcaaacagaatacggatcatttgagctctatcgctatcgcgagatcggtaacccggacattcatttggctttagttaaaggcgagccaaaagaaggtgttacaacggtacgtgtacacggtttcagcccaattcgtgatttgcttaagctgaataaggctgacggcgaacctgcttggaatcttgaccgtgcactacagacaatcgcagcaagtgaccgcggcgttttagtctggatcggacaagatcatttgcaagacttgggaccagcgttggatgatttaaacaagccaaaaccggtgaaatccaatgcagcactttcacatcaatatcaaacgattggtgtaggtgctcaaattttgcgtgatttaggtgttgaaaaaatgaagcttctgagctcaccattacgtttcaatgccttatctggctttaatttagaagtagtggaatatgtcactgctgatcaaatcacaacgaaataa

SEQ ID NO: 71283 - DNA, 471 bp, Acinetobacter baumannii
atggcaattcgccgtattgaaggtttattacatctcgcaagcgaaggtcgttatgcgattttagtgggtcgtttcaacagctttgttgttgaacacttattggaaggcgcgatcgacacattaaaacgtcacggcgtaaatgaagataacattactgttattcacgctcctggcgcttgggaactcccgatcgttgctaaaaaattagctacatcaaaccagtttgacgccatcattgctcttggtgcagtgattcgcggtagcacacctcactttgactttgttgctggtgaatgtgcaaaaggtttaggtgtagttgcgttagaaagcagcttgcctgttatcaatggtgtattaactactgacagcatcgagcaagcaatcgaacgctcaggtacaaaagcaggaaacaaaggtagcgaagctgctttaactgcaattgaaatggttaatttattaaaggcaatttaa

SEQ ID NO: 71284 - DNA, 450 bp, Acinetobacter baumannii
atgtctcaaacactgcaagccgcttatgcagcaaaacgtaaagcacgtcgttttgctgtacaaggtatttatgaatggcaaatgagtcacaaccctgtacacgaaattgaagcacgtacccgtgctgaaaatgcaatgcacaaggtcgacttaagctattatcacgaactacttactcaagtcatcgctcagcacgaagaccttgatgcgttacttattccggtacttgaccgtgaaattgacgcacttgatggtgtagagcttgcgactttacgtttaggtgcttacgagttacgtgatcatttagaaattccatatcgtgtggtacttgatgaagcaatcgaactcgctaaacattttggcggagcagacagtcataaatacatcaatggtgtattagaccgcctaagttcgacactgcgtagcgcagaaaaacaacaagcaaactaa

SEQ ID NO: 71285 - DNA, 918 bp, Acinetobacter baumannii
atggctgagttttcaattattgaccagtactttaatcggcagtcaaactccgatgtcgcgcttggtattggtgatgactcagccttaattactcctcctccaaatcaacaactggtgatctgtgcagatacacttgttgctggacgtcatttccctcttgaaacctcacctcatgcgattggctggaaaagtgttgctgtaaatctttcagatattgctgcaatgggtgccaaaccgcacagtatcttactagcaatcagcttgcctcaagttgaccatgaatggcttaaagggtttagtcagggaatctatgactgttgtaatcaatttggtgttgccttaattggtggagataccactcaaggcccacatctcaccattaccgttaccgcaatgggctggattgaaaccggaaaagccgtgttacgttcaggcgcaaaagttggtgattatgtttgtgtgagcggtcaggtgggcgatgcagcctacggtttacagcacttgggccatcctctacagcaaagactcgactatccgacaccacgctgtcagcttggacaagagctaaaaggccttgcctctagcatgattgatgtgtcagatggcttagcgcaagatttaggacatattttaaaagcatccaaggttggagcccgactcgtcttggaagaattacctgttgaccctgtattgcaacaactaaaagaacaacaacgttggcagtatgcacttgcaggtggtgatgactacgaattatgttttacaataacaccgcaaaattatggaaaacttttgcaaaaacaactggacgttaagattacaatgatcggacagatcgttgagcaaacaaaactaacttttgagcatttgggttcagattacccattgcaaattcatggataccaacactttgcataa

SEQ ID NO: 71286 - DNA, 534 bp, Acinetobacter baumannii
atggataccaacactttgcataaaccgccgattcattttaagaacatgtcttggttcaaccgctgcatcgttttctgtggggttggttttggatctggtctcgctcctaaagcacccggtacttttggttctgcttttgccttacttttcattcctatctggttatctctcggatttaccttaagtttaatcgctattctcatcatgtccttggtgggaatttatatttgtggtcaaacggcaaaagtccttgatgttcatgatgatgggcgaattgtttgggatgaatttgcaggacaatcaattactcttctgcctttaatattttttaatataatgtcgttacaatgggcactaattggtttttgcttattccgcctgtttgatgtttggaaaccttggccaatccgtgttgccgaccagaaagttgctggcggtttcggaattatgctggatgacatcattgcagggctttgggcggcactctgtatcatcatatttattactttctggggcgtaacgccatttaagtag

SEQ ID NO: 71287 - DNA, 1365 bp, Acinetobacter baumannii
atgtcaactaccgtcattatcctagctgcaggcaaaggaacgcgaatgcgttcacaactacctaaagtattgcaacctttagctggtcgcccactcctaggacatgttattaagacagcaaaacaactattagcaaaaaatatcattaccatttatggacatggcggcgatcacgtaaaacagacgtttgcacaagaaaacattcaatgggttgaacaagcagaacaattaggtacaggtcatgctgtacaaatgactttaccagtacttcctaaagacggtatttcattaattttatacggtgatgttcctttagtccgtcaaacaacgctagagcaacttgttgaagtatcaagtaaaaccggtattgggatgattactttacatgtcgataacccaacaggttatggccgtattgttcgccaagacggaaaaattcaagcgattgttgaacataaagatgcaactgatgctcagcgccaaattcaagaaatcaacacaggtatttactgtgtaagcaatgcaaaacttcatgaatggttacctaagctttctaatgaaaacgcgcaaggcgaatactatttaactgacatcgttgcgatggcagttgcagatggcttagaaattgcctctattcaaccagaacttgcttttgaagttgaaggggttaatgaccgcttacaacttgcggcacttgagcgcgattttcagcaacagcaagcaaaagaacttatgcaacaaggcgtaacttttgccgaccctgctcgtttcgatttacgtggttctgtgaaagttggacacgatgtccgtattgacgtaaatgtcattattgaaggtgactgtgaactcggtgactttgtagaaatcggtgctggttgtattttgaaaaatacaaaaattgcagcgggaaccaaagttcagccttatagtgtttttgatggtgcaattgttggtgaaaacacccaaattggcccatttgcacgcttacgcccaggcgctaaattggcaaacgaagtacacattggtaacttcgttgaagtcaaaaacacaaccattggtcttggcagtaaagccaatcatttcacttacttaggtgatgccgagatcggtgccgattcaaatattggggcaggtacaattacctgcaattatgatggtgcaaataaacacaaaaccactattggcgatgcagtctttatcggttctaatagctcgctggttgcgcctgtgactattggaaatggagcaacagtcggtgcgggttctgtgattacgaaagatgtggctgaacaaagtctctcctttgaacgtgctcaacaaatttctaaggcaaattatcaacgtccccaaaagcgtgaaaaataa

SEQ ID NO: 71288 - DNA, 981 bp, Acinetobacter baumannii
ttgttttatatttattattttgctgattatttaacttttgtattttcacttgcgacaagtgtagcgatttattttgctgttcatgatgtatattcaatatattttaatgcaattttgcaatctaaaataaatgcatattgtaatattttagctttaattatttcattaattataagatattgcattgcaaaatttcagctagcagtagagttattatgtgttccgataataatgattaccttagtacctttttttattagaaaatatttgtatgcacggaaaaaagtgagtgaaagtgatattgtagtagaaaaatttaagcgttatcgaaaatttatgttgggtgtggggcgtaaacttgctttctactcactttcggttgcaatttttacaaaaacatcgcagttatttctaggtgttgagtcgcaatatgatttgggtatttatactgtagcaatgacattggggaatagtttctattttgttttggttgcaataatttcttcatattttacacagatttatgttgagaaggattttgaaaaaagtcaaaatatggttgctaagctaagtttggttattatcttaatatgttcgctagtaatggttattttttctttaacaggacattatattattgaatggttatatggcaagcaatatacaagtgtaaataatattctaatatttacagtatttgttacgttattttcagggctttccacaattgcggagaagtacttattgaaatttaatgcatatgactatttgaagaaaaaaacactttgtttagttgtatttaatatcatgctaacagctgtttctgttcatttttggggcttaaatggtgcagtttttgccattttaactacagaaattatgtcattttctatatttaactatttttataaagatagaatcatactcgatgttcaaaagagaatttttttaccttccacttatagaaaagagtacaactaa

SEQ ID NO: 71289 - DNA, 1152 bp, Acinetobacter baumannii
atgacatctggttttgaaaccttgaatttacatccgcaacttaaaaaggcgattgatgctttagggtttactcaaatgaccccaattcagcaaaaggttttaaaatatacattagccgggcacgatgcaattgggcgagcacagacaggaacaggtaagacagctgcctttctgattagtgtaattaatgatttactcaataatccggttaaagaacaacgtttccgtggcgaacctcgtgctttaatcttggcacctactcgtgagttggccttgcaaattgaaagcgatgcaaagtttctcacaaaattctctaatttacatttagtgaccctattgggtggtgttgattttgataagcagaagaaacaacttgatgctaattttgtcgatatcatggttgctacaccaggacggttaatcgattttgtagaacaaaaagaagtctggctcgatcaaattgaatttttggtaattgatgaagctgaccgtttattagatatgggctttattccttcggtaaaacgtattgttcgttattcaccacgtaaggaacaacgtcaaaccctgatgttctcggcgacttttagttacgacgtcttaaatttagcaagacagtggttgtttgagcctgtaacagttgaaattgagcctgaacaaaagaccaataacgatgtagaacaacgtgtttatgttgtagctaaacaagataaatatcgtcttttacaagatattttacgtgaagaaccaattgataaagtcatgatctttgccaaccgccgtgatcaagtgcgccgtctttatgaccatttgaaaaaagatggatataaagtaggaatgctatctggtgagattgctcaagataaacgtttgaaaatgctagagcagtttaagcaagggaagcataacatcatgattgcaacggatgttgcaggtcgtggtattcatgtagatggcgtatcgcatgttatcaacttcactttacctgagcagtctgatgactatgttcaccgtattgggcgtacaggtcgtgcaggtgcacaaggagtaagtattagtttcttgtctgaagatgatgctttctatttaccagaaattgaaaaagcaattggtaaaaaactaccacttacccgattagacgggtattgctaa

SEQ ID NO: 71290 - DNA, 1548 bp, Acinetobacter baumannii
atgtttatacgtttattactaatctgtcttgctttattcaccgtcgatgctcacgcaactgatgatggtgattggtggttacaacgtgagattaaattacagcaaaaccgtgaagactacgctagacgtgtttacggtcgttcagctagatcatttttagaaactgatcctgttacagctaaatcaaagacagttactaaaattgctattgctgaatcagctcctacggcctctaaagttgggtcttcaatgtttaaacgtgttgctttttatgcgaggaacccaggcgttcaaatggttggtgttatggctgtaacacagttaattgaggccattggttgggttatggaggatggtgcttatgtaaaacataaacctgttgaaccaactgatcctgctgatccacgtttgcaatattattatatgacttcttcatttggtgttgttaaaaagttcggtacaaatgccgaagctgctaatgatatttgtcaacgcaatgctaagggttatggctggacacttatttcagctactccatatacatggggtgctaaagaaactgggttaaaagaagctatatgtgttattagcaggtcttctggatctgccaatgagacttttaaatgggtttatcaacgagaagctaatcctatttatgatcccaaagctcctaagccacctgatcaaattattcctttaacacctgagttactcggtgcagctatgatgggcgaaggctatcatgatcctgttacaccttctattgatcctagtgttaatactggtctcatgcataattcagttgcaaatgcctatgagcatgcaggtaatggtattggtgatgaattagcagatcaaatggatgataaattaaaaaatgctcctatcactcctgatgggaaagctgcttcttttggtgatcctcgttattctgctcctccaaatgatttaaatacgaatgatcgtagttggcgtactgatggtgctactgctacaggttccataggtaatggctctggtacgggtacaggcactggttcaggtactggtacaggctctggtacgggtacaggttctgatactggtacaggtacaggtacaggttctggtactggtacgggtacaggaaccggtacaggttctggtagtggttctggttcaactgatccgcagccacagcctcaacctatttccattacttttcccaacttttgtgagtgggctttcactgtttgcaaatggtatgacgattggaaagttactgataagtggatgaaggatgaaccagaactaaaggatgaaaagtttgaagtccaagatgaggatttacccggttatcaacattctgactatgtaaagtttggacaaacatgtccttttcatgctgaacccgtctcactagattatggaattggtcagatgtcttttgaagcagatgcttcgatattgtgtacttatggggaaattgcaagaccttacattattggaattagtcaccttggttgcttgctttacttgttaattgctttgagaaatggagctgtctaa

SEQ ID NO: 71291 - DNA, 273 bp, Acinetobacter baumannii; identical to SEQ ID NO: 62514

SEQ ID NO: 71292 - DNA, 363 bp, Acinetobacter baumannii; identical to SEQ ID NO: 54898

SEQ ID NO: 71293 - DNA, 222 bp, Acinetobacter baumannii
atgctacaagctaaaccttatttacgttcggtacaaattaaagcaaatatgcaggcagactggtcaatttatccattttcgataccagccgttaatgatattgaacaattaaccttccatccagacgttacttttttgttggcgaaaatggttctggtaagtcgactattatggaagccatcgctttggcacttggcttttccgaagaaggcggcactctaa

SEQ ID NO: 71294 - DNA, 435 bp, Acinetobacter baumannii
ttggttaatgtggttgttacagttactgctggtgcaaccgcatctactgtgccagttgatggtgctgacgggttacccgctgggtcagttgcaacaactgtaactttgtctccatctttaagatcacctgggtttggtactgtccacttaccatccgggcctgcaactacagtcgctgtcgtaccatccgggaaagtgaccttaactgttgaaccagcttctgctgtacctgttacaggattagttgcattgattggatcaattactggtgcatttggcgcagtggtatctacagtcaccacagcattagttgtacccacattacctgccgggtcagttgctgtcacagtcacagtatgcggaccgtctgtcaacactggaagtgtattgtctgcaagggtccaggtgccatcaccattattggttgccgggtag

SEQ ID NO: 71295 - DNA, 1173 bp, Acinetobacter baumannii
atgaataatttaaagttagcatttttcgggtttttgtctggttatatatattgctttttaacagttacacttcaagcagctttcacacatttgggctatccagtttcttttatctctacgatggtatttgccttactgccttattcttttaaatttttatggagtggctttgccgattcagttgataaatcatctatcaaatttttaatatccatatttataattttaatcagctttagcttctttttattaatcctcttttcggatttatatagtattgtttttattataatgttaatcaatttggcattcttaggagcatgttttgatatcttgacagatgcaaacttaattaaaaattttacagatgaagagcgtagctctttattgtcttattacatttttgggtggagaattgcttctatttttgcaggtggggcagttctatttatttttaataaaatcttccaaggaagtttaagccacttatttgtattttcctctttgatttttctgattttttttatagtttttactgttaataagttaagcgatttttggaaatttagtcgggaaaacttattctattttttaatgtttttaccaccgatctctttattttttattgtgaaaactagtctatacaatttaaaagattcgttttctgttctttctgatataagtaaattgtttttttattcaacattttataagctttttgatttaaccttatcttcttttgtgatcatattttttattaaaaagtttgagctaactcttgagttttttggtgtggttaatactattttaccgctacttgctgttgtattttgtggttatgcttggggacggatgagtagtaaatttccagcaaattatataatgttgttttctttgttactgaaatcattaaccttgttgttctttatctatgtaagtttttataatgaaattaataaagtttatttacttgtcttgttctcactcaatattgtttcatctagctttgttacttattctttttccaattatttaatgcaagctgttaatagtgctaggtcatcatttaaattttctattttaacatctttgtctatgcttttaattttggtatctgtaccagttgcatcttatttagttgataatggctttgttgcacaaagctattcttga

SEQ ID NO: 71296 - DNA, 726 bp, Acinetobacter baumannii
atgcaaactacaaatggtcagctcagctttaaagaaaaaattaaattaattcaaaaaattatggtgcctagtatcctaaattctataaaaataaattaccatcgatttcaaactggtaacgattttgatataggacaaatcgtaataccagatactcaaatgattaaaatcgcacttgaggaactagaatcaaaagcaagtacatctatctacaatcattcgtggcgaacatacttctggggaaccgccctaggtcatttacaaaaccggcagtttgactctgagtcactcttattagcttcactttttcatgatattggcctaactgagcaacatatgcatagtaaaggctgtcaatgttttacatatgagagcgctaaacaatttgagcaaaaggcgaaagaatataattttgatgagaaaaaaagcgaagtgattaaagatgctatatgtctacacatgaatggatatatagaggaatctgatccatctgaggttattctattacagcaaggtgcttcttgtgatgtaattagtgacaatcaatataaaatccccttatcttttagaaatgaaattttagaaaaatatcctagaaatcaatttaataaagaatttattaaacttattaaattagagagaaaaaatgttccgagttcgcgaacaggcttattatatgatcttggattacccctcttgattaaatcaaatttatataaagaataa

SEQ ID NO: 71297 - DNA, 831 bp, Acinetobacter baumannii; identical to SEQ ID NO: 51030

SEQ ID NO: 71298 - DNA, 216 bp, Acinetobacter baumannii
atgaaattaaatttctccaaaactataagtcgtatggaacaaattatttctggttatcaacattgttatagtgatgccgattctttaaacttaaaagatttcaataaaatactaattttagaaaagcaaaaagctattaatttactttttaaaaatttaggaattgatattagcacagtacattcacaatatttaaaatatttattagacaattaa

SEQ ID NO: 71299 - DNA, 378 bp, Acinetobacter baumannii
atgtccgccgtactgagcaataatttttttatttggaaagcgagagccaatggtggtgtcataaatttttgcatcacggctatagcgctttctgctttacccatcacaaagggtgcacgtgacatactttctacaccaccagcaatatacagttcaccttcaccacaagtaatagcacgtgctgagtcaatcacggcacctaaaccactagcacataggcggtttaccgtctggcccggtacagtaacaggtaaacctgcaagtaataatgcatttcgtgccacattacggctatcttcacccgcttggttagtgtcgcctaaaatcacatcttcaatatcagcgcccggtacaccagttttttctagtagtttttga

SEQ ID NO: 71300 - DNA, 228 bp, Acinetobacter baumannii
atgtcgccttacgatattgtgagcaataaaaaatccgaccttaagtcagattttttatatcagtggcattacatgtgtcgtaaatgtcaactcatgtgtcgcgtgacgaaagcagtaaaacttaccagcttaacgcaccaccagtttggtagtcagttacgcgagtttcaaagaagttcttctctttacgtaagtccatcatctccgacatccacgcaaatgggttag

SEQ ID NO: 71301 - DNA, 393 bp, Acinetobacter baumannii
atgcagcgcttctttgcaggtcagtattttgattatcgtcaaatttctcagctgattttcaatatgttttcattcgaccaagtgcaactgactttagatagaaccaattggaaatggggaaaacgaaatattaatatcctgatgctcgcaatcgtttatcgtggaatagcgatacctatcctttggacattgcttaataaacgtggaaattcagatacgaaagagcgtattgctttgattcaacgctttatagccatttttggtaaagaccgtattgtgaatgtgttcgcagacagagagtttatcggtgagcagtggtttacatggttaattgaacaagacatcaacttctgcattcgtgttaaaaaaacttcattgtcaccaatcatttag

SEQ ID NO: 71302 - DNA, 396 bp, Acinetobacter baumannii
ttgtttaaacgtgatccgagggatatttcacagatttggttttatgagccatattctaatacctattttaaagtacccactgcaaagcgagagataccaccgattagcttatttgaatataagcaggttcagaactatctcaaaagtgaacgtcaggatgttcagaatcaggatgagatttacaaggcgattttgcatctacgtgatcaacttaatcaggctagaagcttgactcgaaagcaacgtcgctcaaaccaaagaaaaaaggaaaatgcaaaagccattactcagctttccgaacagaatcagtctaaaaaggctgtagtttctgaaagtcttcagacaagtgatgatttgtggagtactcctttaactgcatttgacgatttaaggtga

SEQ ID NO: 71303 - DNA, 396 bp, Acinetobacter baumannii
ttggcttcagcagaacaaaatcctgtcattcgtagtggtcatttactggttgcattattaactgcaccagacctctatcaaattgcaacgagagcttcgagtttatttgatcttttcccgatagactcaatgaaacataagtttcttgaaatttgtgaaaaaagtgtagaacaacaagaagaatcaaaaacatcttcacaagcagatgaattagaacaagccgcgactccaactgcaaaaactcaaaaaacacctgctttagatcaatatacaattaatttaactgaaaaagcgaagaatggtgggattgaccctgttattgggcgtgaatatgaaattcgtttgatgcttgatattaatgcgcagacgccagaacaacccaattttaactggtga

SEQ ID NO: 71304 - DNA, 309 bp, Acinetobacter baumannii
atgaaaaaatcagctcaacgtgtgcaggattttcaggaaattccggctcataacgcaattcctgatttgctttggttccgtgttcgtaatgcacccgcagaaacggtttatcctcaacatgcgcatgcatggggtgagtttatttatgcgtttagtggtgtactcgaagttaatattgatcaaattaattatttaaccccgccaccttatggtatttggcttcctccttataccaaacacagtggtattaaccgcaacgaagtgactcatgcaactttatatgttcatgaaagtctgtgccaaaagtaa

SEQ ID NO: 71305 - DNA, 1230 bp, Acinetobacter baumannii
atgaaaaatattcaaacgacagcgttgaaccgtacaacgttgatgtttcctttagctttagtgctatttgaatttgcggtttatattggtaatgacctgattcagccagccatgttggcaattactgaagatttcggtgtaagtgcaacttgggcgccgtcttcaatgtcattttatttattaggtggtgcatctgttgcatggttactaggacctttatcagatcgattaggccgtaaaaaagtacttttgtctggtgttttattttttgccttgtgctgttttttaattttattaacgcgacaaattgaacactttctgacattacgttttttacaaggtattgggttaagcgtaatttcagcagtgggatatgccgcaattcaggaaaactttgccgagcgtgatgcgattaaagtcatggccctcatggcaaatatttcattgcttgcgcctttgctagggcctgtacttggagctttcttaattgattatgtttcatggcactggggctttgtggcaattgctttacttgcactgctgagctgggttggcttaaagaaacaaatgcctagtcataaggtgagtgtaaccaaacagccttttagttatctttttgatgactttaaaaaggtatttagcaatcgacagttccttgggttaacgttggccttaccacttgtgggtatgccgcttatgctttggattgcattatcgccaattattttggtcgatgaactgaagctaacgagtgtgcaatatggtttagcacagttcccggtatttttaggtttaattgttggtaacattgttttaattaaaattattgaccgtttagctttaggtaaaactgtcttaattggcttaccgattatgctcactggtacgctaattttaatattaggtgttgtctggcaagcctatttaattccttgcttattaataggtatgacactcatttgttttggtgaaggaattagcttctcagtgttgtaccgttttgcgctcatgtcatctgaagtgtcaaaaggaactgtagctgctgctgtttcaatgctattgatgacgagcttctttgcaatgattgagcttgtacgctatctctacactcaatttcatttatgggcttttgtcttatctgcttttgcatttattgccttgtggtttactcaaccacgtttagctttaaaacgagaaatgcaggaaagagttgcacaagacttacattaa

SEQ ID NO: 71306 - DNA, 435 bp, Acinetobacter baumannii
gtgattggccgaattcagctaacccgtatggctgaatggactaaaaaacgtactgaaaatgcagaaaagattttaaaagcctttgaagactctcctttctttagtgttcatactccctctgtagattatattcatgcatattataaatgttatgtccacgtgaatttagaagccttgccagatggttggtcacgtgatcgtattatgcaagaaattaactctcaggaagtaccttgttttagtgggtcttgttctgaagtttatttagagcacgcatttgatggtacaccatggcgcccagaaaagcgtttggaaaatgctcaaaaattaggtgaaactagtttaatgttcttggttcatccgactttgagtcaagacagtatagaaaaaacaattcttgcaattaatgctgttaatagagctttacaatcataa

SEQ ID NO: 71307 - DNA, 153 bp, Acinetobacter baumannii
atgaatgaatgtctaaaatataatatttttcaacaacattgccctgctcgactgttttttgaaaaaattgcagacaaatgggttttactcatcttaaatattcttgctgtctcttatacacatctgacgctgccgacgatactccttgtgtag

SEQ ID NO: 71308 - DNA, 411 bp, Acinetobacter baumannii
atgaaccctgatcacgatccaatctaccgtgccgactgcccaagccgtgccattctcgatcaaatcgcagataaatggtcaatgctggttttgatggtgttacatgaaccacgtcgcttcaacgccatcaaacggcgccttgatggtattacccaacgtgtattgacacagacacttcgcaagttagaacgcaatggtatggtgacacgcaccgttatagatgggaaaacgctaggggtggaatatgccttgacgccacttggtcaatcactcaaattgccttttaacgcgctctacgactggaccgtcgagaatatggacaccattcaggtgtgccaatctcgctatgatcaatctgatgatgctattcgcacagataccactcaggaatcaggcataacgttgaaataa

SEQ ID NO: 71309 - DNA, 837 bp, Acinetobacter baumannii
atgaccattccaacttattctacacttcacattgagtatgatcgaggcgtggcgactgtcagtattaacaatccaccagttaatgtattggatgttgcattgatgagtgatattcgagcttttcttactcaggtacgtgatgacccacaaacacgtgtaatcgtgttccaaagcgccgatcctgagtttttcatcgctcatgtagacatgaccttaattgatgagccaaacgcttttgaccagttcgcaaaagatgtacctaatggattgaatccatttcaggctttaggagagatgattcaggcacagccgcaagtgacgattgttaagctcgaaggcttggcgcgtggtggcggtgctgaattcgtcacagcagtggatatggcatttgctgcgattgggcgtgctggcctcgcccaatgcgaggcattgatggggattattcctggcggtggtggtactcaatatctttcacagcgtatgacacgggggcgtgcattagaggtaattcttggtgctgagctgattgacgctttgctagccgaacgatatggttgggtaaatcgtgcgcttccggcaaatgagttagatgcttttgttcatcgcattgccacaaatattgctgctttacctgaaggggtcatcgccgctgcaaagaaagcaatcccacctgcggatttaagcgaagacttccttcgagagcacaaagcatgggctggtctgtttgcgcgtcctgctgctgaaaaactcattcgtggcggcttgcaggcaggtgctcaaacaaaagtaggcgaacaggatttggagcaactcctccgcgatttgtctgcatcctga

SEQ ID NO: 71310 - DNA, 180 bp, Acinetobacter baumannii
ttgtcgtgtacagaggaagatttgcttaaaatgattcagggaactgtagataacggatttagccaagcgcggtttgttgataaattgattgcctcagacaaaattgaagatattcttcaacaatttgagcaatatcaggctcctgctccgaaatggacaaatgccgacgttcaaccataa

SEQ ID NO: 71311 - DNA, 726 bp, Acinetobacter baumannii
gtgggttattttattaaaaaaagtattgatttaccaagttttagtttacgctctttatttaaagttcccataaaaaatatatttacgaaatatagaccatttagcttatacggttcaatattagagctaacgtcagtatttattttttatgggcctatagttatattttcttatatctttaatgggaataataattatatagggcaatatagttttatatcccgccttgtttggcctcctataattttaatatctacatcttgtactaacgctttatattttcatattactaaaattaataatttagaagtaaagtcattaactttaaaagcaacggcattaggtggtttcataatagctattgctccttttttaggttggtgtggtcattatataattaatttgttaataaaaactcccacatggaatttagtgtctgatttcggattttatattataactttagcttttgtatttatgggaactatatatgttagagttgtaataagatataaacatctacaaaaatatcaattaataatggatattttttttatagcaatcgtggcaataattctttattttcgagagaaaataggcatatctgacgtgtttgaaattcttaaaagttatactgttatatattttatttatagtcttttattaattttaggtattttattttttgttttaaaagaaatgaaaaatcaaaatattattaaatga

SEQ ID NO: 71312 - DNA, 399 bp, Acinetobacter baumannii
atgtgcatctacgaaattctggcggccacagcgtgcgcagttcatttttgctctaacgccctagctaagccgacggacagcccgcagggctggccggtcggcttgagcgccatgttgggcgacaactgccttgcgcattgcatacctacggaacatgacgcctccacgggagacattttgctcctcaactacactgaaaccatgccgcaggaaaaagggcttggcgaccagactggcttctgtgaagagcgaaacacctgggagggctttctcaacctcacggtacagaacagacgcgacgccccgacgctcggaacccggtgcggtgtaaagaaactcgatgtggccgctaagctcgtaagagatgaacccgataaccgcatctccctcaattgctag

SEQ ID NO: 71313 - DNA, 465 bp, Acinetobacter baumannii; identical to SEQ ID NO: 37193

SEQ ID NO: 71314 - DNA, 993 bp, Acinetobacter baumannii
atggcatggaaacaaacagggcaactctccctagcagacagtctcattaacgctcacaaagccatcgaagaattagatgaactacacaacctaattgactggcaaactatcgagcaaaccttacgccacgttcatagcagtgagcgtggggaatctgcctttcaccctgtcatcatgtttaaagtattactcttacaaaaactctataacctatcggatccagccatggaaaaacaactggcacgagacttactatttcgtcgctttgttggcctatcattaacggatgatgtacccgaccatagcaccatttggcgataccacaaacacctaggtgagcttagactgattgaaccattgttcaaccaaatcaatgagcaactagcccaacaaaacatttttatcaaagcgggcagtgtcagcatcatcgatgccagtatcgttgaagctaaaaacaaacgacctaagaaaggcaaacacaccgacaatacccaagataacgaagccgcctatgtcagtaaaaaagacagtacaggtaaagtaaaaaccacctacggctttaaaattcatctcaactgtgatgaagacagctttgtcaaaaaggttgaaactacccctgccaatgtccatgattcccaatgttttaccacgctgttaacagatgatgaatcagccgtgtatgctgacagtgcgtataaaagccaagcccatgatgactaccttgccgagcatgaaccaccgataaaaaatcatattcatgatagagcatggcgcaatacacccttaaccgaacagcaaaaacgcaataatacccaaaagagccaaactagaaacaccgttgagcgggtctttggacattttaaactgcattatgggatgagcaaagctcgtcatttagggttaatgcaatttcataccagcactttgcttgcaagcatggtgcataatttaaaaactgccctaagcttgaaacgaaaatacggactcgcctag

SEQ ID NO: 71315 - DNA, 435 bp, Acinetobacter baumannii; identical to SEQ ID NO: 26756

SEQ ID NO: 71316 - DNA, 789 bp, Citrobacter koseri
atgagcagtaacttcagacatcacctgttgagtctgtcgttactggttggcatagcggccccctgggccgcttttgctcaggcgccaatcagtagtgtcggctcaggctcggtcgaagaccgcgtcactcaactcgagcgtatttcgaatgctcacagccagcttttaacccaactccagcaacaactctctgataatcagtccgatattgattccctgcgtggtcaaatccaggaaagccagtatcaattgaatcaggttgttgaacggcagaagcagatcctgctacagatggatagtctgagcagcggtagcgcagcgacgccatcggcgggcggcgagcaaagcggggcggcaaccgcaacacctgcgcctggcgcgggcgcggcgacgtcaggcgcgccggtacaaagcggcgacgccaataccgattacaatgtggcaattgctctggtgcaggataagtcccgccaggatgatgcgattgtggcgtttcagaacttcatcaaaaaatacccggactcaacttatcagccgaatgccaattactggctcggccagttgaattacaacaagggtaaaaaagatgatgccgcattttattttgcctcggtagtcaaaaactacccgaagtcaccaaaagcggctgacgcgatgtacaaagtcggcgtcatcatgcaggacaaaggcgacgcggcaaaagccaaagcggtttatcagcaggttatcagtaaataccctggcactgatggcgcaaaacaagcgcaaaaacgtcttaacgcgatgtaa

SEQ ID NO: 71317 - DNA, 519 bp, Citrobacter koseri
atgcaactgaacaaagtgctgaaagggctgatgatcgctctgcctgttatggcaattgctgcatgttcttccaacaagaacgccagcaatgacggcagcgaaggcatgctgggtgcaggcactggtatggatgcgaacggcagcggcaacatgtcttctgaagagcaagcgcgtttgcagatgcagcaattgcagcagaacaacatcgtttacttcgatctggacaagtacgatatccgttctgacttcgcggcaatgctggatgcgcacgctaacttcctgcgtagcaacccgtcttacaaagtcaccgtagaaggtcatgcggacgaacgtggtactcctgagtacaacatctccctgggcgaacgccgtgctaacgctgttaagatgtacttgcagggtaaaggcgtttctgctgaccagatctccatcgtttcttacggtaaagaaaaacccgcagtactgggtcacgacgaagcggcttacgctaaaaaccgtcgcgccgtactggtttactaa

SEQ ID NO: 71318 - DNA, 1293 bp, Citrobacter koseri
atgaagcaggcattacgagtagcatttggtttcttaatgctgtgggcagcggtgctgcacgcagaagtacgtatcgagatcacccagggggtggactcggcgcgcccgattggcgttgtgccattccagtgggcggggccgggagctgcgcctgaagatattggcggcatcgttggcgctgacctgcgcaacagcggtaaattcaatccgttggatcgttctcgtctgccgcagcagccgggtacggcgcaagaagttcagccggcggcatggtctgcgctgggtattgatgcggttgttgtcggccaggtgactccgaatcctgacggttcctacaatgttgcttatcagctggttgacaccggcggcgcaccgggtactgtactggcgcagaactcttacaaagtgaacaagcagtggctgcgttatgctggccatactgcaagtgatgaagtgtttgagaagctgaccggcatcaagggcgcattccgcacccgtatcgcttacgttgtgcagactaacggcggccagttcccgtatgaactgcgtgtgtctgactacgatggctacaaccagttcgtggttcaccgttctccgcagccgctgatgtctccggcgtggtctcctgacggctctaaactggcctacgtgaccttcgaaagcggtcgttccgcgctggttatccagacgctggctaacggggctgtgcgtcaggttgcgtcgttcccacgtcacaacggcgcgcctgcgttctcgccggatggcagcaaactggcgtttgccctgtctaaaaccggtagcctgaacctgtatgtgatggacattggttctggtcagattcgtcaggtgacggatggtcgcagcaacaacaccgaaccaacgtggttcccggacagccagaacctggcctttacctctgaccaggccggtcgtccgcaggtgtataaagttaacgtgaacggcggtgctccgcagcgtatcacctgggaaggttcgcaaaaccaggatgcggatgtgagcagcgacggtaaatttatggtaatggtaagctcggcgaatggtcagcagcacattgccaaacaagatctggtagcgggtggcgtacaggttctgtcgtcaacgttcctggatgaaacgccaagtctggcacctaacggcactatggtaatctacagctcttctcaggggatgggatccgtgctgaatttggtttctacagatgggcgtttcaaggcgcgtcttccggcaactgatggtcaggttaaatcccctgcctggtcgccgtatctgtga

SEQ ID NO: 71319 - DNA, 1227 bp, Citrobacter koseri
gtgtcaaaggcaaccgaacaaaacgacaagctcaaacgggcgataattatttcagcggtactgcatgtcatcttatttgcagtgctgatctggagttcgttcgatgagcatatagaggcttcagccgggggcggcggtggttcttccatcgacgccgtcatggtcgatcccggcgcagttgttcagcagtacgatcgtcagcagcagcaacaggcgagcgcgaagcgtgcggcggaacagcgtgaaaaacaggcgcagcagcaagctgaagagcttcgcgagaagcaggcggctgaacaggaacgactgaagcaacttgagaaagaacgtttagccgcgcaggaacaggcgcgcgagcaggcggaacagcagaaacaagcggaagcggccgcgaagaaagcacaggagcagcagaaacaggctgaagaagcggcggcgaaagccgcagcggatgcgaaagcgaaagcggacgcgcaggctaaagcagcggcggaagcgcagaagaaagcggaagccgaagcagtaaaagcggctgctgatgcgaagaagaaagccgaagctgaagcggcaaaagccgccgccgacgcgaagaaaaaagcggaagctgaggcggctaagcaggctcaggcagaggccgcgaagaaagccgcagcagaaaaggctgctgctgaaaaagcggccgcagagaagaaagctgccgccgacaaagccgccgctgagaaagcggcagcagcaaaaaaagctgctgctgagaaggctgctgccgataagaaagctgcggcagataaagcggctgctgcgaagaaagccgcagccgaaaaagccgctgccgcatctggcgtcgatgacctgttgggcgatttaagctccggtaagaatgcgccgaaaaccggcggcggagcggcaggaagcaatgcttctcctgcggggagtggtaatactaaaaacaatggcgcatcaggcgcggatatcagcaattatgccgggcagattaaatcggccattgaaagtaagttttacgacgcatcgtcctatgcaggtaagacctgtacgctgcgtataaaactggcgccagacggcctgttgctggatattcagtctgaaggtggcgatcccgcgctttgtcaggcagcgcttgctgcggcccgacaggcgaagattccaaaaccaccaagccaggcggtatacgaagtgtttaaaaacgcacctctggactttaaaccgtaa

SEQ ID NO: 71320 - DNA, 429 bp, Citrobacter koseri
atggccagaacgcgtggacgaggtcgtcgcgatctcaagtccgaaatcaacattgtaccgttgctcgacgtactgttggtgctgttgctgattttcatggcgacggcgccgatcattacccagagtgtggaagtcgatctgccggacgcgaccgagtcgcaggccgtcagcaccaatgacgatccgccggtcattattgaagtttccggtattgggcaatacagcgtggtggttgagaaagacaggatggatcagttgccgccagagcaggttattgccgaagcgaaaagtcgcctggagtccaatccgaaaacggtcttcttaatcggtggcgcgaaagacgtgccttacgatgaaataattaaagcgctgaacttgttacacagtgcgggcgtgaaatcggttggcttgatgacgcagcctatctga

SEQ ID NO: 71321 - DNA, 693 bp, Citrobacter koseri
gtgactgacatgaatatccttgatttgttcctgaaggcaagccttctggttaaacttatcatgttgattttgattggtttttcaatcgcatcctgggctatcatcatccagcggactcgtattcttaacgctgcggcgcgcgaagcggaagcgttcgaagataaattctggtctggaatcgaactgtctcgcctgtatcaggagagccaggggcgtcgtgatagcctcgcgggttcggaacaaatcttctatagcgggttcaaagagtttgtgcgtctgcatcgtgcaaacaaccatgcgccggaagcggttgttgagggggcgtctcgtgcgatgcgtatctccatgaaccgtgagctggaaacattagagacgcacattcctttcctcggcaccgtgggttccatcagtccgtatattggtctgtttggtacggtatgggggattatgcacgcgtttatcgccctcggtgcggtgaaacaggcgacgctgcaaatggtggcgccgggtatcgcggaagcgctgattgcaacggctatcggtctgtttgcggcgattccagcggttatggcctacaaccgcctgaatcagcgcgtgaacaaactggaactgaattacgacaactttatggaagagttcaccgccattctgcaccgtcaggcgtttaccagtagcgagagcaacaaggggtaa

SEQ ID NO: 71322 - DNA, 399 bp, Citrobacter koseri
gtgaatatatttcgatggccggttcgtgtctattatgaggataccgacgccggtggtgtggtttaccacgccagttacgtcgctttttatgaaagagcacgcacagagatgctgcgtcatcatcacttcagtcagcaggtgctgttggctgaacgggttgctttcgtggtgcgtaaaatgacgctggaatattatgcgcctgcgcgactcgacgatatgctcgaagtccaaactgaaattacgtcaatgcgtggcacctctttggttttcacgcaacgcattgtcaacgcagagaacaacgtgctcaacgaagcggaagttctgattgtttgcgttgatccactcaaaatgaagcctcgtgcgcttcccaagtctattgtcgcggagtttaagcagtga

SEQ ID NO: 71323 - DNA, 294 bp, Citrobacter koseri
atgaccagtattatcgcaacgttgtatgcggtaatggataagcgcccattacgggcgctttcctttatgctggcgttagtgttagcaggctgcatcttctgggacccgacgcgtttcgcggcgaaaacaagcgagctggaaatctggcatggttttctgctgatgtgggccgtctgtacgggcgtgattcatggcgtaggatttcgtcctcgcgccgttcactggcagggggtcttttgcccgctgctcgccgatatcgtgcttattgttggtctgatttttttcttcttttga

SEQ ID NO: 71324 - DNA, 1140 bp, Citrobacter koseri
atgatcgattatgaagtattgcgttttatctggtggctgctggttggcattctgctgatcggttttgcggttaccgatggcttcgacatgggggtgggcatgctcacccgtttcctcggtcgtaacgacaccgagcgtcgaattatgatcaactccatcgccccgcactgggacggtaaccaggtgtggctgatcaccgccggtggcgcgctgttcgccgcctggccgatggtttacgctgcggcgttttccggtttctatgtggcgatgatcctcgtgctggcgtccttgttcttccgtccggttggttttgactaccgttccaagattgaagacacccgctggcgcaacatgtgggactggggcatcttcgtggggagctttgtgccgccgctggttatcggcgtggcgttcggcaacctgttgcagggcgtaccgttccatatcgacgagtatctgcgtctgtactacaccggtaacttcttccagctgctgaacccgtttggcctgctggcaggtatcgtcagcgtagggatgatcattacccagggcgcaacctatctgcaaatgcgtaccgtgggtgagctgcacctgcgttcccgcacgacggcacaggtagccgcgctggttacgctggtgtgcttcgcgctggcgggcgtatgggtggtttacggtattgatggttatgtcgtgacttccgcgatggatcatcacgccgcatctaacccgctgaccaaagaggtcgcgcgtgaagccggtgcgtggatggtgaacttcaacagtacgccgatcctgtggctggttccggcgctgggcgtggttctgccgctgctgactatcctgacctcccgtatggagaaaggagcatgggcattcctgttctcttctctgaccctggcctgcatcatcctgactgccggtatcgcaatgttcccgtttgtgatgccttccagcaccatgatgaatgcgagcctgaccatgtgggatgcgacctccagccagagaacgctgaacctgatgacctgggttgcgttggtgtttgtaccgatcattctgatctacaccagctggtgttactggaaaatgttcggccgcatcactaaagaacatattgaaagcaacacccactctctgtactaa

SEQ ID NO: 71325 - DNA, 1569 bp, Citrobacter koseri
atgttagatatagtcgaactgtcgcgcttacagtttgccttgaccgcgatgtaccacttcctgtttgtgccgctgacgctcggtatggcgttcctgctggccattatggaaacggtatacgtcctttccggcaaacagatttataaagatatgaccaagttctggggcaagttgtttggtatcaacttcgctctgggtgtggctaccggtctgaccatggagttccagttcgggactaactggtcttactattcccactatgtaggggatatcttcggtgcgccgctggcaatcgaaggtttgatggccttcttcctcgaatccacctttgtaggtctgttcttctttggctgggaccgtctgggcaaagtccagcatatgtgtgtcacctggctggtggcgctgggttccaacctgtctgcgctgtggatacttgtggcgaacggctggatgcagaaccctatcgcatcggatttcaacttcgaaaccatgcgtatggagatggtgagcttctccgaactggtgcttaacccggttgcgcaggtgaaattcgttcacactgtggcgtctggctatgtgaccggtgcaatgttcatcctcggtatcagtgcttactacctgctgaaaggccgcgacatcgcgttcgctaaacgctcctttgctatcgccgccagcttcgggatggctgctgtgctgtctgttatcgtgctgggtgacgaatccggctacgaaatgggcgacgtgcagaaaaccaaactcgccgcgattgaagcggaatgggaaacccagccagcgcctgcttccttcaccctgttcggtatcccggatcaggagacgcaggaaaacaaactggctatccagatcccttacgcgctgggtattatcgcgactcgctccgtcgatacgccggtcatcggtctgaaagacctgatggtgcagcatgaagaacgtatccgtagcgggatgaaagcctacgcgctgctggaagaactgcgtgccggttctaccgaccaggccgttcgcgaccagttcaataacgtgaagaaagatctgggctacggtctgctgcttaaacgctatacgccgaacgtcactgacgcgaccgaagcgcaaattgagatggcgaccaaagactccatcccacgcgttgcgccgctgtactttgcgttccgtatcatggttgcgtgcggcttcctgctgctggcgatcatcgcgctctccttctggagcgtcattcgtaaccgcatcggtgagaaaaaatggctgctgcgcgcggcgctgtacggcatcccgctgccgtggattgctgtagaagcaggctggttcgttgccgaatatggtcgtcagccgtgggcgatcggtgaggtgctgccaaccgccgtggcgaactcgtcactgacggtcggtgacctgctgttctccatgatcctgatttgcggcctgtataccctgttcctggtggcggagctgtacttaatgttcaagtttgcacgccgtggcccaagcagcctgaaaaccggtcgctatcactttgagcagcccaatgtggcctctcagccggcacgctaa

SEQ ID NO: 71326 - DNA, 2634 bp, Citrobacter koseri
atgaaagcagtatctcgcgttcacattacgccgcacatgcactgggatcgtgaatggtatttcaccacggaagcgtcacgtattttgctggtcaacaatatggaggagatcctgacccgcctggagcaggatgcagagtataaatactatgtccttgacgggcagacggcggtgctggaggactatttcgccgtcaaagcggaaaataaagcgcgggtaagaaaactggtgcaggccggaaaactgattatcggcccgtggtatacccaaacggataccacgctggtatccggggagtcgatcgtgcgtaatctgatgtacggtatgcgcgactgcctggcgtttggcgaaccgatgaaaattggctatctgccggattcgttcggcatgtcggggcagcttccgcatatctataacggtttcggtattacccgcgccatgttctggcgtggttgttcggaacgccacggcaccgataaaaccgagtttttatggcaaagcgcggatggcagtgaagtgacggcgcaggtgctgccgctgggctacgcgattggtaagtacttaccggaggacgaggccgggctgcgtaaacgtctcgacagctacttcgatgtgctggagcgcgcgtcgctgaccaaagaaattttgttgccgaatggtcacgatcagatgccgttgcagcaaaatatctttgcggtaatggataaactgcgcgaaatctacccgcagcgtaagtttgtgatgagccgctttgaagaggtgtttgaacacatagaagcccgccgcgagcagcttgccacgctgaaaggcgagtttattgatggcaaatatatgcgcgttcatcgcaccattggttcgacgcggatggacatcaaaatcgcccatgcgcgcattgagaacaaaatcgtcaacattcttgagccgctggcgacgctggcctggacgctggggtttgagtatcaccacggcctgctggagaaaatgtggaaagagattctgaagaatcacgcccacgacagcatcggctgctgttgcagtgacaaagtacaccgcgaaattgcctcccgtttcgagctggctgaggatatggccgacaacctgatctgtttttatcagcgcaaaatcgccgacaacatgccgcagagcgatgccgacaaactggtgctgtttaacctgatgccgtggccgcgtgaagaggtgattaacaccacggtacgcctgcgcgccagccagttctctctgcgggatgatcggggcaacgccattccttattgcattcgccatgcccgggagatcgatcccggtttaatcgaccgccagattgttcattacggtaactacgagccgttcatggaatttgatatccagatccagcagattatcccttcaatgggctatcgcacgctttatatcgaaccgaacgcagcgggcaatgtggtgagcccgacggtttcatcagacgcgctgctggagaacgcgttctggcagattacggcgaatgatgacggtacgctgaacctgcgcgataaagacagcggcgtgcattatcagcgcatactggcgctggaagagggggccgacgatggcgatgagtacgattactcccccgccagagaagagtggctgcttacttcgacgacggcaaaaccggaatatgaagtgattcatgacgcgtggcagagcagggttgtcattcgctatgccctggcggttccggcgaatcttgccgaacgcagcgcgcggcagcgcaacggaacgttaggcgtggagatcgccgtcaccctgagccataacagcagacgcattgatgttgaggtggcgctggataatcaggctgacgatcaccgcgtgcgggtgttaatccccacgccgttcacgacggatgttgtgctggcggacacccagtttggcgcagtgacgcgtccggtacaggacagtgcgatggaaaactggcaggaagaggggtggaaagaggcgccggtgccggtctggaatatgctgaactatgcggcgcttcaggaagagagaaatggccttgcgcttttcacggagggattacgtgaatttgaagttatcggcgaagggaagaaaacgttcgccttgacgctcctgcgtggggtggggctgctggggaaagaggatctactgctgcgaccagggcggccttccggcatcaaaatggcggtgccggattcacaaatgtgcggaatgctacgcagtcggtttagcctgttcagctatagcggaacgccttttagcgccggtgtcgcgcaacaggcgaaggcgtggctgacgcctgttcagtgctataacaaaattccctgggatgcgatgaaactcaacaaggccgatgtttgcgtaccggaacattacagcctgttaacgatgtcgccggtgggctgcctgttaagcgcgctgaaaaaagcagaggatcgcgatgatgtcatcctgcgcctgtacaatccgtccgaaacaacctcatgtgatgccaccgttgccttcggcagagccgttagcgcatgtacagagaccatgatggatgaacaggcgtgccctgcgaaaggagagggcgcaagtggggctggcctctttctgccggggcagtcccgaacgtttagctacacgcttgcctga

SEQ ID NO: 71327 - DNA, 1917 bp, Citrobacter koseri
atgaacctgacgacgttaacccaccgcgatgcgttatgcctgaacgcccggtttggcagtcgtgaagaggctattcacgcgttaacccagcggctcgtgcaactggggaaaatttcagattccgatgcttaccttgaagaagtctttttgcgtgaaagccaggggccaacggcgttgggagaagggctggcggtgccgcatggtaaaacgtcggcggttaaagaagcggcatttgccgtggccaccctgcgcgaacccatgatgtgggaaggggttgacgggccggaagcggtgacgctgatttttctgctcgccattccgccaggcgaagcgggaagcacccatatgcagttgctgaccgcactcaccacgcgactggcggatgatgacacccgcgcgaggattctggctgcgaccacggcggatgagctactgtcggcgctggatgaccaatatcaggaaagcgcttttcagcccttacaggatgcgccgaccatcgtctgcgtaacggcgtgcccggcggggattgcgcacacctatatggcggcggagtatctggaaaaagcgggacgcaaactgggcgtgaacgtgtatgtggaaaagcagggcgctaacggaattgaaggccgtcttaccgcacagcagctgaacgcggcaaaagcctgcattttcgccgcagaggtggcgataaaagagagtgagcgctttgcgggcattcctgcgctgtcggtgcccgtcgccgaacctatccgccacgccgaagcattgatccaacaagcgctggcgctggaacccgcgcagggcgatcgcgcggtttaccaggaaacggcagcgcctaagcgtctgaaaacggagttaaaacaggcgctgttgagcggcatctcgttcgccgtgccgctgattgtcgccgggggaaccgtactggccgtgtcggtgctgctggcgcaaatgctcggcttgcagcatctcttcgatcaggagaactcctggctgtggatgtaccgcaagctgggcggtgggatgctcggcatcctgatggtgccggtgctcgccgcttataccgcctattcgctggcggataaacccgcgctggctcccggattcgccgccggccttgccgccaatatgattggctccggctttctcggcgcgatcgcgggtggcttgatcgccggatatctgatgcgctgggtgaaaaaccatcttcgcctgagcagcaaattcaacggcttcctgaccttctatctgtatccggtcatcggcaccttaggcgcgggcagcctgatgctgtttgtggtgggcgagcccgttgcgtggatcaacaacgcgctgagcgcctggcttaatgggctgagcggcgccaatgcgctgctgcttggcgcgattctcggctttatgtgttctttcgatttgggcgggccggtcaataaagcgtcttacgcgttctgccttggggcgatggcgaacggcgtctacggcccgtatgccattttcgcctcggtcaaaatggtgtccgccttcaccgtaacggcatcaacgatgctggcgccgaggctgttcaaagagtttgagatcgaaacaggaaagtcgacctggctactggggctggcaggcattacggaaggggcaatcccgatggcgattgaagatccgctgcgggttatcggttcttttgttctggggtcaatggtgacgggcgcgattgttggcgcgatgaacattggtctttcgacgccgggtgcaggcattttttcactctttcttttgcatgacgccggatacggcggtttcgtcgccgccgcaggctggtttggcgcagcgttagtggggacagcgatatcgaccactatcctgctgttctggcgtcgtcatgcggtaaagcagggcaagtatctgactaacaatgtgttgccataa

SEQ ID NO: 71328 - DNA, 720 bp, Citrobacter koseri
atgagccaaaaaccgttataccgacagattgctgaccgaatccgcgagcagattgaacgtggcgaactgaaagcaggcgacgcgttacccaccgagcaggcattgcagcatgcgtttggcgtgagccgggtcacggtacgtcaggcgctcaagcaactgactgaacagcagatcatcgaaagcattcagggcagcgggacctatgtgaaagaagagcgggtcaattacgacatttaccagttaaccagcttttacgaaaaactcgccgatcgccatgttgacacccacagtgacgttttggtttttgaagtgatcccggcggacgactttctgcgcaaccagttacaactggcggagaacaaccgggtctggcacgtaaaacgcgtgcgttacattaagcaaaaacccgtcgccctcgaagagacatggatgccgctggcgctctttcccgacctgacctggcaggtgatggaaaattccaagtatcactttattgaagaggtgaagcagatggtcattgatcgcagcgagcaggagctgatcccaatcatgccaaccgaagaaatgagccgcacgctggcgatcagcgcaaacaaaccgatcctggagaaagtctcccgcggattcctgaaagacggtcaggtatttgaatatagccgtaatgcgtttaataccgatgattataaatttacgttgatcgcgcgcagaaaacagcgctga

SEQ ID NO: 71329 - DNA, 450 bp, Citrobacter koseri
atgaaaaaatcaacacttgttattggcgtcattggtgctgactgccatgcagtaggcaataaagttttggatcgcgtttttactgcccatgattttcgcgtaatcaatctgggggtcatggtaagccaggatgaatatattgatgccgcaatcgaaaccggcgccgatgcgattgtcgtgtcatccatttacggccacggcgatatcgactgcctcggtttacgtgaacgctgcatcgaacgcggtattggtgacattctgctctatgtcggcggtaatctggtggtgggtaaacatgactttgccgacgtggaagcgaagtttaaagagatgggctttaaccgcgtctttgcgccaagtcatgatctggaagatgtgtgccggttaatggccggggacattaacccgcgtcatggtgttgaacagcgctgccttgaagaggccatctga

SEQ ID NO: 71330 - DNA, 1389 bp, Citrobacter koseri
atgcaaatcgtctctgtcgatatcggctcgacatggaccaaagccgccctcttcgccagggagggggatgcgttaaccctggtgaaccatgtcctgacgccaaccaccacataccatctggcagacggtttttttgccagtctgaatcaggtgctgaatgtcgccgatgcccgtccgttgctgaaaagcggcgaagtgcagttgaaatactcctcatcggcaaaaggcgggctcgccgtcgccgctatggggctggtgccgtctatcacgctggaatccgcaaaagttactgcccactcagcgggggcgaagatcgcgcaatattacgcgtataagctcaaccgccatgacatccaggcgttagaaaactcgccgccggacatcctgctgtttaccggcggtacggatggcggcgaagaaagctacggcctggcgaatgcgcgcgcgctggcggactcaaatctggattgcgcgattatttatgccggaaaccgtgacattcaggatgaggtacaggccattctggggcacaaagatctgaccacggtagacaacattctgcccgacctcgatcacccgaatccgtatgccgcccgccaggccatttgcgatctgttcctgtcccgcatcgtgaaaggcaaagggctggacgtgattgttagcgaaaccggcgaagagccgatgccaacgccgtggaccgtctacgagctggttaaagccatcagcgacatcgacagcgcatggaaagagttcatgctgatcgatatgggcggcgccaccaccgacgtgtactccgcctgcgccaatatgctctctcccgataccgtgctgcatggcgtgccggaaccgttcgtcaaacgcaccgttgaaggcgatctcgggatgcgcgtctctgcccttgtggtcggagaaagcacccaggagatggtaaacgtcgtgtttgcccaacagcctgagcgtcaggaggcgttctacggctatctgcgccacctggtttcccaccccgattaccttccccgcagcgacgaagagaaattcttcgacgccctgctggcagggctgtgcgtgggttatgccagcgaacgtcacgcgggcaccaaaaagcaggtctgcacctgcgtgggcaacgtcgacttacagatggggcgcgacctcaccaccgttcgcaaagttgtcggttccggcggatggctctcccgcgccagtcagttcgacatccatcgctggttgaaataccgcgagctggacgatgacggcagacgcattctcttacccgggcagtttgactattaccgcgattcaaaaggcttgcttcctctgctggcgaacgtcgccaggctgtacccgcagctcgccgctcgcaccagtattcaatgtttaaccctataa

SEQ ID NO: 71331 - DNA, 1446 bp, Citrobacter koseri
atggaactccgaaataaaaaattaacccatgacgaattcatgaccgagcggcatcaggtattgcaaacctggcataccggcaaggacgtcgagaattttgaagatggcgtgaagtatcagcaaaccattccagagaaaaaacgcttttctcacgccctgttaaaagccgatcaggaaggcaaaacgctcagccagccgcgcgcgggcgtggcgctgatggatgaacacatcgcgctgctcaaaacgttgcaggaagagtgcgatctgcttcccagcaccatcgatgcctatacccgtctgaaccgttacgaagaagcggcgatcggtattcaaaaatccatcgaagcaggcacctctaagctgaacggcctgccggttgtcaaccacggcgttgctgcctgccgccggatgacggaagcgctggaaaaacccattcaggttcgtcacggtacgccggatgcgcgactgctggcggaaatcgcgatggccagcggcttcaccagctacgaaggcggcggcatctcctacaacattccttacgccaagcgcgtcacgctggaaaaatcaatccgcgactggcagtactgtgaccgtctgatgggaatgtatgaagagcacggcatccgtattaaccgcgagccgttcggcccgctgaccggcacgctgatcccgccgtttatgtcccacgcggtcgccatcatcgaaggtctgctggcgctggaacagggcgtgaagtcgattaccgtcggctatggccaggtgggcagcctgacgcaggatatcgccgccattcagtcactgcgcgaactgtcccacgaatatttccagaactacggctttgatgattacgaactgagcaccgtcttccaccagtggatgggcggcttcccggaagatgaatccaaagcgttcgccattatctcctggggcgcggcggtggcgggtatgtccggcgcgaccaaagtgatcaccaagagtccgcacgaagccttcggtatcccaacagccgccgcaaacgcccaggggcttaaagcctctcgccagatgctcaatatggtcagcgaccagaagttcccgccgtgcgcggccgtggaacaggaagtcgaactgattaagtgcgaagtccgtgcggtgctgaaaaaagtctttgagctgggtaacggcgatgtggcgcgcggcacggtgctggcttttgaagccggcgtgctggacgtacctttcgccccggcctcctgtaacgcaggcaaaatcctgccggttcgcgataactccggcgccattcgcatccttgaagccggtgcggttccgctgccgaaagatatcctcgccctgcaccacgattacgtcgctgagcgcgcccattttgaaggacgcaagccctcattccagatggttgttgatgacatcaacgcggtatcccacagtcaattaataggaagaccataa

SEQ ID NO: 71332 - DNA, 1242 bp, Citrobacter koseri
atgaaaattaaacaggcccttttcaccgctggctactcctcattctatttcgacgatcagcaggcgattaaaaacggcgcgggtcatgatggattcatttataccggcgcgccggtcacgcccggctttacctctgtgcgtcaggcgggcgagtgcatctcggtacagctgattctggaaaatggcgcggtagcggtcggtgactgcgccgccgtgcagtattccggcgctggcggtcgtgacccgctgttcctggcggagcactttattccgttcctgaacgatcacattaaaccgctgctggaaggtcgtgatgtcgatgcattcctgccgaacgcccgcttcttcgacaagctgcgcattgacggcaatctgctgcacaccgccgtgcgttacggcctgtcgcaggcgctgctcgacgccaccgcgctggcgtccggtcgtctgaaagcagaagtggtttgcgatgaatggcagttgccgtgcgtcccggaagcgattccgttatttggtcagagcggcgacgatcgctatatcgccgtcgataagatgatcctcaaaggcgttgacgtgctgccgcatgcgctgatcaacaacgtggaagagaaactgggctttcagggcgagaaactgcgtgagtatgtacgctggctgtccgatcgcatcctgagcctgcgcaccagcccacgctatcacccgacgctgcatattgatgtctacggcaccatcggcctgatcttcgatatggacccggtacgctgcgcggagtacatcgccagcctggagaaagaagcgcagggtctgccgttgtacattgaaggcccggtggatgccggtaacaaaccggatcagatccgtctgctgaccgccatcaccaaagagctgacccgcctcggttccggcgtgaaaattgtcgctgacgaatggtgtaacacctatcaggacatcgtcgatttcactgacgcgggcagttgccacatggtgcagatcaaaaccccggatctcggcggcattcacaacatcgttgacgccgtgctctattgcaacaaacacgggatggaagcctatcagggcggcacctgtaacgaaaccgagatcagcgcccgcacctgcgtacatgtcgcgctggccgcgcgcccgatgcggatgctggtgaaaccgggtatgggcttcgatgaaggtctcaacatcgtgtttaacgagatgaaccgtaccatcgcgctgttgcagacaaaggattga

SEQ ID NO: 71333 - DNA, 1371 bp, Citrobacter koseri
atggcacgcacatttaagatcttatcgccgacggccattctgggctatggcttcccggaagagagctttcgcaaagcaatggaggagtcgccggatctgatcgccgttgacgccggttcctccgatcctggcccccactacctgggggcagggaaaccctttaccgacagggcgggagtgaaacgcgatctgcgctatatgatcaccgcaggcgtaaaaaacgacatcccggtggtgatcggcactgccggaggctccggcgcggcgccgcatctggagtggtgtcgccagataatccttgagattgcgcaggaagagaaactgtcgttctcgatggcgcttatcccgtcagatgttgataaagcgatcgttcaccaggcgctggataacggcaaaatcaccgcgctggatttcgtcccggaactgacccacgacgcgatcgaccaaagcacctatatcgtcgcacaaatgggcatcgaacctttccagcgggcgctgaaagccggtgcgcaggtggtgctgggcggacgcgcttacgatccggcctgcttcgcggcgctgccgatcatgcagggctttgatgaaggtctggcgctgcactgcggcaagatccttgagtgcgcggccatcgccgcgacgccgggttccggttccgactgcgcgatggggatcattgacgataacggctttacgcttaaaacgttcaatccaaagcgcaagttcaccgaaacctctgcggcggcgcacaccctgtatgagaaatccgatccgtactacttgccggggccgggcggcgtgctgaatctgaaagggtgcagcttcaaagcggtcaacgagggcgaggtctacgtcagcggttcccgtcacgaagagacgccgtacgcgctgaagctggaaggcgcacgtcaggtgggcttccgctgtctgaccatcgccgggacgcgcgacccgatcatgattgccagcattgacaccattctcgaagaggtgaagaccagcgtggcgcgtaacctctcgctgaatgatgacagcatccgcatgacgttccacctgtacggtaagaacggggtgatgggcaatcacgaaccgatgcagagcgccgggcacgaactgggcatattgctcgacgtggtcgcgccgacgcaggatatcgccaacagcgtctgttcgctggtgcgttccaccctcctgcactacggctatgaaaaccggattgcgacggcgggcaacctcgccttcccattctcgccttccgacattcaaagcgggccagtgtatgagttttcaatctatcacctgattgaagcgagcgacgcgctgcaatttgatttccacctcgaacaggtgacgccggaaggagttcaggcatga

SEQ ID NO: 71334 - DNA, 318 bp, Citrobacter koseri
atgaaacactctatttgctcactggcgcaggtgattcgttccaaaaacgccggaccgtacgaactggttttagatattttgtttaaaacccgggaagactatcagcgggtaaaagcatcggaacaattaacgccgcagcttattgcccgtttatataacgtcgagcctgattttattcatcgcattgtctggtttgatccggcaaatgcggtaaaaattgtcatgccgcgcgatattatttccggcaacgttggtgacaatgatgtttatggcgcgcagcaacacgcgccgctattaagtattaccttcgacttgtag

SEQ ID NO: 71335 - DNA, 1308 bp, Citrobacter koseri
atgaaaaaaataagtttaaccaaaatgatcatattaggcctgatactcggcatgattgccggggtggtcattaataatatggcatcggctgaaacagcaaaatcgtacgcccaggacatctctatttttaccaccatatttttgcgcatggtaaaaatgattattgcccccctggttatttcaacgttagtggtggggatcgccaaaatgggcgatgccaaaacgctggggcgtatattctctaaaacctttttcctgtttatttgcgcctcattgttgtctattgcgttgggtctggtcatcgtcaatatgttccagccaggcgcaggcattaactttgtggcacacgacgctggcgcggttgccgccgtgcagtctgaacccttcacgctgaaagtctttatctcgcacgccgtgcccaccagcattatcgatgcgatggcgcgcaacgagatcctgcaaattgtggtgttctccattttcctcggttgcagcctggccgctgttggtgaaaaaggcgccgccatcgttaaagtgctcgactcgctggtgcacgtcatgctgaagctgacaggttacgtgatgctgtttgcgccgctgaccgtctttgccgccatctccggtttgattgctgaacgcggtctgggcgtgatggtcagcgccgggatcttcatgggcgagttctacctgacgctggggatgctgtgggcgatcctgattggcctgtcgacaatgattgtcgggccgtgcatcagtcgtctgaccaaagcaatcttcgaacccgcgctgctggcctttaccacgtccagctcggaagcggctttccccggtacgctggacaaactggagaagtttggcgtctcttccaagattgccagcttcgtactgcctatcggttactcctttaacctcgtcggctcaatggcctactgctcgtttgccaccgtgtttatcgcccaggcgtgcaacattgaactgagcatgggcgagcagatcaccatgctgctgattctgatgctgacctccaaaggaatggcaggcgtgccgcgtgcgtcaatggtggttatcgccgctaccctcaaccagttcaacattccagaagccggtctgatcctgctgatgggcgtcgatccgttcctcgatatgggccgttctgccaccaacgtgatgagtaatgcgatgggtgcggcgattgtcggtcgttgggaaggcgagcacttcggcgcaggctgccgtggcaaagcgccggtcaaaaccccggaacaggagcgcccggcaaccgaacactcagaagtggcgatgtcctga

SEQ ID NO: 71336 - DNA, 1653 bp, Citrobacter koseri
atgtctaaaccatttgtctggcaggaaccgtttgttcaaagcaaagatacgacggaatatgaattactcagcgacaagcacattacggtaacggagttagacggtgaagaggttatcaaagtcgcgcctgaagcgctgactctgctggcccaacaggcattttatgaagcctcgtttttcctgcgcaccgcgcatctaaagcagattgccagcatcctgcacgatccgcaggccagcagtaatgataagtacgtcgcgctgcaactgttacgcaatgccgaagtctcggcgaaaggcgtactgccaaactgccaggacacaggaacggcaaccattgtggcgagcaaaggtcagcacgtctggacaggcggcaacgatgccgaagccctgagcaaaggcgtgtacatcactttccaggaaaataacttacgctactcccagaacgccccgctggacatgtacaccgaggtaaatacccaaaccaacctgcccgcccagattgatatcagcgcgacgccgggtgacgaataccggtttctcttcgtcaataaaggcggcggttccgccaacaaagcggcgctgtttcaggaaaccaaatctattctgcaacccgaaaaactcaccgctttcctgatcgaaaaaatgcgttcgctgggaacagcagcctgcccgccctaccatatcgcttttgtggttggcggattgtctgccgaccaggcgctgaaagtggcgaagctggcctcaaccaaatattacgacaccctgccgaccagcggaaacgagctgggccaggcgtttcgcgacacggcgctggaaacaaccctgctcaatgccagccgcgagtttggcatcggagcacagtttggcggcaaatatttcgctcatgatatccgcgttatccgcctgccgcgtcacggcggctcctgccccatcgcaatggcgctctcctgctctgccgaccgcaatattaaagcgaaaatcaacaagcgcggcatctggctggaaaaactcgaacacaatccgggaaaatttattcctgaatccctgcgcgtggaaaacagcgcccagaccgtacagctcgatctcaaccgtccgctgcgcgagatcctgcataacctttccacgctgcctgtcggcacccgactgtcgctgaacggcccgattgtcgtcgcccgcgatatcgcgcacgccaaaattaaagagcgtctggataacggcgaactgatgccagactacatgaaaaatcacattgtttattacgcggggccagccaaaacgccggaaaaacaggcctgcggctcgctcggcccgaccaccggcgggcgcatggacggctatgttgacgccttccaggcggcgggcggcagtttgatcatgctttcgaaaggcaaccgcagtcagcaagtgaccgaggcctgccacaagcatggcggcttcaatcttggcagcattggcggcgccgccgcgcttctggcgcagcagtacgttaaaagcttacgctgccttgagtatcccgaactggggatggaagccgtgtggatgatggaggtcaaaaacctgcccgcctttgtgctggtggatgataaaggcaataacttcttcagccagtttgagcagcaacatcgctgcgcgacctgtccggcaggacattaa

SEQ ID NO: 71337 - DNA, 603 bp, Citrobacter koseri
atggaagcgcgagccaatactgacaggcaccgccagcggcagcaaaaactgaaagaacaggtggacacccgtgtggcggcggccacggaacagaaaggagtcctgattgttttcaccgggaacggtaaaggaaaatcgacggcggcctttggcaccgcgacccgcgcggtcggtcacggcaaaaccgttggcgtcgcgcaatttatcaaaggtcagtgggataacggtgaatacaacacgctgcaaccgctgggcgttgagtttcacattatgggcaccggttttacctgggagacgcaggaccgggaagcggatatacaagcggcggaagccgtctggcaggaaggaaggcgcatgctcgccgacccgcgttacgatctggtggtgctggatgaactgacatacatgctggcttatcactacctggacacccaggacgtgatcgccgcgattgtgaatcgtcccgaacagcagagcgtgatcgttaccggtcgcgggtgtcatacgcagttactggaactcgccgatacggttagcgaagtccgcccggtgaagcatgcattcgatagcggcatccaggcgcaggcggggatagactggtag

SEQ ID NO: 71338 - DNA, 909 bp, Citrobacter koseri
atgagaggaaagatacccaagaccgaattactggtgacttttgaagtggtggcgcgtcacgaaagctatacccgggcagcagaagagttggcgttgactcagagtgccgtgttccggcaggtgaatgcgctggaggattttttacatacctcgttatttaaccatgccaaaaagcgaatttttttaaatgcagccggtaagcattatctgagcattgttaaagaaacacttaacaaacttgaacgcgataccaatacgataatgacctggcaacccaccgttcaggtcattgagctggcggtgaacccaacgttcagtacccactggctgattccgaatttacgtgaatttaataaaataaatcctgacattatcgttaatattcattcgctggcgaatattggcgattttcttaaccgtgagtatgacgccgccattatgcgggaagatttttgctcgccctggtcagaggtggagtatttatttgaagaggaaattttacccgtatgcagtggcagccttttacctcagccgaatcaaaaactgaccgtagaagagttgctcaatgaatttccccttttgcatcaaagtacgcgcatcaaaggctggcaggaatggttcgcgctgtcggatatcaacagtccgctggtgaataaaggcccgcgctttgatttattgtcgatgctgattgccgccgtgcgttctaatctgggcgtggcgctattgccccggtttgcgatccagcacgatctggataacggtgagatggtgattccctgcgatgtgccgatgcgtacagggaaccggtttattatgacgtggcgcgaagaaaaagcggaatcccggtatttacagatcttccgtgactggctgctgcaaaaatcggtaatctcagcggtggagcgctga

SEQ ID NO: 71339 - DNA, 870 bp, Citrobacter koseri
atgtctgttttaatcgataaaaacaccaaggttatctgccagggctttaccggtagccaggggactttccactctgaacaggcgattgcttacggcacgcagatggtgggcggcgtaacgccaggcaaaggcggctccacgcatctgggtctgccggtgttcaataccgtgcgtgaagcggtagaggccactggcgccaccgcaacggttatctacgttccggcgccgttctgcaaagactccattctggaggctgtcgacgcgggcatcaaactgattatcaccatcactgaaggcatcccgacgctggatatgctgaccgtgaaagtcgcgcttgacgaagcgggcgtgcgcatgatcgggccgaactgcccgggcgtgatcacccctggcgagtgcaaaatcggcatcatgccgggccacatccacaagccgggcaaagtgggcatcgtgtcccgctccggtacgctgacctatgaagcggttaagcagaccactgactacggtttcggccagtccacctgtgtgggcatcggcggcgacccgatcccgggctctaacttcatcgatatcctgaaactgttccaggaagatccgcagactgaagcgatcgtgatgatcggtgagatcggcggtagcgcggaagaagaggcggcggcatacatcaaagaacacgtaaccaagccggttgttggttacatcgcgggcgtcaccgcgccgaaaggcaagcgtatgggtcacgcgggcgcgattatcgcgggtggtaaaggtacggcggatgagaaattcgccgcgctggaagccgcaggcgtgaaaaccgttcgtagcctggcggatatcggcgaagcgctgaaagccgtaatgaagtaa

SEQ ID NO: 71340 - DNA, 1167 bp, Citrobacter koseri
atgaacttacatgaatatcaggcaaaacaactttttgcccgctatggcttaccggcgccggtgggttatgcctgtactactccgcgtgaagcagaagaagccgcttcaaaaatcggcgcgggtccgtgggtagtaaaatgtcaggttcacgcaggcggccgtggcaaagcgggcggtgtgaaggttgttaacagcaaagaagagattcgcgcgtttgcggaacactggctgggtaaacgcctcgtgacctaccagacagacgctaacggtcaaccggtcaaccagattctggttgaagcggcgaccgatatcgataaagagctgtatcttggcgcggttgttgaccgcagctcccgccgcgtggtctttatggcctccaccgaaggcggcgtggaaatcgaaaaagtggcggaagagaccccgcacctgatccacaaaatcgccctcgatccgctggcgggtccaatgccgtatcagggccgcgaactggcgttcaaactgggtctggaaggtaagcaggttcagcaatttacgaagatctttatgggtctggcgaccattttccttgagcgcgatctggcgctgatcgaaatcaacccgctggtgatcactaagcagggcgatctgatctgtctcgacggcaaactgggcgctgacggcaacgcgctgttccgccagccggatctgcgtgaaatgcgcgaccagtctcaggaagacccgcgtgaagcgcaggcggcgcagtgggaactgaactacgtggcgctggacggcaacatcggctgcatggttaacggcgcaggtctggcgatgggcacgatggacatcgttaaactgcacggcggcgaaccggctaacttcctcgacgtaggcggcggcgcgaccaaagagcgcgtaaccgaagcgttcaaaatcatcctctctgacgacaacgtgaaagcggttctggttaacatcttcggcggcatcgtccgttgcgacctgattgccgacggtatcatcggcgcggtagaagaagtgggtgttagcgtaccggttgtagtacgtctggaaggcaacaacgccgaactcggcgcgaaaaaactggctgacagcggcctgaatattattgcagcgaaaagtctgacggatgcagctcagcaggttgttgccgcagtggaggggaaataa

SEQ ID NO: 71341 - DNA, 1221 bp, Citrobacter koseri
atgagtagcgtagatattcttgttcccgacctgcctgagtccgtagcggacgcaaccgttgcgacctggcacaaaaaaccgggcgatagtgtccagcgtgatgaagtgctggtagaaatcgaaactgacaaagtggtactggaagtaccggcatcggctgacggcattctggatgcggttctggaagatgaaggtacgacggtaacgtctcgccagatcctggggcgcctgcgtgaaggcaacagctccggtaaagagaccagcgccaaatccgaagagaaagcgtctacaccggcgcagcgccagcaggcgtcgctatccgagcagaacaacgatgctctcagcccggcgatccgccgtctgttgggtgaacataacctcgacgccagcgccatcaaaggcacgggcgtaggtggtcgcatcacgcgcgaagatgtggaaaaacatctggcgaaggcaccggcgaaagcggaagccaaagcgccggaagccgcgcctgccgcacagcctgcgcttggcgctcgcagtgaaaaacgcgtcccgatgacccgtctgcgcaagcgcgtagccgagcgtctgctggaagcgaaaaactccaccgcgatgctgaccacgttcaacgaagtcaacatgaagccaatcatggatctgcgtaagcagtacggcgacgcgtttgaaaaacgtcacggcattcgtctgggcttcatgtccttctacgtgaaagcggtggttgaagcgctgaaacgctacccggaagtgaacgcttccattgatggcgacgacgtggtgtatcacaactacttcgacgtcagcatggcggtttccacgccgcgtggtctggtaacgccggtactgcgtgatgtcgataccctcggcatggcggatatcgagaagaaaatcaaagaactggccgtgaaagggcgtgacggtaagctgacggtggacgatctgaccggcggtaacttcaccatcaccaacggtggcgtgttcggctcgctgatgtctaccccgatcatcaacccgccgcagagcgcaatcctcggcatgcatgcgatcaaagatcgtccgatggcggtggatggcaaggttgagatcctgccgatgatgtacctggcgctgtcttacgatcaccgtctgatcgatggtcgtgaatcagtgggcttcctggtcgccattaaagagctgctggaagatccgacgcgtctgctgctggacgtgtag

SEQ ID NO: 71342 - DNA, 2802 bp, Citrobacter koseri
atgcagaacagcgctttgaaagcctggttggactcttcttacctctctggcgcaaaccagagctggatagaacagctctatgaagacttcttaaccgatcctgactcggtagacgctaactggcgttcgacgttccagcagttacctggcaccggagtcaaaccggatcaattccattcaaaaacgcgtgattatttccgtcgtctggcgaaggatgcctcacgttactcttcttcgatttccgaccctgacaccaatacgaagcaggtcaaagtcctgcaacttatcaacgcttatcgtttccgtggtcaccagcatgcgaatctcgatccgctgggactgtgggagcaagaaaacgtggcggatctggacccctctttccacgatctgacagaggccgatttccaggaaagctttaacgtaggttcttttgcgattggcaaagagacgatgaagctgggcgaacttatttccgcgctcaaacaaacatactgcggcccgattggcgccgagtatatgcacatcaccagcaccgaagagaaacgctggattcagcagcgtatcgaatccggccgcgccgccttcagcgcggaagagaaaaaacgcttcctcaacgaactgaccgccgccgaagggctggagcgttatctgggggcgaaattcccgggggcgaaacgcttctcactggaaggcggcgatgcgttaatcccgatgctcaaagagatgatccgccatgcgggcaacagcggcacccgcgaagtggtgctgggtatggcgcaccgtggtcgtctgaacgtgctggtcaacgtgctgggtaaaaaaccgcaggatctgttcgacgaatttgcgggcaaacataaagagcatctcggcaccggcgacgtgaagtaccacatgggcttctcgtctgatatcgaaaccgaaggaggtctggttcatctggcgctggcgtttaacccgtcgcacctggaaatcgtcagcccggtagtgatcggttccgtgcgcgcccgtctggatcgtctggatgagccgagcagcaataaagtgctgccaatcaccattcacggcgacgccgcagtgacgggccagggcgtggttcaggaaaccctgaacatgtccaaggcgcgtggttacgaagtgggcggtacggtgcgtatcgtcatcaacaaccaggtgggctttaccacctccaacccgctggatgcgcgttccaccccatactgcaccgacatcggcaagatggttcaggcgccgattttccacgttaacgcggatgacccggaagcggtggctttcgttacccgtctggcgctggacttccgtaacacctttaaacgcgatgtcttcatcgatctggtgtgctaccgccgtcacggccataacgaagccgacgagccgagcgcaacccagccgctgatgtaccagaaaatcaaaaagcatccgacgccgcgtaaactctacgccgacaagctggaagcggacaaggtcgctacgctggaagacgccactgaaatggtcaacctctaccgcgatgcgctggatgcaggcgaatgcgtggtgaaagagtggcgtccgatgaacatgcactccttcacctggtcgccgtacctcaaccatgaatgggatgagagctacccgaacaaggtggaaatgaagcgtttgcaggaactggctaaacgcatcagcacggtgccggaagcggtagaaatgcagtcgcgcgtcgccaaaatttacggcgatcgtcagtcgatggctgctggcgagaagctgttcgactggggcggcgcggaaacgctggcctacgccacgctggttgatgaggggattccggtgcgtctgtccggcgaggactccggtcgcggcaccttcttccaccgtcatgcggtgattcataaccaggcaaatggttccacgtatacgccgttgcagcacattcataacggtcagggcaccttccgcgtctgggactccgtcctgtctgaagaagcggtgctggcgttcgaatacggctatgcgaccgctgaaccgcgcaccctgaccatctgggaagcgcagttcggcgacttcgccaacggcgcgcaggtggtgatcgatcagttcatctcctccggcgagcagaaatgggggcggatgtgcggcctggtgatgctgctgccgcacggctacgaagggcaggggccggagcactcctccgcgcgtctggaacgttatctgcaactttgcgctgagcagaacatgcaggtttgcgtcccgtccaccccggcgcaggtttaccacatgctgcgtcgtcaggcgctgcgcggtatgcgccgcccgctggttgttatgtcgccgaagtcgctactgcgtcatccgctggcggtctccagcctggacgaactggccaacggcgccttccagccagcgattggcgaggttgatgagctcgatccgcaaggcgtgaagcgcgtggtgatgtgttctggtaaggtttattacgacctgctggaacaacgtcgtaaaaacgatcagaaagatgtcgccattgtgcgcattgaacagctctatccgttcccgcacaaagcggttcaggaagcgctgaaaccgtacgcccacgtacatgattttgtctggtgccaggaagagccgctcaaccagggcgcatggtactgtagtcagcatcatttccgtgaagtgattccatttgggtctgctctgcgttacgcaggtcgcccggcctccgcctctccggcggtagggtatctgtccgttcaccagaaacagcaacaagatctggttaatgacgcgctgaacgtcgattaa

SEQ ID NO: 71343 - DNA, 717 bp, Citrobacter koseri
atgaaactcgagttttcgatttatcgctataacccggatgttgatgacgctccgcgcatgcaggattacaccctggaaggcgaagaagggcgtgacatgatgctgctggatgcgctgatgcaactgaaagagaaagatcccagcctctctttccgtcgctcatgccgtgaaggcgtgtgcggttcagatggcctgaacatgaacggcaaaaacggcctggcgtgtattacgccggtttcggcgctacaccagccgggtaagaagattgttatccgtccgctgcccggtttaccggttatccgcgatttggtggtagacatggggcaattctacgcacaatatgagaagattaagccttacttattgaataatgggcaaaatccacccgctcgtgagcatttacagatgcccgagcagcgtgaaaaactcgatgggctgtatgagtgtattctttgtgcgtgctgttcaacgtcgtgcccgtcgttctggtggaacccggataagtttatcggcccggcaggtctgttagcggcgtatcgtttcctgatcgatagccgtgataccgagaccgacagccgcctggaagacctgagcgatgcattcagcgtattccgctgtcatagcatcatgaactgcgtcagtgtatgtcctaaggggctgaacccgacgcgcgccatcggccatattaagtcgatgttgttgcaacgcagtgcgtaa

SEQ ID NO: 71344 - DNA, 1767 bp, Citrobacter koseri
atgaaactgccagtcagagaatttgatgctgttgttattggcgcaggcggcgcaggtatgcgcgcagcgctgcaaatttcccagagcggccagacctgtgcgctgctctccaaagtcttcccaacccgttcccataccgtatccgcgcaaggtggcatcactgtggcgctcggtaatacccatgaagataactgggaatggcacatgtacgataccgtaaaaggatcggactacatcggcgaccaggacgcgattgaatatatgtgcaaaaccggcccggaagcgattctggaactggagcacatggggctgcctttctcccgtcttgacgatggccgtatctatcagcgtccgttcggcggccagtcgaaaaacttcggcggcgaacaggcggcgcgtaccgcagcagcggctgaccgtaccggtcacgcgctgttgcacacgctgtaccagcagaacctgaaaaaccacaccaccattttttctgaatggtatgcgctggatctggtgaaaaaccaggatggcgcggtagtggggtgtaccgcgctgtgtatcgaaaccggcgaagtggtctacttcaaagcgcgcgcaaccgtgctggcgaccggcggcgcaggccgtatttaccagtccaccactaacgctcatatcaacaccggcgacggcgtgggtatggcgctgcgtgccggtgttccggtgcaggatatggaaatgtggcagttccacccgaccggcattgcgggcgcgggcgtgctggtgacagaaggctgccgtggtgaaggcggttatctgctgaataaacatggcgagcgctttatggagcgctatgccccgaacgcgaaggacctggccggtcgtgacgtggtcgcgcgttctattatgatcgaaatccgtgaaggtcgcggctgcgacggcccgtgggggccgcacgcgaaactgaagctcgatcatctgggtaaagaagtactcgaatcccgtctgccgggtatcctcgaattgtcccgtacctttgcgcacgttgacccggttaaagagccgatcccggttattccaacctgtcactacatgatgggcggtatcccgaccaaagtgaccggtcaggcgctgactgtgaacgagcagggcgaagacgtggtgattcctggcctgttcgcggtgggtgagatcgcctgcgtatccgtacacggcgctaaccgtctgggcggcaactcgctgcttgacctggtggtcttcggacgtgcggccggtctgcatttgcaggagtccatcgccgagcagggcgcgttgcgtgacgccagcgagtctgacattgaggcctctctggaacgtctcaaccgctggaacaacaaccgtgacggcgaagatccggtggttatccgtaaagcgttgcaggaatgcatgcagcacaacttctcggtattccgtgaaggcgacgcgatggcgaaagggcttgagcaactgaaggtgatccgcgaacgtctgaaaaacgcccgtctggatgacacctccagcgagttcaacacccagcgcgtcgagtgtctggagctggacaacctgatggaaacggcttacgcaactgcggtatccgccaacttccgtaccgaaagccgtggcgcgcatagccgcttcgacttcccggatcgcgatgatgaaaactggctgtgccattccctgtatctgccagagacggaatccatgacgcgtcgtagcgtcaatatggaaccgaaactgcgcccggcattcccgccgaagattcgtacttactaa

SEQ ID NO: 71345 - DNA, 348 bp, Citrobacter koseri
atggtaagcaacgcctccgcattaggacgcaatggcgtacatgacttcatcctggtccgtgctaccgctatcgttctgaccctctacatcgtttatatggtgggctttttcgcaataagcggcgagctgacctttgatgtctggagcggtttcttctcatcggcattcaccaaagtcttcaccctgctggcacttttctccatcttgattcatgcctggatcggcatgtggcaggtgttgaccgactacgttaaacctctggccctgcgccttgtgctacagctggcaatcgttgttgcgctggtggtttacgtcatttatggatttgttgtggtgtggggtgtgtaa

SEQ ID NO: 71346 - DNA, 405 bp, Citrobacter koseri
atgtgggcgttattcatgataagaaatgtgaaaaaacaaagacctgtcaatctggatctgacaacgatccggttcccaatcacggcgatagcgtccattctccatcgcgtttctggagtgatcaccttcgtggcggtcgggattctgttgtggttattgggcaccagcctctcttcccctgaaggattccagcaggcatccgccatcatggggagcttctttgttaaatttattatgtggggcatcctcaccgcgctggcgtatcacgtcgtggtcggtattcgtcacatgatgatggattttggctatctggaagaaacattcgaagcgggtaaacgctcagccaaaatctcttttgttatcactgtcgtgctttcacttctcgcaggagtcctcgtatggtaa

SEQ ID NO: 71347 - DNA, 1284 bp, Citrobacter koseri
atggctgatacaaaagcaaaactcaccctaaatggtgactctgctattgaactggatgtgctaaagggcacactcggtcaagacgttattgatattcgtagtctcggctcaaaggggatgttcacttttgatccaggtttcacctctaccgcatcctgcgaatccaaaatcaccttcatcgacggcgacgaaggcattctgttacatcgcggcttcccgattgaccaactggctaccgagtctaactatctggaagtatgttacatcctgctgtacggcgagaaaccgacccaggcagagtacgacgagttcaaaaccaccgtcacacgccataccatgatccatgagcagattacccgtctgttccacggttttcgccgcgactcgcatccgatggccgttatgtgcggcgtcaccggcgcgctggctgcgttttaccacgactcgatggatgtgaataatccgcgtcatcgtgaaatcgccgcgttccgcctgctgtccaaaatgccgacaatggcggcaatgtgttacaagtattctatcggtcaaccgttcgtctacccgcgcaacgacctctcctattccggcaacttcctgaacatgatgttctccacaccgtgcgaaaactatgaagttaacccggtgctggaacgcgcaatggacaggattctgattcttcacgccgatcacgaacagaacgcatcgacgtcaaccgtccgtaccgcaggctcctccggcgcgaacccgttcgcctgcatcgcggcgggcattgcctccctgtggggaccggcgcatggcggcgcgaacgaagcggcgctgaaaatgctggtagaaatcagttctgttaaacacatcccggaatttattcgccgggcaaaagacaagaatgattctttccgcctgatgggcttcggtcaccgtgtttacaaaaactatgacccgcgcgctaccgtcatgcgtgaaacctgccacgaagttctgaaagagctgggcaccaaagatgacctgctggaagtcgcgatggagctggaacacatcgcgctgaacgacccgtactttatcgagaagaaactctacccgaacgtagacttctactccggcatcattctgaaagcgatgggcattccgtcctccatgttcaccgtgatcttcgcgatggcgcgtaccgtgggctggattgcacactggaacgaaatgcacagcgaaggcatgaaaatcgcccgtccgcgtcagctgtacaccggctacgaaaagcgcgatttcaagtctgatattaagcgttaa

SEQ ID NO: 71348 - DNA, 1743 bp, Citrobacter koseri
atgggcgatattatttacctgagaatcacaggtgaagaacaaggaaacatttcggcgggatgtggaacatattcgtcaacaggtaatcgctggcaaaaagggcatgaagacgagatcttcgtattttcgctattcagcgcattgagtaatacaggaaggggtattaaccttcagggactcagattcagcaaattaatcgataaaagcaccccgctattttgtaatgcaatcactaataatgaaaggctgttcattgaaattgatttctggcgaataaacagaacgggccgatgggaacgctattattatattcaactaagaaatgcttctgtaagaagtattcaaacgcatgtggcccttaatgagctggataccgaagagattgcggtatcatatgattatattctttgcaaacacctcattgccaataccgaatttgactacctggcatttcccgctgaatataaccacttgtttatgccgcagcgccctcaaccggtgaatccccccagaccagcggcaataaaaatcacgccccccagccaacatcccccaaaaatcacaccggtctatgctaaatcctgcctgaaagcgaaaggatgtacggacgccgggaatacagaagaaccggcagaaaacttcggccagatggcgatctttgcacaatcttcagtcgatgattgttgcggatatacgcagcccgcggaagcctcagccataccgctggctctgggcggactggcgcaggtgtggggagagtggccgcttagcggtacgctcagtgcgacaagagcgataccttatgtgggagccctggcttccgctctgtatatttcgtccgctggcgaaggcagcgcgcgcgttcccgggcgtgatgaatactggtacgaagagaccctcagacagaaagcgctaaccggaagtaccgccaccacccgggtacgctttttctggggtaccgacactcacggcgcaccgcaggtctatggcgtacatacaggggaaggtaccccctatgaaaacgtccgcgtcgcgaacatggtgtggaatgatgaacatcatcgctatgaatttacgcctgctcacgacatagacgggccgttaatcacctggacaccggaaaaccccgtgaatggtgatttacctaatcacaccggaagcaatgttccaccgcttgatcagccaaccattctggtgacaccaatcccggatggcaaaaatgagtacaccacgcccccgttcccggtgccggatgccgccgattttaacgattatattctggtctttccgaccgattcaggcattcagccgatatatgtttatcttcgtgaagatccgcgcaaacaacccggcacggcaaccggttacggcgaaattttacccgaaaatagtcgttggcttgaggccgccagttctgggctgggagcgccgatacctgcacaggtggcagataagctgcgaggaagaacgtttcgcaactttgaccatttcagagaagaattctggcttgcggtgtcggaatgccctgagcttatgaaggattttaaaccatccaaccaaaccctgataagaatggggttagcaccatatcctattccttcagagcaggtaggcggcagaacgacttttgaacttcatcacttagaagaaatccagcatggcggagaagtgtttaatatggataatataaacattaccactcctcgcttacatataggaatacataaaaatgctaatagataa

SEQ ID NO: 71349 - DNA, 285 bp, Citrobacter koseri
atgctaatagataatggaaaaaaaataagtgattacactgagtcagagttcattgctctactatctaacttttttgagaataaacatgggttaaatgccagggattttggtaaatttatcgatgacctacaactacatgtagtcaaagtcacccagcacccacttggtaatggactgatttttaatacaccaaatgatattgaatgttcacccttgggaatatttaaggaaataaaaaagtggagagcatctcatggcttagagttatttaaagattctaaatga

SEQ ID NO: 71350 - DNA, 444 bp, Citrobacter koseri
atgttcaaaaactgcctgaaagattacactgagtctgaaattttggcgtttttaaatgagttttttgaaaactctaaggaccttaaaggtaatgaagctaacgaaatggaaactaattatattattttggaggaagtctatcacattgaaaatgtaaagagtatttacaatgagttatctactatagattttaccaaaacagtatcagaggaggctattcgactagatgaagatttgtttcaactaacccaaaataatggtgttgccatagacatcggctggtatccctcacttgacgagaaaggtgagtttcttatccaggttatatcggatggcgattgggatcaccctatgataaaaacatcctcaggatgggataagaatgagttaattgaaaagttaaacatagttttagaacagttacctttttgtcttaaaagttga

SEQ ID NO: 71351 - DNA, 294 bp, Citrobacter koseri
atgattcattttaaacaaaaactcgaagactacaccgaagccgaattcatagaattcctgaatgaattttttgaaaatcctggcaatctgaaaggaagagaatttgaatctcacactaataggctagtcaaacacttcgataaaatcgtggttcatcctgaaggtaatggtttgattttttatcccccggatgacagggaggacagcccacaaggcatcattgaagaaataaaaagatggcgtaaatcccagggacttccactatttaaggattctaacaatgcctctacctga

SEQ ID NO: 71352 - DNA, 546 bp, Citrobacter koseri
atgcctctacctgaacgaatgagaccagctaaagtcagtagtaacaagatcaaagaactgtcaaataaagcctggcagatacttgcgaaaatcgatgaaggtgtaaatgaagaagactctgcgttaaaggtaatgattgatgaatggaatagtcaggtagtatgtccctgtacattttcagatttcagagacttttcctcctggactagcgctatagaatttacccgtatcgcttttaaccaggtgcaacagtacgcagattttacatgggatgaattgattcaaacaattgacactgtgtgtcatgccaaaggtaaggagtccgaacaagattttgctctttcgttgctcgaaaaaaattttgacggtaatccatccgatcttattttttggccgaatgaatggttccagaatccagatatgttgcatgttgagttgactactgaagagatcgcgggatatttaatggccagatccggtaggcatttagccgatgcaccaacaatagagctaaagtatccgattccattagccgactctcaataa

SEQ ID NO: 71353 - DNA, 1050 bp, Citrobacter koseri
atgccggttttgcagtggggtttgttgttcctgctatcactccttctttcgctggcttttctctgcatccaccttccggcggcactgctgctcggcccgatgattgccggtatcgcattcagtctgaaaggcattacgctgcgactcccccgctccacttttctcgcagcgcaggccattctcggctgcatgattgcgcaaaaccttactggttcgattctcaccacgctggcggtgaactggccggtggtgttagccattctgctggtgacgctgctctccagcgcggtggtcggctggctgctggtgcgctacagctcactgccaggcaataccggcgcatggggttcctcccccggcggcgcggcggcaatggtggcgatggcgcaggactacggcgcggatatccgcctggtggcgtttatgcagtacctgcgggtactgtttgtcgcaggcgccgccgtgctggtcacgcggctgatcctcggcgacagcgcagaagcggtcagccagcagattgagtggttcccgccgctgagcggcaatctgtggagcacgctgctgctggctgcggttgcaggcttcgccgggcgcatattgcgcattccttccggtacgatgctggcgccgatgatcgtcggcgcatggcttcatgcaggcggcatgatcgtgattgaactgccggaatggctgctggcgattgcgtatatggccattggctggcgcatcggattagggttcgacaggcaggtcttttttatggcgctgcgtccgctgccgcagattctggcctccatctttgccctgatggcgatttgcgcggcgatggcctggggactcgcccactacatgcagattgattttatcaccgcctggcttgccaccagccccggcgggctggataccgtggcggtgatcgccgccggtagcaacgccgacatggcgctgattatggcgatgcaaaccctgcggctgttcagcattttgttgaccgggcctgcggttgcccgttttatttcaacctatgcgccgaaacagccgcaggcataa

SEQ ID NO: 71354 - DNA, 792 bp, Citrobacter koseri
atgcaaagtaagaatatgaatacagccctattagcggctgcactggtcatgccttccgccagcgtttttgcggacaataacagtcattcaacgacggcgccacaggcaaaagaaaaaccgtttacgacggtttattttgcgccacgcacacagtatcgcacggccagcgagcgttttttacaacgactgatgctgacaggcgtggtgcaggacccgaacagtattttcgcccgaatgtactggagttttgagacggactccgatctcggtaagaatatggagcagtggaaaagcagctacgaagaagcagagtttaacaagccgttcccgctgggcgagagcgacttctggcttgaacctggggttgtcttccattgggagtccgccggttcacgtatcgatccttacctcggcattggttatcactttgacccaacgctgggtgccgttttacgctatcgctataatcatcaaaatcacgacagtcagacgctacagggcgactgggacgactcttcggaacatcgcgttgatatttatctgaccaaatattttacgccagatttttgggtgcaatataatccgacatattacagtaaaacgcatggtgataaatttgaatatgcgaatggtaaaaaccatacgctgcaacataattttgtttttaacttccatgcaacgccgcgtttttatcccttctttgaattaggttatctggatgaatataaagatggcgatgacaccaaaaacgaataccagatcagggttgggtttaaatataatttaaattaa

SEQ ID NO: 71355 - DNA, 1191 bp, Citrobacter koseri
atgtctgcaactatccgtaaagaaacgattgtccctgttgcgctacagcgcggcgagcgcgctgctatcgcgcagaaaattcgtcatgcgttgccggtgattttaaaggctgttgatcgtaacagcgcttatttcggccagcgttttcccgacgcggcatgtaaaaacggtatctatccgattatcgataatcaggagtggacgaccagtttctggaccgggcaactgtggctggcatgggagtggacagggaatgccgcatatcgcgcgttagccgagcagcatgtccgctcctttggcgaacgtatcgcaaagcgcgaccacactaaccaccacgacctcgggtttctgtacagcctttcctgcgtggctgccagcaaattgaccgataaccgggaggcaatatatatcgcccaacaggcggcagaagtgttgatggagcgctatcacgacaagtgcggcattattcaggcgtggggcgagctggataacccggagcagcagggtaggatgatcattgactgcaatatgaatctgccgttgttgtatcaggccagcgcgacaacgggcgacccgcgctatgcacaggcggcgaaaagccatattgagcaggcgcgacgctatattgtgcgcgaggacggctcgacgtttcacacgtactatatggatgttcacaccggtgagccacgttttggcaatacccatcaggggttctccgacgattcctgctggtcgcgtgggcaggcatggggagtgtatggctttctgctgaactacctctataccggagatgagaaactgctggaattgagccagacgctggcaaactattttattaaccgtttgccggaagacctggtctgttactgggatctggcgctgaccgatcccaacagcgaaaaagacagttctgccagcgcgattctcgcctgcgccttgctggagctggtaaaacagcttccggcgactcatcccgatcgtgaaagttatgaggcgctggcattgcgaatgattgagcggatgctcgacggctatctcaatctggagcacaaagaaggcgaaggattattaaaacattctgtttattattttaaaggtaacgtcggcgtgaatgaatgctgtgcctggggtgattatttcctgatggaggccattacccgcgcaacgtcatgctggaatagttactggtaa

SEQ ID NO: 71356 - DNA, 1266 bp, Citrobacter koseri
atgatgaaccctgttcagtcgacacgttcggcttacatcaagctgagtctgtttgtatttctgtttacctttacctgggcggccagttttggcctgtatgctatctggctgggggataaagccgggctggatggcgtggaaatcggcacggtgtttgccgttaacggcgtttttgcggtgattatcaaacccgtttacggctacatcatggacaaaatgggcatgaaaaaacacctgctctattttgtctgtattgtttcggcactgatggcgccgttttacatctggtgctatctgccgctgctgcaaacccattttgtcagcggaatgattgtcggcgcgctgtttttcagcctcggctggtatgcgggcgtggcggcggaagagtcgtatgttgaccgtttcagccgtctgtatgacatggagtttggccgcatccgcatgtgggcggcgctgggctgggcgacggcgtcatcgttttccggctatctctacaatatctcccccaaaatcaactttgttatcagcaccgtttccgcgctgtgcatgtttgcggtgctgctgacgctgaaggtcgatcactttggtcaggaagaaaacaacgttctgtcgaaagagaagattgtcattggcgatgtgttccagctgctgcgcaataaaaagttctggaccttctccctgtatatcgcgggcgtggcatggatgatgtttattgccgaacagcaattctctcgctatttcgtcaccttcttcagtaccaaagaggaaggaaacgccatgtttggctacatgagcaccgcgcagtccgccgccgagttcttcggcatgatgctggtgcccgccatcattaaccgcatcggcgccaagcaggggatgctcctgacagggctggtgatcagcctgcgtttgattatctccgggttaaccaacgatccgctgattatctgcctggtgaaaccgctgtatgggattgaaattgcgctgattctggtctcggttttcaaatatatcgccgaacacttcgacaagcgcgtcaacgccacgatgtatctgctgggttatcaggccatgatttacgtcggctctatcgtggtggcgccgcctgccgggtatgcctaccagaagatcggttttgaacacacctatctgattatgggcatcatcgcgctgatatttaccgggatctccgccatcacgctatctccctgctatcagcataaaaaaaacaccgccatccctgcccacgggcaagaagccattcattaa

SEQ ID NO: 71357 - DNA, 1782 bp, Citrobacter koseri
atgcgaataaggcaagaatacgtcggactggcgcaacaatggctggcgtcagccgtcccccatttgaggcgaggaaacacgcgtctggacgccggagaaacgtctgcacactatccggcggatgtcgccggaatggaaggtttctctcgtctgctgtggctgctggcgccgttactgagcggtggcgaagccgatgattttcgcgagacgtttatcgacggtattcgtcatggctgcgatcccgaacatcctgactactggggctccctggcggataacgatcagcgatgcgtcgaaatggcggcgtttggcctggcgctggcgttaccgggaacggggctttggtcagcgctctccatcgacgagcaaaacaatctggagcgctggttacgccagagcgccgacattcagatccccgataacaactggcatttcttcccggtgctggtgcaggtggggcttaagtgcgtcgggcggcattacgacatgatggtgattgataagcatctgaatgccattgaaccgttctggcttggcaacggctggtacgccgatggtgccggtaagccgcgcgactactacatctccagcgggtttcacttttacagcctgctgtacagccactttatgcaggatgctgatcccgaacgttgcctgcgctatcgtcagcgcgcgcgtcagttcgcgaaagattatatccattactttaccggtgacggcaatgcgatcccctttggccgtagcctgacttatcgcttcgtacaggtcgcattctggagcgcggtggcatataccgggctggatgtgtttagcgtaccggttatcaaagggctgatcctgcggcatatcgactggtggctgagccaaccgtttatcggcccggatggtttgttcacgctggggtacacatacccgaatctggtgatgaccgaagattacaacagccccggttcgccgtactgggcatgtaaggcattgctgattctggcgctgccgcaagagagtgcgttctggcaggcggaacccgcgccattgcccgtgctggagacggttcacccgatagcggaagccgggcagtttattgttcatgcggaggataaccatcacgtctggatgctgatgtccgggcagtacgatcgcaataacttcgtcaatttcgacgccaaatactgcaagttcgcctattccagccactttggtttcaccctcgaacgcggcgtgtatggtctgaaccatgccgcctgtgactcgacgctgatgttcagtgagcaggacggctactggcgcgggcgtcgcgagtgtgatgcggtggagatgacgccagcgtggcttcgaagcgtctggcgcccctggccggatgtcagcgtcaccacctggcttattccgcatgagcagggacatctccggctgcatcgcgttgtaaccccacgcacgctcgactgcgtggaaggcggattcgcactgaatcgccatcatctgacgacgacccgaatggcaaaaaacgggctgactctcagtaccacttccggcgtgtgtcagatcgaggatttgctggctgaacgccagccgctggtcgttaccaccccgccgaacagcaacattctgtatgcctctcctggagagatcccctgtctcggcacgacgctcacgctgggcactcactggctggcctgtagcgttaacgccacgatgtctccgtcgctgccgccgccggtggtcatggcattcgatcgtgtcaatcaggtgctgacgctgaactcgaaaacgctggaaataaaataa

SEQ ID NO: 71358 - DNA, 849 bp, Citrobacter koseri
atgcagcgaatggaagacagcagttatcttgagaatatcaacctcaacgataagtcgatttactttaaccgcatgaagaatatgcctgccaactactaccactggcatcagtgtgtggagatcctgtcagtttctcagggagttggcatcgcgctaatggagcaccagcagtacaccgttaagccggggcgtatttttatttttccgccgggaaagctgcataaggtgtttgtcgagcaggacgatcgtaatgtttatcaccgtacaacgctgcattttaatggctcaattattgaacagtacctgcgggattttccgcgtcagcaaatgttgctgcgtcagctctgcggtcggggagaaaaggcgcgggtatttgatgtcggcgacgtacagccggtgattgaaacgctgctgagccgttttgaaacgctggtaaaaagcaaaacgttcagcgtcagcgacagcgcatttctggtgatgcagattatcagcctgctgccgcatcaggagcaggcgacgggatacaataccttttcggtcagcattatccgttggatagaaactcattttcaccagcgctgctcgctggacgatatcgcccgcgagatgggctgctcgcgcggacatgcctcacgccgctttcacgaggaaacgggcggcaccattcaggagtatctgatgatgcgccgtatccgtcaggcatgtgaattgctgttgcacaccaacagctcagtgcgtgagattgccgaacaggtcggtttctccgagtacgcctggtttattacctgttttcgcaagaatatgggtaaaacgccgttgcaatatcgcaaaacgtattcccccgcctag

SEQ ID NO: 71359 - DNA, 792 bp, Citrobacter koseri
atgcctgaaggcccggagatccgtcgtgcggcggataacctggaggcggcgataaaaggcaaaccgttgacggacgtctggtttgccttttcgcagttaaaaccgtatgaatcgccgctgattgggcagacggtcacccatatcgaaacgcgggggaaagcgttgctgacccacttttcgcaggggctgacgctctacagccataaccagttgtatggcgtatggcgagtagtggagacggggaacatcccggcaaccacccgggtattacgcgttaacctgcaaacggcggataaaaccattctgctttacagcgcgtccgacattgaaatgttgacgccggaacagctcgccacccacccgtttctgcaacgcgtcgggccggacgtgctggacccgcggctgacgcccagtgatgtaaaagcgcgtctgctctctgcgcgttttcgtaatcgtcagttttccgggctgttgctggatcaggcgtttctcgccgggctgggcaactatctgcgcgtggagattctctggcaggtggggctgacggggcagcataaggcgaaagatctcagtgaccaacagctggaagcgttatctcatgcgctgctcgatatcccgcgcctttcttataccacgcgcggtcaggcggatgagaacacgcatcacggcgcgctgtttcgctttaaggtgttccaccgggacggcgaagcctgcgagcgctgcggcggcattattgagaaaacgacgctctcctcgcgcccgttctactggtgtccacactgccagacgtaa

SEQ ID NO: 71360 - DNA, 645 bp, Citrobacter koseri
atgaagacggtattaatcaccgggtttgaacccttcggcggcgagcaggttaacccttcctgggaagtggtctcgcgtctcgacaatgctatcatcgcagggtgtcgcgtggtggcccgccagctcccttgcgtctttggcgattctctcaccgtgctgaatgcggcgattgacgcgttatccccggtgctggtgctggcgatagggcaggccggagggcgcacggatattaccgtggagcgcgtggcgattaatattgacgatgcgcgtatccccgataatcgcggcaggcagccggttgatgagcccatcgtggcggaaggcccggcagcctggtttagcacgctgccgatcaaagcgatggtctcggcgatgcgcgaagcggggattccggcatcggtctctcagaccgcaggcacttttgtctgcaaccacgtaatgtatggactgttgcataaattgcgcgatattcaggacgtgaagggtggatttatccatattccttatctgccggaacaggcggcggcacatcctggtgcgcccagcatggcggcggaaacggtgcgtcaggcgttggaaatcgccattgtcacagcgcttcatgtggaaactgacattgcagtaacaggcggagcaactcactaa

SEQ ID NO: 71361 - DNA, 996 bp, Citrobacter koseri
atgaattttcaacaaagctatctctattggctggccggtgtggtgctgttgattgtcgccgtcatgtcgtggcaggacaaagccaatccgcgtcgcctgacgacggggttattctggggcgtttatggcgtactgttcctgctcggcgactggacttatcagctggtgggcgacaaacgcatggttaatatcgccgtcggtggggcagtggtggtgatggcgctgattgccggtttcggcggcgtgaagctcggaagctatcaccagcgaactcgcgaacagcgtgaggaaagcgccagtcgtctgggcaaccgcctgttttatccggcgctggcgatcccggtggtcacggtgatcggcgtgcttatgttcaaccatgttcccggattgcaggaggcgctgttcgggccgggcaatcacgctacgctggtgacgctgttttccatgactgcggggtcattgattggtctggggatggcgataaagatgacgcatgagaaggtgcaccagccgattcaggaagcgcgtcgtctgctggattccatcggttgggcgttcattttgccgcagatcctcgccacgttagggctgttatttaccgcggcaggcgtcggcagcggaatttcgtatctcacccaggaatatcttgccgtcgatagccgttttatcgccgtggcggtctacaccatcggtatggcgctactgacgatggtgatggggaacgcctttgccgcattcccgattgtgacggcggggattgggattccaatcctggtgctgcaacatggcgggaatccggcggtgatggcggcaatcggcatgttctccggctactgcggaacgctgatgacgccgatggcggcaaactttaatatcgtgcctgcggcgctgctggaactgccggataaaaatgcggtgatcaaagcgcaggtgccgaccggtattgtgctgctgttggttaacgtgtttctgatgtatttcctgatgtttctgtaa

SEQ ID NO: 71362 - DNA, 726 bp, Citrobacter koseri
atgggagacgcaatttctctctggccactgatgggtatcgccgtcattgtggctggatttcttttacgctttaacccggtattagtggtcattattgccgggatcgtcacgggactggcggcgcagatgccgatcgccacgatcctcgaaaaactgggtgaagggttcctcaatacccgtaacctgccctttattctgctgattccgctggcggttatcggtctgctggaacgccacgggctcaaagagcgcgcgcaggcgtggatcgcgaaaatccgcagcgccacggcaggacgtctgctgattgtctatctgtttgtccgcgaagcgacggcagcgctggggctgaccagtctcggcggccatccgcaaatggtgcgtccgttgctggcgccgatggcggaaggggcggcagagaaaatacacggggaactgccaggcacggttcgctaccggctgcgggcaatgtcagcagccaccgataacgtcgggttgttttttggcgaagacattttcgtggcttttggcgccatcatctttatgcacaacttcatgctggagtccggcggaattcagaccgagccgctgcatattgcgctgtgggggattccgacggcgatctgcgcttttctgattcacggcgcgcgcctgtggcgtctggacaattatctgcaacgtgaagtggcgaaagtcagcgcggcgatgagcaaaggagaggcgaaatga

SEQ ID NO: 71363 - DNA, 738 bp, Citrobacter koseri
atgatgaacattgatcttaacgcagacttaggagaagggtgcgccagcgatgcggcgttactgcaactggtgtcatccgccaacatcgcctgcgggtttcacgcgggcgatgcgcaaaccatgctggcgagcgtgcgcgaagcgctgaaaaacggcgtagcgattggcgcgcatcccagtttccctgaccgggaaaactttggccgcaccgccatgacgttaccgccggaaaccgtctacggccagacgctgtaccagatcggcgcgctggcggcgatagcccgcgcggaaggcggcgttatgcgtcatgtcaaaccgcacggtatgttgtacaaccaggcggcgaaagatccacagctggcggatgccatcgccagagcggtacatgcctgcgatccgtcgctgattctggtcgggctggcgggcagcgaactgattcgcgcaggcgagcattatggcctgacgacgcgtcaggaggtttttgccgatcgggggtatcaggctgacggcagcctggtgccgcgaacccagccgggcgcgctggtagaagacgaagaacacgcgttggcgcaaacgctgggcatggtggaatccggtagagtgaaaagcattaccggtgaatgggcgaacgttgtggcgcaaacggtatgtattcacggcgacggcgagcacgcactcgcttttgcccgtcgtttgcgcgcggcgtttgaagaacgcagtatcaggattatggcataa

SEQ ID NO: 71364 - DNA, 933 bp, Citrobacter koseri
atgctgaacattattcgcgcgggtatgtacacctcagtgcaggatgggggacgacacggctatcgtcagtccggtattagccattgcggcgcgctggacaaaccggcgctgcatatcgcaaacctgctggtggggaatgacgccagtgctccggcgctggagattacgctcggccaactggtggtggaatttgaatccgacggctggtttgcattgaccggcgccgggtgcgaggcccgtctggacgaccaaccggtctggaccggctggcggctgccggtgaaagcggggcagcgtctggcgctgaagcgcccgctccacggaatgcgcagctatctggccgtggcgggcggcattgacgtgcctgaagtgatggggtcgtgcagtaccgacctgaaggtcggcattggcgggctggaagggcgcttgttaaaagatggcgatcggctggcgacaggaaggtcagaacgccagtttagcggcccgcagggcgttaaacagctgctgtgggggaaccggattcgcgcgttgcctggcccggaataccaggagtttgaagcggcctcacaggaggcgttctggcgctcgccgtggcagcttagcccgcaaagtaaccgtatgggctatcgtttgcaggggcaaccgctgaaacgtaccaccgaacgtgagttactgtcgcacgggctgctgccgggcgttattcaggtgccgcataatggtcagccgatcgtgctgatgaacgatgcccagaccaccggcggctacccgcgtatcgcctgcatcattgaggcggatatgtatcatctggcgcagatccctctcgggcaaccgatccattttgttcagtgtacgctggaggaggcgcttaaggcgcgtcacgaccagcagcgttatctggaacagttaacatggcgacttaatgatgaacattga

SEQ ID NO: 71365 - DNA, 657 bp, Citrobacter koseri
gtgcaacgagcgcgttgttatctgttaggtgaaacggcggtggtgctggagcttgagccgccggtcacgctggcatcccagaaacgcatctggcgactggcgcagcgtctggtcgatatgccgaatgttgttgaagcgattccgggtatgaacaatatcacggtgatcctgcgcgagccgcagacgctggcgctggatgcgattgaacgtttgcagcgctggtgggaagagagcgaggcgctggagcctgattcacgctttatcgaaattcccgtgacctacggcggcgagggcggcccggatctggcggaggtggcgcgacacagcggattaagcgaaaagcaggtggttgaactgcacgcttcagtagagtacgtcgtctggtttttaggttttcagccgggctttccgtatctcgggggcttaccggaacaattacacacgccaagacgggcagaaccgcgcctgattgttccggcgggttccgtggggattggcggcccgcaaaccgggatttaccctctgccgacgccgggcggctggcaactaatcggccatacgccgctgaagctgttcgacccacagcgggatgagcccatcctgttacgtccgggcgacaccatacgctttgtcccgcagaaggagggggtatgctga

SEQ ID NO: 71366 - DNA, 744 bp, Citrobacter koseri
atgaaaaacaccgaactggaacaactgatcaatgaaaagctgaacagcgcggccatcagcgattacgcgccgaatggcttacaggttgaaggcaaagagacggtgcaaaaaatcgtgaccggcgtgacggcgagccaggccttactggacgaagcggtacgccagcaggctgatgcggtcatcgttcatcatggttacttctggaaaggggaatctccggtcattcgcggtatgaaacgcaaccggctgaaaacgctgctggcgaatgacattaacctctatggctggcatctgccgttggatgcgcacccggaactgggaaacaacgtgcagctggcggcgctgctcggcattaccgtgatgggggaaatcgagccgctggtgccgtggggagagttatcaatgccggtgccggggctggaactggcctcgtggattgaagcgcgcctgggacgtaaaccgttatggtgcggcgataccgggccggaaaaagtgcagcgtgtggcctggtgtaccggtggcgggcaaagttttatcgacagcgccgcgcgctttggcgtggatgcgtttattaccggcgaggtctctgaacagacgattcactccgcccgcgaacaggggctgcatttctatgccgccggacaccacgccaccgagcgcggcggcattcgcgcgttaagcgaatggctgactgaaaatacgagtctggatgtgacctttattgatattcccaatccggcataa

SEQ ID NO: 71367 - DNA, 1482 bp, Citrobacter koseri
atgaataaaccatcttctcaaccgcgcgccatttattacgtcgtcgcactgcaaatttgggaatacttcagcttttacggcatgcgcgccctgctgattctctatctcaccaaccagctaaaatacgacgataaccatgcgtatgcgctgttcagcgcttactgttcgctggtctatgtcaccccgattctcggcgggtatctggcggataaagtgctcggtaatcgcatggcggtcatgctgggagcatttttgatggccgttgggcatctggtgctgggggcgagtgaaatcgcgccgaccttcctttatttgtcgctggcgatcatcgtctgcggttacggtctgttcaaatccaacatcagttgcctgttgggtgagctgtataaaccggaagatccacgccgcgacgggggattctcactgctgtatgccgccggcaatatcggctcgatcgttgcccctatcgcctgtggttatgttcaggaagagtacagctgggcgatgggttttgcgctggccgccatcggcatgatcgccgggttaattatcttcctgtgcggcaatcgccatttcgcccacaccactggggtgaataaagtcgcgctgcacgccagaacgtttgttctgcccaactggtgttggctgctggtgctgttggtcgccgcgccgctgctgatcacggtgctgttctggaaagaatggtcggtctatgcgctggttgtcgccaccgtcattggtcttgcggtgctgacaaaaatctaccgtcaggcacagacgcaaaaacagcgtaaagagctggggctgattgtggttctcaccttcttcagcatgttgttctgggcgttcgcccaacagggcggcagctccatcagtttgtacatcgaccgatttgtgaaccgtacgattctgggttacgaagtaccgacggcgatgttccagtcagtgaatgccttcgcggtcatgctgtgcggcgtggtgctggcctggctgattaaggagagtatgggcggcaaccgtaccgtgcggatctgggggaaattcgccctgggtctcggtttgatgagcgccggattctgcattctgaccgtaagcgcccggttatctgccgcctacggtcactcttctatgccactgatgatcttagggttggcggtaatgggttttgccgagttgttcatcgacccggtcgcaatgtcgcagattacacgtattgagatccctggcgtgacgggcgtcctgaccggtatctatatgttgctctccggcgcgatcgccaactatctggctggcgtcattgccgatcagacctcgcagagcgcgtttgatgcaagcggtgcgatcaactacgccatcaatgcctatatcgatgtgttcgaccagataacctggggagcgctggcctgcgtggcgctggtactgttgatttggctgtatcagtcactcaaattcagaaaccgcccgctggcggttgagtcctga

SEQ ID NO: 71368 - DNA, 207 bp, Citrobacter koseri
atggaactctataaagaatatccggctcatgttgttttgttacgccgcactctcgccgttgtggctggggttctggcgctgccggtcatgttgttctggaaagaccgtgctcgtttttacagctatctgcatcgcgtctggtcgaaaaccagcgataaaccggtgtggatggagcaggcagaaaaagtgacctgcgatttctactga

SEQ ID NO: 71369 - DNA, 1680 bp, Citrobacter koseri
atggcggcccagggatttttactgacagccagttttttactgatcctgttcgtgctcgcccgccctttaggcgtgggtctggcgcgacttatcaacaacattcccctgccaggcaccgccagcgcagagcgtctgctatggcgcgggttggggataccggcgcaggaaatggactggaaacagtatctgctggccattcttaccctgaatctgttgggtctggcagtgctgtttctgatgctgctggggcaaaacctgctgccgctgaacccgcagcagttgcctggcctttcctggcatctggcgctcaatacggccatcagttttgtcaccaataccaactggcagtcctacggtggggaaaccaccttaagctacttcagccagatggcgggactgaccgtacagaacttcctgtcggcggctaccggtatcgcagtgatcttcgtcctgatccgcgcctttacgcgccagagcatggatacgctgggcaacgcctggatggatttggtgcgcattacgctgtggatcttattaccgctcgccctgttaatcgccctgcttttcatccagcagggcgcactgcaaaacctgctgccctatcaaccgttcaccagcgttgaaggtgtgaaacagcttttgccgatggggccagtagcttcacaggaagccataaagatgctcggcaccaacggcggcgggttcttcaacgccaactcatcgcatccgtttgaaaacccgagcgcattaaccaacatggtacagatgctggcgatctttttgattcccgccgcgctttgctttgcctttggcgatgcgtcaggcgatcgccgtcaggggcagatgctgctgtgggcgatgtcgatcattttcgtagtctgcgtcgccgtggtgatgtcggcggaagtccagggtaatcctcatctgctgaagtttggcgccgacagcagcctcaatatggaaggcaaagagagccgctttggcgtgctggtcagcagcctgttcgccgtcgtgaccacggcggcctcctgcggggcggttatcgctatgcatgactcctttaccgcgctgggcggcatggtgccaatgtggctgatgcaaatcggcgaagtggtttttggcggcgtcggttcgggtttgtacggcatgctgttgttcgtattgttagccgtatttatcgccgggctgatgattggccgcacgccagaatatctgggtaaaaaaatcgacgtgcgcgaaatgaaaatgaccgctctggcgattctgattaccccgacgttggtattgctcggtacggcgctggcgatgatgaccgaaaccggccgtagcggaatgctcaaccccggcccacacggttttagcgaagtgctgtacgccgtctcttcggcggccaacaacaacggcagcgcctttgccggtctgaacgccagcacgcccttctggaactgcctgctggccttctgcatgtttgtcggtcgcttcggggtgattatcccggtcatggcaattgccggatcgctggtcggtaaaaagcgccagccggccagccccggcacactgccgacgcacggcgcgctgtttgtcggcctgctgatcggtacggtgttgctggtgggcgcactgacctttattcctgcgctggcgcttgggccggttgctgaacacctctctttatattga

SEQ ID NO: 71370 - DNA, 2049 bp, Citrobacter koseri
atgagtcgcaaacaactggcgctgttcgagccctccctggtcgctcaggcgctgatcgaggccgtgaaaaaattaagcccacatacccagtggcgcaatccggtcatgtttattgtctggatcggcagtctgctgacgacccttatcacggtggcgatggcaaccgggcagatgccaggtaatccccggtttactggcgcgataagcctctggctatgggttaccgtcctgttcgctaacgttgccgaagcgctggcggaaggtcgcagcaaagcgcaggccagcagtctgaaaggggtgaagaaaacggcatttgcccgcaaactgcgtgaaccaaagtatggcgcgcaggcggatcgcctccctgccgatgagctgcgtaaaggggatatcgtcctggttgaagcgggcgatattattccctgcgacggcgaggtcattgaaggcggcgcatcggtggacgaaagcgccattaccggtgagtccgcgccggtgattcgtgaatccggcggcgactttgcctcagtgaccggcggaacacgtattctctccgactggctggtcatcgaatgcagcgtgaatcccggcgaaaccttccttgaccggatgatcgcgatggtggaaggcgcgcagcgccgtaaaacgccaaacgaaatcgcgctgaccattctgctgattgccctgactattgtctttttactggcaaccgccacgctctggcccttttccgcctggggcggccatgccgtcagcgtgacggtgctggtcgccctgctggtttgcctgatccctaccactatcggcggattactttcggcgatcggcgtcgccgggatgagtcgaatgctgggagcaaacgtcatcgccaccagcgggcgggcggtggaagccgcaggcgacgtggacgtgctgctgctggataaaaccggcaccatcaccctcggcaaccgtcaggcctcggactttctgcccgctcagggcgtggatgaaaagacgctggccgacgcggcgcagctctcttcgctggccgacgagacgccggaaggccgcagcatcgtcattctcgccaaacagcgttttaatctgcgcgagcgcgatgtgcagtcgcgccatgccacctttgttccctttaccgcgcaaagccggatgagcggcatcaacattgataaccgaatgatccgtaaaggttccgtggatgccattcgccgccacgttgaagccagcggtggtcacttccctgctgacgtggagcaaaaagtggatagcgtcgcccgtcttggcgccacgcctctggtggtggtggaaggttcccgcgtgctgggcgttatcgcgctgaaagatattgtcaaaggcgggattaaggaacgttttgcccagttgcgcaaaatgggcatcaaaacggtgatgatcaccggcgacaaccgcctgacggcagcggcgattgccgccgaagccggtgtggatgatttcctggcggaagccacaccagaagccaagctggcgttgatccgccagtaccaggctgaaggtcgcctggtggcgatgaccggcgatggaaccaacgatgcaccggcgctggcgcaggctgatgtggcggtggcgatgaactctggtactcaggcagcgaaagaagccggtaacatggtggatctggattccaacccgaccaagctgatcgaagtggtgcatatcggtaaacagatgctgatgacgcgcggttcgctcaccacgttcagtatcgccaatgacgtggcgaaatatttcgccatcattccggcggcgtttgccgcgacgtacccgcagttgaatacgctgaacattatgcgtctgcattcgccggattccgcaatcctcagcgcggtgatcttcaatgcgttgattatcgtttttctgatcccgctggcattgaaaggggtgagctataagccgctttcggcctctgccatgctgcgccgtaatctgtggatttacggcctgggtggtctggttgtgccgtttatcggcattaaagtgattgatttactgctgactctgctgggtctggtgtga

SEQ ID NO: 71371 - DNA, 567 bp, Citrobacter koseri
atgagtggattacgtcctgcattatcaacgctggtgtttctgacgctgctaaccggcggcatttacccgctgcttaccaccgcgctggggcaatggtggttcccgcatcaggctaacggctcactgattgttgatggcagtctcgtgcgcggctctgcgcttatcgggcagaattttaccgccgacggctattttcagggacgcccgtcagcaacggcggaaataccctataatcccatggcttccggcggcagtaatctggcggtcagcaacccggagctggataaacagttgcagcagcgggtgaaggcgctgcggggcgctaacccggacgccagcacgacgattccggtggaactgctcaccgcttccgccagcgggctggacaataacctgacgccagcggcggcggcgtggcagatcccgcgcgtcgccaaagcgcgaaatctcagcgttgaagccgtgacgcagttggtcgcagaatatacgcaaaagccgctggtgagttttatcggccagccagtggtcaatatcgtggaactcaatttagcgctggataagctctga

SEQ ID NO: 71372 - DNA, 2688 bp, Citrobacter koseri
atggttaatgaagaaccgctacgccctgaccccgatcgcctgctggaacagaccgccgcaccacaccggggaaaactgaaaatcttcttcggcgcctgcgcaggcgtcgggaaaacctgggcgatgctggctgaggcgcagcgactgcgggcgcaagggctggatattttgacgggtgtcgtggaaacccacgggcgtaaagagaccgctgcgctgctggacggcctcagcatcctgccgctaaaacggcagacgcgtcacggacgccatctcagcgagttcgatctcgacgcggcgctggcccgtcgcccggcgcttattctcatggacgaactggcgcacagtaatgcgccaggctcgcgccatcccaaacgctggcaggatatcgaagaactgctggaagcgggtattgacgtctttaccaccgtcaacgtccagcacctggaaagcctcaacgatgtggtcagcggcgtgaccggcattcaggttcgtgaaaccgtgccagaccctttcttcgatgccgccgacgaggtggttctggtcgacctgccgcctgacgatctgcgagcgcgtctgaaagagggtaaggtgtacattgccggtcaggctgaacgcgccattgagcacttctttcgcaaaggcaatttgatcgccctgcgtgaactggcgctgcgccgcacggccgaccgggtggacgatcaaatgcgcgcctggcggagccatccgggcgaagagaaagtgtggcatacccgcgacgccattctgctgtgcatcgggcacaacaccggcagtgaaaaactggtgcgtgccgccgcgcggctggctgcccgcctcggcagcgtctggcacgcggtgtatgtcgaaaccccggcgctgcatcgcctgccggaaaagcagcggcgcgccatcttgagcgccctgcgtctggcgcaggagctgggcgcagaaaccgccacgctttccgatcccgccgaagaaaaagcggttgtgcgttacgcccgggaacataacctcggcaaaattgtgctgggtcgcccggcaacgcgacgctggtggcgcagagattcgtttgccgatcgcctggcgaaacaggcgccggatctcgatcaggtggtcgtcgcccttgatgatcccccgactcgcccgttgaatcagacaccggatacccgtgccttcaaagataagtggcgggtgcagatacagggctgcctggtcgcgatcgccctttgcgcagtgaccaccgtcatcgccgtacagtggatggtcgcctttgacgcggctaacctggtgatgctgtatctgctgggcgtggtgattatcgctctgttttatgggcgctggccctcggtagtggcaacctttattaacgtcgccagcttcgatctcttttttattgctcctcgcggcacgcttgccgtttccgatgtgcagtatctgttgaccttcgccgtgatgctgacggtggggctggtgatcggtaacctgacggcgggcgtgcgctatcaggcgcgggttgcccgctatcgggaacagcgcacgcgccatctgtacgagatgtccaaagcgctggcggtggggcgaagcaggcaggatatcgccgccaccagcgaacagtttatcgcctccacgtttcaggcccgcagccaggtgttattgccggatgaaaacggcacgctgatgccgctgacccaccagcagggcataacgccgtgggatgacgccatcgcccggtggagctttgacaaaggccagccggccggggcgggcacagataccctgcccggcgtgccgtatcaaattttaccgttaaaaagcgccgataaaacgcatggactggtggtggtcgagccggggaatcttcgtcagttgatgatcccggagcaacagcggctactggaaacattcaccttgctggtcgccagcgcgctggagcgtctgacgcttaccgccagtgaagagctggcccgactcgccagcgagcgcgaaagcattcgcaatgccctgctcgccgccctctcccacgacttgcgcacgccgctgacggtgctgtttggtcaggcggagattttaaccctggatttggcaagtgaaggatcgccgcatgcgcgccaggccagcgaaatccgccagcacattctcaacaccacccggctggtgaataacctgctggatatggcgcgcattcagtccggtggatttaatcttaaaaaagagtggctgacgctggaagaggttgtcggcagcgccctgcaaatgctggagccgggactatcccaccccattaacctgtcgctgccagcgccgctgacgctggtacacgttgacggcccgctgtttgaacgggtactgatcaaccttctggaaaacgccgtcaaatacgccggttcacaggcggagatcggcattgatgcccatattgaagacgaacatcttcagcttgacgtctgggataatggccccggcattcctgacgggcaggagaaaagcatcttcgacaaatttgcccggggaaataaagagtctgccgtaccgggcgttgggctggggctggctatttgccaggcgattgttgaagtgcacggtggaacgatttccgcccacaatcgcccgcagggcggagcctgtttccgtgttacactcccgcaggaaactgcgcctgaacttgaagattttcatgaggatatgtga

SEQ ID NO: 71373 - DNA, 678 bp, Citrobacter koseri
gtgatcaacgttctgattgttgaagacgaacaggctattcgccgctttctgcgcagcgcgctggaaagcgacgggctgcgcgtgtacgaagcagagacgctaagccgtgggttgctggaagccgccacgcggaaacccgatctcatcatccttgatcttggcctgcctgacggcgacggcatcgattttattcgcgacctgcgacaatggagcgcaattccggtgattgtgctttctgctcgcagcgaggagagcgataaaatcactgcgctggatgcgggcgccgatgactacctgagtaaacccttcggcattggcgaactacaggcgcgcttacgcgtggcgatgcgccgtcacgccagcggctcttcttctgaccccatcgtgcagttttccagcataaaagtggacttagcagcacaccttgtccaccgtgatgaagaagaaattcacctgacgccgattgagtttcgcctactggccgtgttgctgaataatgcgggcaaagtgctcacccagcggcagctgttgaaccaggtctggggcccgaacgccgtcgagcacagtcactatttgcgtatttatatgggtcacctgcgacagaaactggagaaggatcccgcccgcccccgccatttcattaccgaaaccggaatcggttatcgttttatgccatga

SEQ ID NO: 71374 - DNA, 228 bp, Citrobacter koseri
atgcagtgtgagcaccacgagatacaggcgttagcctgcaatgcaaggggtcaggaagacctgtatgctggagtgcccttagtcgaaagactaacgggcattaaagaaatgaaagtcgaagctgttacggtgagcaaacatcataatatgagttgtccgccttatatggggcattgtacggctattattttccattttggttacctttactggataagtggaaggtga

SEQ ID NO: 71375 - DNA, 2199 bp, Citrobacter koseri
atgtctgaattaaaaattgccgtcagtcgttcctgccctgattgtttttctacacagcgcagtatcgttaatgttgatgaaagtaatttcattgatgttgccgctatcgtgttatccatcaatgatattgaacgaggtaaactcgatgagattgatgcgacgggctacggtattcccgtgtttatcgcgacacaaaatgaagagcgtgttccggcagaatatctgccgcggatctcgggcgtattcgaacataatgaagcccgtaacgccttctatggccgccaactggagaccgctgccagccactatgaaacgcaactgcgcccgccgttcttccgggcgctggtggactacgtaaaccagggcaacagcgcatttgactgtccggggcatcagggcggtgaattcttccgccgtcaccccgcagggaaccagtttgttgagtactttggcgaaacgcttttccgctctgatttgtgtaatgccgacgtggcgatgggcgatctgcttatccatgaaggcgcaccgtgcatcgcgcaacaacacgccgcgaaagtgttcaacgccgataaaacctactttgtgctgaacggcacctcatcgtcaaacaaagtggtacttaacgcgctgctgaccccaggcgatctggtgctgttcgatcgtaataaccacaaatcgaaccaccacggcgcgctgttgcaggcgggcgcgacgccggtttatctggaaaccgcgcgcaacccgtacggcttcatcggcgggatcgacgcccactgctttgaagaaggctatctgcgtgaactggtcagcgaagtggcgccgcaacgcgcgcaagacgcccgcccgttccgcctggcggtgatccagttaggcacctacgacggcaccatctataacgcccgtcaggtggtggataagattggtcatctgtgcgactacatcctgtttgactccgcatgggtcggctacgagcagtttattccgatgatggccgattgctcgccgttgttgctggacctgaacgagaacgatccgggtatcctggtcacgcagtctgttcacaaacagcaggccggtttctcccagacctcgcagatccacaagaaagacagccatatcaaaggtcagtctcgctatgtgccgcataaacgtatgaataacgcgttcatgatgcacgcctccaccagcccgttctacccgctgttcgccgccctggacatcaacgccaaaatgcacgaaggcgtcggtggccgtaacatgtggatggactgcgtggcgaacggcatcaatgcacgcaagctgatccttgataactgccatcacatccgtccgtttgtgccggaactgatcgacggtaaaccgtggcagtcttaccccacggcggagatcgcaaacgacctgcgcttcttccactttgtgccgggcgaacactggcatgccttcgaaggctacgccgaacaccagtactttgttgatccgtgcaaactgctgctcacgacgccgggcatcaatgcgcgcaacggcgaatacgacacctttggcgttccggcgaccatccttgccaacttcctgcgtgaaaacggcgtggtgccggaaaaatgcgatctcaactcgatcctgttcctgctgacgccagcggaagacatggcgaaattgcagcaactcgtcgccctgctggtgcgctttgagaaactgctggaagccgatgcgccgctggctgacgttctgccgtcaatttataagcagcatgaagcgcgttatgccggctacaccctgcgtcagctgtgccaggagatgcacgatctgtacgcacgccataacgtgaaacagctgcaaaaagagatgttccgtaaatcccatttcccacgcgtcagcatgaacccgcaggacgccaactacgcctatctgcgcggtgaagtcgaactggttcgcctgccggacgcggaaggacggatcgcggcagaaggcgcgcttccgtatccgccaggggttttgtgcgttgttccgggtgaaatctggggcggtgcggtgctgcgttatttcagcgcgctggaagaagggatcaacctgctgccgggctttgcgcctgaactacagggcgtttacatcgaagaacacgacggccgtaaacaggtgtggtgctacgtcattaaaccgcgcgaagcacagaacaccctgctgaaaggggaaaaattatga

SEQ ID NO: 71376 - DNA, 1320 bp, Citrobacter koseri
atgagtaaagccaaatccaataaaatgggcgtcgttcagctcacaatcctgacaatggtcaatatgatgggctccgggattatcatgctgcccaccaaacttgcggaggtcggcaccatctcgatcatctcgtggctggtgactgccgttggttcaatggcgctggcatgggctttcgccaaatgcgggatgttcagccgtaaatccggcggcatgggcggctacgcggagtatgcctttggtaagtccggcaactttatggcgaactacacctatggcgtttcgctgttgattgccaacgtcgctatcgccatctccgccgtcggctacggcaccgagctgttcggcgccacgctgtcaccggtgcagatcggtctggcgaccatcggcgtgctgtggctgtgcaccgtcgccaacttcggcggcgcgcgcattaccgggcaaatcagcagtatcaccgtctggggcgtgattattccggttgtcggtctgtgcattatcggctggttctggtttagcccgacgctgtatgccaactcctggaacccgcatcacgtaccgttcttcaccgccgtcggttcttctattgcgatgacgctgtgggccttcctcggtctggaatctgcctgtgccaacgccgaagtggtggaaaacccggagcgtaacgtaccgattgcggtattaggcggtacgctgggcgcggcggtgatttacatcatctccaccaacgtgattgccgggatcgtaccaaacatggatctggccaactccaccgcgccgttcggtctggcgttcgcacagatgtttaccccggaagtcggtaaagtgatcatggcgttgatggtgatgtcctgctgcggttcgctgctgggctggcagttcactatcgcccaggtcttcaaatcctcggcggatgaaggttatttcccgaaaatcttctctcgcgtaacgaaagtggatgcgccggttcaggggatgctgaccatcgtgattatccagagcggattatcgctgatgaccatcagcccatcgctgaacagccagttcaacgtgctggttaacctggcggtggtaacaaacattatcccgtacattctgtcgatggccgcgctggtgatcattcagaaagtggcaaatgttccgtcgtcaaaagccaaaacggcgaacttcgtggcattcatcggcgcgctgtacagcttctatgcgctgtattcctccggtgaagaagcgatgctgtacggctccatcgtgaccttcctcggctggacgctgtatggactggtatcgccgcgctttgagctaaaaaacaaacacggctaa

SEQ ID NO: 71377 - DNA, 1641 bp, Citrobacter koseri
atggcaatccacaaccgtgcaggtcaacctgcgcaacagagtgatttgattaacgtcgcccaactgacggcacagtactatgtactgaaacccgaagcagggaatgcagagcacgccgtgaagttcggtacgtccgggcatcgcggtagcgcaggtcgtcatagttttaacgagccgcacatcctggcgatcgcccaggcgattgcggaagagcgtgcaaaaaacggtatcactggtccttgttatgtgggcaaagatacccacgcgctgtctgaaccggcatttatctctgtactggaagtgctggcggcgaacggtgttgatgtcatcgtgcaggaaaacaatggcttcacgccaacgcctgccgtttctaacgctatcctggttcacaataaaaaaggcggcccgctggctgatggcatcgtgatcacgccatctcacaacccaccggaagacggcggtattaagtacaacccgccaaacggcggcccggcggataccaacgtcaccaaagtggtggaagacagggccaacgcgctgttggctgacggtctgaagggcgtgaagcgtatctctctggatgcggcgatggcctcaggccacgttaaagagcaggatctggtgcagccgttcgttgaagggctggcggatatcgtcgatatggcggcgattcagaaagtgggcctgacgctgggcgtcgatccgctgggcggttccggtatcgaatactggaagcgtattgctaagcactacaacctgaacctgactatcgttaacgatcacgttgaccagacgttccgctttatgcatctcgacaaagacggtgcaatccgtatggactgttcctccgagtgcgcgatggcgggtctgctggcgctgcgtgataagttcgatctggcgttcgccaacgacccggactatgaccgccacggcatcgtgactccggcagggctgatgaacccgaaccactatctggcggtagcgatcaactatctgttccagcaccgtccgcagtggggcaaagaggtggcggtcggtaaaacgctggtttcctctgcgatgatcgaccgcgtggtgaacgatttggggcgtaaactggtggaagtgccggtcggctttaaatggttcgttgacggtctgttcgacggcagcttcggcttcggcggcgaagagagcgccggggcgtctttcctgcgtttcgacggcacgccgtggtctaccgataaagacggcatcatcatgtgcctgctggcggcggaaatcacggccgtcaccgggaaaaacccgcaggagcactacaacgagctggcggctcgctttggcgcgccgagctataaccgtttgcaggcaagcgcaacgtctgcgcagaaagccgcgttgtctaagctctctccagaaatggtgagcgccagcacgctggcgggcgatccgatcaccgcgcgtcttacggcggcgccgggtaacggcgcgtcgattggcggcctgaaagtgatgaccgacaacggctggttcgccgcgcggccttctggtacggaagacgcttataagatttattgcgaaagcttcctcggcgaggaacaccgcaagcagatcgaaaaagaagcggttgagattgtcagcgaagtgctgaaaaacgcgtaa

SEQ ID NO: 71378 - DNA, 546 bp, Citrobacter koseri
atgaaaacgattgaagttgatgatgaactctatagctatattgccagccacaccaagcatattggcgagagcgcatccgacattttacggcgcatgttgaagttttccgccgtatcacagcctgtcactccggcggcgaaagaggttcgcgtcgcgcaacctgctatcgtggaagcgaagcccgtcaaccccgtaaaagataaagtccgcgccatgcgtgaactgctgctttccgacgagtacgcggagcagaagaaagcggtaaaccgcttcatgctggtgctgtctacactctactcactggataatcgcgcgtttgccgaagcgacggagtcgttgcatggccgtacgcgcgtctattttgcggctgatgaacaaacgctgctgaaaaatggtaatcaaaccaaaccgaaacatgtgcccggcacgccgtattgggtgattaccaacaccaacaccggccgtaaatgcagcatggttgaacacatcatgcagtcaatgcaattcccggcggaattgattgagaaggtttgcggaacaatttaa

SEQ ID NO: 71379 - DNA, 774 bp, Citrobacter koseri
atgaaattgaatatccgagcgcaaactgcacaaaacctgcacaataattctcccatcgtcctcgttcacggtttgtttggcagcctggacaacctcggcgttctggcgcgcgacctggtgaccgatcacgatatcattcaggttgatatgcgcaaccacggtctctcccctcgcgatccggtgatggactacccggcaatggcgcaagacttactggataccattgatgccgaaggcattgagaaagccacctttatcggccactccatgggcggtaaagcggtaatggcgctcaccgcgctggcgccggagcgtattgaccagttggtcgcgatagacatcgcgccggtcgattaccacgttcgccgccacgatgaaatcttcgccgccatcaatgccgtcaccgacgcgggcgccgaaacccgtcaacaggccgccaccgttatgcgtcaacatctgcaagaagaaggcgtcatccagtttctgctgaaatcgtttatcgacggcgaatggcgctttaacgtaccggtgttgtgggaacagtatccacatattgtgggctgggagaccattccagcctgggatcgcccggcgttgtttatccccggcggcaactcgccttatgtgaccgaagcatatcgtcacgatctgctggcgcagttccctcaagcgcgggcgcacgtcatcgccggagcgggccactgggttcacgcggaaaaacccgatgcggtgctgcgcgccattcgtcgctatctggcagataaggccaactga

SEQ ID NO: 71380 - DNA, 294 bp, Citrobacter koseri
atggccaaagaacaaacggaccgtacgacattagatctgttcgcacacgagcgtcgcccgggacgacccaaaaccaatccgctttcgcgtgatgaacagctgcgcattaataagcgtaaccagctaaaacgcgacaaagtacgtggccttaagcgtgtcgaactgaaactcaacgctgaggctgtcgatgcgctgaacgagctggccgaatcccgcaatatgagccgtagcgaactcatcgaagagatgctgatgactcaactggcagcgctgcgcggccagggcgtagtctga

SEQ ID NO: 71381 - DNA, 531 bp, Citrobacter koseri
atggcaatcactggcatctttttcggcagcgacaccggtaataccgaaaatatcgcaaaaatgattcaaaaacagcttggtaaagacgttgccgatgtgcatgacattgcgaaaagcagcaaagaggacctggaagggtacgacatcctgctgctgggcatcccgacctggtactacggtgaagcgcaatgtgactgggatgacttcttcccgactctcgaagagattgattttaacggtaaactggtggcgctgttcggctgcggcgaccaggaagattacgcagaatatttctgcgacgcgttaggcaccatccgcgacatcattgagccgcgcggcgcgaccatcgtcggccactggccaacggcgggctaccattttgaagcgtccaaaggtctggctgacgacgatcactttgttggtctggctatcgacgaagaccgtcagcctgaactgaccgcagagcgcgttgaaaaatgggttaaacagatttccggcgaactgcacctcgacgaaatcattaacgcctga

SEQ ID NO: 71382 - DNA, 447 bp, Citrobacter koseri
atgactgacaacaataccgcattaaagaaggctggcctgaaagtaacgcttcctcgtttaaaaattctggaagttcttcaggaaccggataaccatcacgtcagtgcggaagatttatataaacgtctgatcgacatgggtgaagagattgggctggcgaccgtgtaccgtgtgctgaaccagtttgatgacgccggtatcgtaacccgccacaattttgaaggcggtaaatccgtttttgagctgacccaacagcatcatcacgatcaccttatttgcctcgattgtggcaaagtgatcgaattcagtgatgactctatcgaagcgcgccagcgtgagattgcggctaagcatggcattcgtttgacgaaccacagcctctatctctacgggcactgcgctgaaggcgattgccgggaagacgagcacgcgcacgacgcgaagtaa

SEQ ID NO: 71383 - DNA, 333 bp, Citrobacter koseri
atgaaaaaactgttactcatcgccatgatggcatcgggactggtggcctgcgcgcagccaaccgcgccgaaagaagacagtcagttaaaagaggcgtacagcgcctgcatcaatacggcgcaaggttcgccagagaaaatcgaggcctgtcagagcgtactgaacgtgctgaagaaagatgaccagcacaagcagtttgctacagaagagagtgtacgcgtactggattaccagcagtgcattcaggctacgcgtacggggaacgatcaggcggtgactgccgattgcgacaaaatctggcaggaaattcgcagtaaaaatagcgccaaataa

SEQ ID NO: 71384 - DNA, 1407 bp, Citrobacter koseri
atgcgtacgtttagtggcaaacgtagtacgctggcgctggctatcgccggtattacagcaatgtcaggtttggtcgtcgttccacaggctcaggccgaaggctttattgacgattccacgttaacaggcggcatctattactggcagcgtgagcgtgaccgtaaagatgtcaccgacgatgacaaatataaaaccaacctttcacacgcgacctggaacgccaacctggatttccagtctggttatgcggctgatatgttcggtctggatatcgcggcatttaccgcgatagaaatggcggaaaacggcgacagcggacaccccaacgaaatcgccttctcgaaaaagaataaaggttacgatgaagattattctggcgataagagcgggatcagcctttataaagccgcggcaaaatttaagtacgggccaacctgggcgcgtgcggggtatatccagccgaccggtcagacgctgttagcgccgcactggagctttatgccgggtacttatcagggcgcggaagccggagcgaattttgactacggtgatgcgggcgcgctgagtttctcctatatgtgggccaaccaatataaagcgccgtggcacaccgatgttgataaattctatcaggccgataaaaagaccaaagtggattacctccactctatcggcgctaaatacgatttcaaaaatgacctcgtgctggaagcggcatttggtcagtcagaagggtatgtcgaccagtattttgccaaagccagctacaaatttgatttgggcggcaacccgttcaccaccagctatcagttctatggtgcgcgcgacaaagttgatgatcgcagcgtaaacgatatttatgacggcaccgcctggttgcaggcgctgactttcggttacaaagtggccgaagtcgtcgatttgcgcctggaagggacctgggttaaggcggacggtcaacaaggttacttcctgcaacgtatgacgccaacttacgcatcctcaaacggtcgtctggatatctggtgggataaccgctcagactttaacgccaacggcgaaaaagccgtcttcttcggtgcgatgtacgatctgaaaaactggaacctgccgggctgggctgtgggggcgtcatacgtttacgcctgggacgcgaagccatcaacctggcagattaccccggatgcgtactatgacaaaaaccgtaccattgaagagtcttcttacagccttgatgcggtctacaccctacaggaaggccgtgccaaaggcaccatgtttaaactgcacttcacggaatatgacaaccactccaacatcccaagctggggcggcggttacggcaacatcttccaggatgaacgtgacgtgaagttcatggttatcgctccgttcactattttctga

SEQ ID NO: 71385 - DNA, 1668 bp, Citrobacter koseri
atgagtgaggctgaagcccgcccgactaactttattcgtcagatcatcgatgaagatctggccagtggtaagcacaccacaatccacacccgttttccgccggagccgaatggctatctgcacatcggccacgcgaaatctatctgtctgaactttggcatcgcgcaagattatcagggcctgtgcaacctgcgtttcgatgataccaacccggtaaaagaagatatcgagtacgttgattcgatcaaaaacgacgtcgagtggttaggttttcactgggctggcaacgtttgctactcctcagattacttcgatcagctgcatgcgtatgcggttgagctgatcaccaaaggtctggcgtacgtcgatgagctgacgccggatcagatccgcgaatatcgcggtacgctgaaagagccgggtaaaaacagcccgttccgcgatcgcagcgtggaagagaacctggcgctgtttgaaaaaatgcgtaccggtggttttgaagaaggtaaagcgtgcctgcgcgccaaaattgatatggcgtcgccgtttatcgtgatgcgcgatccggtgctgtaccgcattaaatttgccgaacaccaccagaccggcaacaagtggtgcatctacccgatgtacgactttacccactgcatcagcgatgcgctggaaggcattacgcactctctgtgtacgctggaattccaggacaaccgtcgtctgtacgactgggtgctggacaacatcaccatcccggttcacccgcgtcagtacgaattctcgcgcctgaatctggaatacaccgtgatgtccaagcgtaagctgaacctgctggtgacggacaaacacgttgaaggctgggacgatccgcgtatgccgaccatttctggcctgcgtcgtcgtggctataccgcggcctccatccgtgaattctgcaaacgcatcggcgttaccaagcaggacaacaccattgagatggcgtcgctggagtcctgcattcgtgaagatctgaacgaaaacgcaccgcgcgcgatggcggttatcgatccggtgaaactggttatcgaaaactacccgcagggcgaaagcgaaatggtcaccatgccgaaccatccgaacaaaccggaaatgggcagccgtgaagtaccgtttagcggtgaaatctggatcgatcgtgccgacttccgcgaagaagcgaacaagcagtacaagcgtctggtgatggggaaagaagtgcgtctgcgtaacgcctatgtggtgaaagctgagcgcgtggagaaggatgcggaaggcaatatcaccaccatcttctgtacctatgatgcggacaccctgagcaaagatccggccgatggccgtaaagtgaagggcgtcattcactgggtaagcgcggcacacgcgctgccggttgaaattcgtctgtacgatcgtctgttcagcgtgccgaacccgggcgccgcagaggacttcctgtccgtgatcaaccctgaatcgctggtgattaagcagggttacgcggaaccgtcgttgcagaacgccgtagcgggtaaagcgtatcagtttgagcgtgaaggctacttctgcctggacagccgctacacaacggcagataaacgcgtatttaaccgtaccgtaggtctgcgcgatacgtgggctaaagcgggcgagtaa

SEQ ID NO: 71386 - DNA, 1950 bp, Citrobacter koseri
atgaatattttaggttttttccagcgactgggtagggcgttacagctccctatcgcagtgctgccggtggcggcactgttgctgcgattcggtcaaccagatttactgaatgtcgcctttatcgcgcaggcgggcggggcgatcttcgataacctcgcactgatcttcgccatcggtgtggcatccagctggtctaaggacagcgcgggtgcagcagcgttggcgggtgcggtcgggtacttcgtcctgaccaaagcgatggtgacgattaacccggaaatcaacatgggcgtcctggcgggtatcattaccggtctggtgggcggcgccgtttataaccgttggtccggtatcaaacttcctgatttcctgagcttctttggcggcaaacgttttgtgccgatcgccacgggcttcttctgtctggtgctggcggcgattttcggttacgtctggcctccggttcagcacgctattcatgcgggcggtgaatggattgtcggcgcgggcgcgctgggctccggtatcttcggtttcatcaaccgtctgttgatcccgacaggtctgcatcaggtgctgaatactatcgcctggttccagattggcgagttcactaacacggcaggtacggtattccacggcgacatcaaccgcttctacgcgggtgacggcacggcggggatgttcatgtccggcttcttcccgatcatgatgttcggtctgccgggtgcggcgctggcgatgtacttcgctgcgccgaaagcgcgtcgtccaatggttggcggtatgttgctgtccgttgcgatcaccgcgttcctgaccggtgttactgagccgctggaattcctgttcatgttcctggcgccgttgctgtacctcctgcacgcaatattgaccggtatcagcctgttcatcgcgacgctgctgggtattcatgcgggcttctccttctccgcaggcgcaattgactacgtgttgatgtatagcctgcctgcggccagcaaaaacgtctggatgctgctggtgatgggcgcggtattcttcgtcatctacttcctgctgttcagcgcggtaattcgcgtgttcaacctgaaaacgccaggtcgtgaagataaagacgacgatatcgtgactgacgaagcgaacagcaacactgaagaaggtatgacccaactggcgaccaactatattgctgcggttggcggtacggataacctgaaagcgatcgatgcctgcatcacccgtctgcgcctgaccgttgccgacgcggctcgcgtgagcgatgcgatgtgtaaacgtcttggtgcgtccggcgtggtgaaactgaacaaacagaccatccaggttatcgtcggcgcgaaagcggaatctatcggcgacgaaatgaagaaagtggtggcgcgtggcccggttgcggcagcgtctgctgacagcgcgccagtgactgcggtgccggcggcaaaaccgcaggcggttcctaatgcggtgaccatcgcgacgctggtttctccagtcacgggtgacgtggttgcgctggaacaggttcctgacgaagcgttcgccagcaaagcggttggcgacggcgtggcggtgaaaccaacggataaaaccgttgtttccccggcggcaggcaccattgtgaaaatcttcaacaccaatcatgcgttctgcctggaaactgaaaaaggcgcggaaatcgttgtccacatggggatcgataccgttgcgctgaacggtcagggcttcaaacgcctggtggaagagggtgccgaagtggttgccggtcagccgatcctggaaatggatctggagttcctgaacgccaatgcgcgctcgatgattagcccggtggtttgcagcaacattgacgatttcagcggtctggtgattaaagctgaaggtcaggtggttgcgggtcaaacgccactgtatgagattaaaggcaaataa

SEQ ID NO: 71387 - DNA, 801 bp, Citrobacter koseri
atgagactgatccccctgacgtccgctgaacaggtcggcaaatgggctgctcgccatatcgttaaccgtattaacgccttcaaacctaccgccgatcgcccgtttgtcctgggcctgccgaccggcggcacgccgctgacggcgtataaagcattagtcgaaatgcacaaagcgggccaggtcagctttaagcatgtggtgacattcaacatggacgaatatgttggccttccgaaagaacacccggaaagctaccacagcttcatgcaccgcaatttcttcgatcacgttgatattccggcagaaaatattaacctgctcaacggtaacgcgccggatatcgatgcggaatgccgtaattatgaagaaaaaatccgttcttacggtaaaattcacctgtttatgggcggcgtaggtaacgacggccatatcgcgtttaacgaaccggcttcttccctggcttcccgtacgcgtatcaaaacgctgacccatgacacgcgcgtggcaaactcccgcttctttgacggcgacgtcaatcaggtgccgaaatatgcgctgaccgtaggcgtgggtacgctgctggacgcagaagaagtgatgatcctggtgctgggccatcagaaagcacaggcgctacaggcggctgtcgaaggcaacgtcaaccacatgtggaccattagctgtctgcaactgcatccgaaagcagtcgtggtgtgcgacgaaccttccactatggaactgaaagttaagacactgaaatatttcaacgagttagaagccgaaaatattaaaggtctgtaa

SEQ ID NO: 71388 - DNA, 1167 bp, Citrobacter koseri
ttgaaatcgggggtcggaatgtatgctttaacccagggccggatttttaccggtcacgaaattcttgatgaccatgcgattgttgtcgccaatggcctgattgatcgcatctgtccagtggcggaactgccgccagagatagaacaacgcgcgttgaatggggccattctctcccccggttttattgatgtgcaattaaacggctgcggcggcgtccagttcaacgataccgctgacgcggtgactgtcgaaacgctggaaatcatgcagaaagccaatgagaaatcaggctgcaccagctacctgccgacgctgattaccaccagcgacgatctgatgaaacagggcattcgcgtcatgcgtgaatacctggcgaaatacccgaatcaggcattaggtcttcatcttgaaggtccgtggctgaacctggtcaaaaaaggcacccataatccaagttttgtccgccaacctgacgctgcgctggtggacttcctgtgcgataatgccgatgtgatcaccaaagtcacgctggcgccggaaatggtgccggcagaagtgatcgctaagctggcggcggcgggcattgtggtttcagccggtcactccaacgcgacgttaaaagaggcgaaagccggtttccgcgcagggatcacctttgccacccacctgttcaacgcgatgccgtatattacgggccgtgaaccgggtctggcgggcgccattcttgacgatgccgatatttattgcggcatcatcgcggatggtctgcatgttgattacgtcaacattcgtaacgctaaacgtctgaaaggtgacaaactttgcctggtgaccgatgcaaccgccccggcgggtgcaaacattgaacagttcatttttgctggtaaaacaatatactaccgtaatggactgtgtgtggatgagaacggtacgctgagcggatcatcattaaccatgatcgaaggcgtgcgtaatctggttgaacattgcggtattgcgctggatgaagtgctgcgtatggcaacgctctaccctgcgcgcgcgattggcgtcgataagcagctcggcagcctcgcgccgggtaaagttgcgaacctgaccgccttcacccacgactttaaaatcatcaagaccatcgttaatggtaacgaggtcgttactgagtaa

SEQ ID NO: 71389 - DNA, 1221 bp, Citrobacter koseri
atgacaccaggcggacaagctcaaataggtaatgttgatctcgtaaaacagcttaacagcgcggccgtttaccgcctgattgaccagcacgggccaatctcgcgtattcagattgccgagcaaagccagcttgctcccgccagcgtaaccaaaattacgcgtcaactcattgaacgcgggctgatcaaagaagttgatcagcaggcctccaccgggggccgccgcgccatctccatcgttaccgaaacccgtaatttccatgccattggcgtgcggttgggtcgtcatgacgcaaccattaccctgtttgacctgagcagtaaagtgctggctgaagagcactacccgctgccagagcgcactcaggagacgctggaacatgccctgctcaatgccatcaccacattcgtcgacagtaatcagcgtaaacttcgcgagttaatcgcgatttccgtgatcctgccgggtcttgtcgatcccgaaagcggcgtgatccgctatatgccgcatattcaggttgaaaactggggattagttgaagcgctggaaaaacgttttcacgtaacctgttttgtcggtcacgatatccgcagtctggcgctggccgagcactatttcggtgcaagccaggattgcgaagattccattctggtgcgcgtacaccgggggactggcgccgggattatctcaaatggccgcatttttattggtcgcaacggcaacgtcggggagatcggtcatattcaggtcgagccgctgggcgagcgctgtcactgcggcaattttggctgtctggaaaccatcgccgccaacgcggccattgaacaacgcgtacagcacttactcaagcagggctaccaaagtcgcgttacgctggacgactgcacgattaaaaccatctgcaaggcagctaataaaggtgacagcttagcggcagaggtgattgaacacgttggtcgtcatctgggcaaaaccatcgctatcgctatcaacctgtttaatccgcaaaaaatcgtgattgccggtgaaattaccgaagcggataaagtgctgctgccggcgatcgaaagctgcatcaacacacaggcgctgaaagcgtttcgcaaaaatttgccggttgtccgttccacgctggatcaccgctccgccatcggcgcatttgcgctggtgaaacgcgccatgctcaacggcattttgttgcaacatttgctggaaaattaa

SEQ ID NO: 71390 - DNA, 753 bp, Citrobacter koseri
atgaccatcaagaatgtaatttgtgatattgacggcgtgctgatgcacgacaatgttgccgtacccggtgcggcagaatttctgacggatgtaatggaaaaaggtctgccgctggtgctgctgaccaattacccttcgcagaccggccaggatctggcgaaccgctttgctaccgcaggggttaacgtaccggacagcgttttttatacttccgcgatggccaccgccgattttctgcgtcgtcaggaaggcaagaaagcctatgtggtcggtgaaggcgcactaattcacgaattgtataaagcaggttttaccattaccgacgtcaatcccgattttgtgattgtcggcgagacccgctcctataactgggacatgatgcataaggcggccttcttcgtcgccaacggcgcccgtttcatcgccaccaaccccgatacccacggtcgtggtttctatccggcctgcggcgcgctctgtgcaggtattgaaaaaatctctggtcgtaagcctttttacgtcggtaaacccagcccgtggattatccgcgccgcgttaaacaaaatgcaggcgcactcggaagagaccgttatcgtcggcgacaatctgcgcaccgatattctggcaggattccaggccggtctggaaaccattctggtgctctctggcgtctcaacgctcaacgatatcgacgacatgccgttcagaccaagctggatttatccttccgtcgccgaaatcgacgttatctga

SEQ ID NO: 71391 - DNA, 1665 bp, Citrobacter koseri
atgtgttctatttttggcgtattcgatatcaaaacagacgcggttgagctgcgtaaaaaagcccttgagctgtcacgtttgatgcgccatcgcggccctgactggtccggtatttacgcctgcgataacgcgattctggcacacgagcgtctgtctattgtcgacgtcaacgccggtgcgcagccgctgtacaacgaaaagaaaacacatgtgctggccgttaacggtgaaatttataaccaccaggcattacgcgcggaatatggcgaccgctatcagttccagaccgggtctgactgtgaagtgatcctcgcgctgtaccaggaaaaaggggtggaatttctcgacgacttacagggtatgttcgcctttgcgctgtacgacagcgaacaggatgcctggctgattggtcgtgaccacatcgggatcatcccgctttatatgggtcatgacgagcacggcaacttttatgtcgcctctgaaatgaaggcgctggtgccggtctgccgcacgattaaagaattcccggcaggcagctacctgtggagcaaagacggtgagattcgtcagtattaccagcgcgactggttcgagttcgacgcggtaaaagacaacgaaacggacaaaaacgtgctgcgccaggcgctggaagagtccgtcaaaagccacctgatgtcagacgtgccatacggcgtattgctctcgggcggcctggattcctctatcatttccgccatcaccaagaaattcgccgcacgccgcgtggaagatcaggaacgttcggaagcctggtggcctcagttgcactcctttgctgtcggtctggaaggctccccggatctgaaagccgcgcaggaagtggcaaaccatctcggcaccgtgcatcacgaaattcacttcaccgtgcaggaaggtctggatgcgattcgcgacgtgatttaccacatcgaaacttacgatgtcaccaccattcgcgcctcgacgccgatgtatttaatgtcgcgtaaaatcaaagcgatgggaatcaaaatggtgctgtccggcgaaggttccgatgaagtgttcggcggctatctctacttccataaagcgccaaacgccaaagaactgcacgaagagaccgtgcgtaagctacaggcgctgcatatgtttgactgcgctcgcgccaacaaagcgatgtctgcctggggcgtcgaagcccgcgtcccgttcctggataagaaattccttgatgtggcgatgcgcatcaacccggaagacaaaatgtgcggcaacggcaaaatggagaaacatatcctgcgtgaatgttttgaatcctacctgcccgcaagcgtggcatggcgtcaaaaagagcagttctctgacggcgtcggctacagctggatcgacacgctgaaagaggtcgcggcagagcaaatttccgaccagcaactggaaaccgcccgcttccgtttcccgtacaacacgccatcttctaaagaagcgtacctgtaccgtgaaatcttcgaagagttgttcccggtacccagcgcggcagaatgtgtgccaggcggcccgtccgtcgcctgttcttctgcgaaggccatcgaatgggatgaggcgttcaaaacgatggacgatccatcaggccgcgccgtcggcgtacaccagtccgcttataaataa

SEQ ID NO: 71392 - DNA, 1176 bp, Citrobacter koseri
atgacaaatcaaccaacggaaattgccattgttggcggggggatggtcggtggcgcgctggcgctgggactggcgcagcatggatttaccgtcacggtgattgaacatgctgagcctgcgccgtttgtggccgacagccagcctgatgtgcgtatttcagcgatcagcgcggcgtcggtgtcgctgcttaaaggcctgggcgtctgggatgcggtgcaggggatgcgcagccatccgtaccgtcgtctggaaacctgggagtgggaaaacgcccatgtggtgtttgacgccgccgagcttaagttaccgctgcttggctatatggttgagaatatcgtgctgcaacaggcgctgtggcaggcgctggacgcgcacccgaaagtgacgctgcgcgtacctgcttcactgattgcgttgcatcgccacaatgatcgacatgagctggagctggcggatggtgagcgtcttaccgcaaaattggtgatcggcgctgacggtgcgaactcgcaggtacgacagctggcggggattggcattcatgcctggcagtatgctcagtcctgcatgctgattaccgtacagtgtgagagcgatcccggtgacagcacctggcagcaatttacgccagacggcccacgagcctttttaccgttgttcgacaactgggcatcgttggtgtggtatgactcaccggcgcgtattcgccagttgcagaacctgagtatgccgcagttgcaggtggaaattatgcaacattttccgtcgcgtctgggggcggtcacaccggttgcggcaggcgcttttccgctgacgcgccgccatgcgttgcaatacgtacagcctggcctggcgctggtgggggatgcggcgcataccattcatccattagccgggcagggggtaaacctggggtatcgtgatgtggatgcgctgctggatgtgttgatcagcgcccgcagtcatggcgaagtctgggccagtcaccaggtgctgaaacgctatcagacgcgccgcatggcggataacttcattatgcaaagcgggatggatctgttctatgccggtttcagcaataatcttcagccgctgcgcattatgcgtaatatcggattgatggcggcagagcgcgcaggcgtgttgaaacgtcaggctctgaagtatgcgttagggttgtag

SEQ ID NO: 71393 - DNA, 1425 bp, Citrobacter koseri
atgaccaaaaaactccatattaaaacctggggctgtcagatgaacgagtacgattcatcgaagatggccgatctgctggatgctacccacgggtatcaactgaccgaggtcgcggaagaagcggatgtgctgctgctgaatacctgctcaatccgcgagaaagctcaggaaaaagtcttccatcaattaggccgctggaaactcttaaaagagaagaacccggatctgattatcggcgtcggcggttgcgtggcctcccaggaaggcgaccacatccgtcagcgtgcgcactatgtcgatattatttttggcccgcaaacgctgcaccgcttaccggaaatgatcaactccgttcgtggcgaccgcagcccggtggtggacatcagcttcccggaaatcgagaagttcgaccgcctgccggaaccgcgtgcggaaggcccgaccgcgtttgtctccatcatggaagggtgtaataaatactgcacgtactgtgtggtgccgtatacccgtggtgaagaggtcagccgtccgtctgacgacatcctgtttgagatcgcccagcttgccgctcagggcgtgcgtgaagtcaacctgctcggtcagaacgttaacgcctggcgcggtgaaaactacgacggcaccaccggctcctttgccgacctgctgcgtctggttgccgccatcgacgggattgatcgcatccgcttcaccaccagccacccgatcgagttcaccgatgacatcatcgaagtttaccgtgatacgccagaactggtgagcttcctgcatctgccggtacagagcggcgcggatcgcgtactgaatctgatggggcgtacccacacggcgctggagtacaaagcgatcatccgtaaactgcgcgcggcgcgcccggatattcaaatcagctcggacttcatcgttggcttccctggcgaaacgactcaggacttcgaacagaccatgaagctgattgccgacgtcaatttcgacatgagctacagctttattttctcggcgcgtccgggaacaccggcggccgatatggttgacgatgtgccggaagaagagaaaaagcagcgtctgtatattctacaggagcgtattaaccagcaggcgatggcctggagccgtcggatgctcggcaccgtccagcgtattctggtggaaggcacctcgcgtaagagcattatggaactgtcaggccgtaccgaaaataaccgcgtggtgaactttgaaggcaccccggagatgatcggtaagtttgtggatgtggaaatcaccgatgtctacaccaactctctgcgcggcaaggttgtacgcaccgaagatgagatggggctgcgtgtggctgaaacgccggagtcagtcattgcccgtacccgtaaagaaaacgagattggcgtcggtttttaccagccttaa

SEQ ID NO: 71394 - DNA, 1047 bp, Citrobacter koseri
ttgaacatagacactcgcgaaattacccttgagcccgcagacaacgcccgtctgttgagcctttgcggcccgtttgacgacaacatcaaacaactggaacgccgtctcggcatcgagatcaaccgtcgtgacaatcactttaagctgaccggtcgcccgatttgcgtcaccgccgcggtagatatcctgcgcagcctgtacgtcgataccgccccgatgcgcggtcagattcaggacatcgagccggaacaaatccaccttgcgattaaagaagcgcgcgtgctggaacaaagcgcggagagcgttcctgactatggcaaggcgataaatattaaaaccaagcgtggcgtgattaagccgcgcacgccgaatcaggcgcagtacatcgccaacattcttgatcacgacattactttcggcgttggccctgccggtacggggaaaacctacctcgccgttgccgccgccgtggacgctcttgagcgtcaggaaattcgtcgtattctgctaacccgtccggcagtggaagccggggaaaaactgggctttctgccaggcgacctgagccagaaggtcgacccgtatcttcgcccgctgtatgacgcgctgtttgagatgctcggcttcgagaaagtagaaaagctgattgagcgcaacgtcattgaagtcgcgccgctggcctatatgcgcggtcgtacgctgaacgacgcctttattattctcgatgagagccagaacaccaccatcgaacagatgaagatgttcctgacgcgtatcggctttaattcgaaagcggttattaccggcgacgtcacgcagattgacctgccgcgcaacacgaagtctggcctgcgccatgcgatagaagtgctggcggaagtcgaagagatcagctttaacttcttccacagcgaagacgtggtgcgccatccggtggttgcccgtatcgttaacgcctatgaagcctgggaagaagcggaacaaaaacgcaaggcagcgctggcggcagaacgtaagcgtgaagcgcaggagcaggaacaaaaatga

SEQ ID NO: 71395 - DNA, 468 bp, Citrobacter koseri
atgagtcaggtgatcctcgatttacaactggcatgtgaagaccattccggcctgccggaagagagccagtttcagacgtggctgaatgcggtgatcccacagtttcaggaagaatcagaagtgacgattcgcctggtggatgaagccgaaagccacgatcttaacctgacctaccgcgggaaagataagccaaccaacgtgctctctttcccgtttgaagcgccgccaggtatggagatgccgctgctgggcgatctgatcatctgccgccaggtggtggagcaagaagcaaaagagcaggataagccgctggaggcccactgggcgcatatggtcgtgcacggcagcctgcatttgctgggctacgaccatatcgaagacgatgaagcggaagagatggaagccctcgaaacagagattatgcttgctctgggctatgaggacccgtacatttccgagaaaggctaa

SEQ ID NO: 71396 - DNA, 948 bp, Citrobacter koseri
atgccgtcagccgttaagtatatgcatgacgagcgacctattaaccaacatgagaacccatacgacgccatgagcgacgacaattcacacagtagtgacacgttaaacagcaaaaagggatttttttccctgttactgagccaacttttccacggtgaacccaaaaaccgtgacgaactgctggcgctgatccgtgattccgggcagaacgaccttatcgatgaagatacgcgcgatatgctcgaaggggtgatggacattgcggaccagcgcgttcgcgacatcatgatcccccgctcccagatgattaccctgaaacgcaaccagacgctggatgagtgccttgatgtcatcattgagtcagcacactcgcgtttcccggtcatcagcgaagacaaagatcacattgaagggattctgatggcgaaggatctgctgccgtttatgcgcagcgatgccgaagccttcagcatggaaaaagtgttacgccaggccgttgttgtcccggagagtaagcgcgttgaccgcatgctcaaagagttccgctcccagcgttaccatatggcgatcgttatcgacgagtttggcggggtgtcgggtctggtgaccattgaagacattctcgaactgatcgtgggtgaaattgaagacgagtatgatgaagaagacgatatcgacttccgtcagctcagtcgccacacctggaccattcgcgctctcgcaccgattgaagacttcaacgaagccttcggcaccagcttcagcgatgaagaggtcgataccattggcggtctggtgatgcaggcgttcggtcatctgcctgcgcgcggtgagaccattgacattgatggttaccagttcaaagtcgctatggccgacagccgtcgtattattcaggttcatgtcagaataccggatgactcgccccagcctaaactggacgaataa

SEQ ID NO: 71397 - DNA, 1539 bp, Citrobacter koseri
atggcatttgcctcactgattgaacgccagcgcattcgcctgctgctggcgttattgttcggcgcctgcggaacgctggctttttctccgtatgacgtctggcccgccgcgcttatctcgcttatgggcctacaggcgttaaccttacaccgtcgcccgctccagtcggctgctatcggctacttctgggggctgggactctttggctccggcatcaactgggtctacgtcagtatcgcgcagttcggcggtatgcccggcccgataaacgtcttccttgtggtgctgcttgccgcatacctttctctctacacgggcctgtttgccggtattctgtcgcgtctgtggccgaaaaccacctggctgcgcgtggcgatcgccgcccccgtagtctggcaaatcaccgagtttctgcgtggctgggtactgactggcttcccgtggctacagttcggctatagccagattgacggcccgctaaaagggctggcgccggtgatgggcgttgaggccatcaacttcctgctgatgatggtcagcggcctgctggtgctggcggcagttacccgcaactggcgtcctctggtcgtcgcgctggtgttatttgccctgcccttcccgctgcgttacatccagtggtatacgctggagccggaaaaaaccacgcaggtatcgctggttcagggcgacattccccaatcgctgaagtgggatgagagtcagcttatcaatacgctgaaaatctatctcgacgccacccagccggaaatgggtaaatcgcaactgattatctggccggagtccgccattcccgatctggagattaatcagcagcgttttctgggcatgatggacgatctgctgaaatccaaaaacagcacgttgattaccggcatagtcgatgcgcgtctgaacaagcagaaccgctacgacacctacaacacgattatcacgctgggtaaagacagcccgtacagctacgattccagcaatcgctacaacaaaaaccacctggtgccgtttggcgagttcgtgccgctggagtcgattctgcgcccgttagcgccgttctttgacctgccgatgtcctcattcagccgtgggccgtacatacagccacagctgcatgcgcatggctttaaactgacggcggcgatttgctacgaaatcattctgggtgaacaggttcgggacaatttccgcccggacactgactatctgctgaccatctctaacgacgcctggttcggaaaatctatcggcccgtggcagcacttccagatggcgagaatgcgttctctggagctggcgcgcccgctgttgcgcagcaccaacaacggcattacggcagtcattggcccgcagggtgaaattcaggcgatgatcccgcagtttacccgcgacgtgttgaccacccacgttacgccaacccgtggtttaacgccttatgcccgtaccggcaactggccgttatggttgctcaccgcgctgatgggctttggcgccgtggtgatgagcctgcgtcagcgtcgtaaataa

SEQ ID NO: 71398 - DNA, 909 bp, Citrobacter koseri
atgcaattacgtaagctagccacagcaatgctggtcatgggaatgtctgccggtctggcacacgcggaagacgccgcgccggcggcgggcagtacgctggataaaatcgcgaagaatggcattatcgtcgtcggccaccgcgagtcctccgtgccgttctcttactacgacaaccagcaaaaagtggtcggttattcacaggactactccaacgccatcgttgaagccgtgaagaaaaagcttaacaaacctgacctgcaagtgaagctgatcccaattacctcccagaaccgtatcccgctgttgcagaacggaaccttcgactttgaatgtggctccaccaccaacaacgtcgaacgccagaaacaggccgcgttctctgacaccattttcatcgtcggtacgcgtctgctggcgaaaaaagacggcgatattaaagacttcccggacctgaaagggaaagcggtcgtggtcacctccggtaccacctctgaaattctgctgcacaagctgaatgaagaacaaaaaatgaatatgcgcattatcagcgcgaaagaccacggcgactccttccgtacgctggaaagcggtcgcgccgtcgcctttatgatggatgatgccctgctggcgggtgaacgcgcgaaagccaaaaaaccagacaactgggagatcgtcggtaagccgcaatctcaggaagcctacggctgtatgctgcgtaaaaacgatcctgagtttaaaacgctggtagatgacacgattgcccaggtgcagacctcaggcgaagcggaaaaatggtttgataagtggtttaaaaacccaatcccgccgaaaaacctgaacatgaatttcgaactgtccgacgagatgaaggcgctgttcaaagaaccgaatgacaaagcacttaactaa

SEQ ID NO: 71399 - DNA, 741 bp, Citrobacter koseri
atgtcaatagactggaactgggggatttttttacaacaagccccgttcggcaacaccacgtatctcggctggctctggagcggcttccaggtcaccgtcgcgttatccatcaccgcctggattattgctttcctcgtcggctcgttattcggcattttacgtactgtacctaaccgcttcctctcaggaatggggacgctttacgtggaactgtttcgtaacgtcccgctgattgttcagttctttacctggtatctggtcgtgcctgagctgttgccggaaaatatcggcatgtggttcaaggcggaactggacccgaacattcaatttttcctctcatcaatgatctgcctggggctgtttaccgctgcgcgcgtctgcgagcaggtacgcgccgcgattcagtcgctgcctcgcgggcagaaaaacgctgcgctggcgatggggctgacgctgcctcaggcttatcgctatgttctgctaccgaacgcctatcgggtgattgtcccgccgatgacctcggaaatgatgaacctggtgaaaaactccgccatcgcatcgaccattggtctggtggatatggcggcgcaggcgggcaagctgctggattactccgcccacgcctgggagtcattcaccgcgattacgctggcctacgtgctgattaatgccgtcattatgctggtgatgaatctggtggaacgtaaagtccgcctgcctggcaatatgggaggcaaataa

SEQ ID NO: 71400 - DNA, 675 bp, Citrobacter koseri
atgtacgagtttgactggagttcgatcgttccttccatgccgtacttgctggccgggctggtgatcaccctgaaaattaccgtcaccgccgtggtgatcgggattctctggggcaccattctggcggtaatgcgtctctcaagtttcgcccctgtcgcctggtttgcgaaagcttacgtcaacgttttccgctccatcccgctggtgatggtgctgctatggttctacctgattgtgccggggctgttgcaggacgtactgggtatttcgcccaaaacggatattcgcctgatttcagcgatggtcgcgttttccatgtttgaagcggcgtattactcggagattatccgtgcgggtattcagagcatttcacgcgggcagtccagcgctgcgctggcgctggggatgacccactggcagtcgatgaagctcatcatcctgccgcaggcgttccgtgcgatggtgccgctgctgcttacccagggtatcgtactgttccaggatacctccctggtttacgtgttaagcctcgcggatttcttccgcaccgccaccaccattggcgagcgtgatggtacgcaggtcgaaatgatcctgtttgccggtgccgtctactttgttatcagcctgagcgcgtcgttgttggtcagctatttgaagaaaaggacagtttaa

SEQ ID NO: 71401 - DNA, 726 bp, Citrobacter koseri
atgattaccctgaaaaatgtttctaaatggtatggtcactttcaggtgctgaccgactgctccacggaagtgaaaaaaggtgaagtggtggtagtctgcggcccgtcgggttccggtaaatcgaccctgatcaaaacggtgaacggactggaaccggtgcaacagggtgaaatcaccgttgacggcaccaaagtgaatgacaaaaaaacggatctggcgaagctccgctcgcgggtcggaatggtgttccagcactttgaactattcccacatctgtcgatcattgaaaacctgacgctggcgcaggtgaaagtgctcaaacgcggcaaagcgcccgcccgtgaaaaggcgcagaagttgcttgagcgcgtaggactttcggcccatgccaataagttcccggcgcagctttccggcgggcagcaacagcgtgtggcaatcgcgcgcgcgctgtgcatggaccctatcgctatgctgtttgatgaaccgacatccgcactcgatcctgaaatgatcaacgaagtgctggacgttatggtcgagctggcaaacgaagggatgaccatgatggtcgtcacccacgaaatgggctttgcccgtaaggtggccaatcgggtgatctttatggacgaggggaaaattgtcgaagactcgccgaaagaggagttcttcgccaacccgaaatcggaccgcgccaaagacttcctggcgaaaatcctgcattaa

SEQ ID NO: 71402 - DNA, 939 bp, Citrobacter koseri
atggcacttccagtcctttttgattgcgatccaggtcatgacgacgctatcgcaattgttctcgccctcgcatcgcctgaactggatgtgaaagcgatcacctcttccgccggtaaccagacgcctgacaaaacgctgcgtaacgtattgcgtatgctgacgctactggggcgtaccgatattcctgtcgcaggcggcgcgataaaaccgctgatgcgcgatctgatcatcgccgataacgtacacggcgaaagtggactggacggcccggcgctgccggagccgtcatttgcgccgcagacctgcaccgccgttgagctgatggcgaaaaccctgcgcgaaagcccggaaccggtaaccatcgtcgccaccgggccgcaaaccaacgtcgccttgctgctgaacagccatccagaattgcaccgtaaaatcgcccgtattgtgatcatgggcggcgcgatgggattaggtaactggacaccagcggcagaattcaatatttacgtcgatcccgaagcggcagagattgtcttccagtcagggattcccgtggtgatggccgggctggacgtaacgcacaaagcgcagattcacgctgaagataccgagcgtttccgggcgataggcaatcctgtttccacgatcgtggcggagctgctggatttcttcctcgaatatcacaaagacgaaaagtggggctttatcggcgcgccgttgcatgacccttgcaccatcgcctggctgctaaaacccgagcttttcaccaccgttgaacgttgggtcggcgtggagactcaggggaaatacacccagggaatgacggtcgtggattattacttcctgacggggaataaaccgaatgcgacggtgatggtcgatatcgaccggcagggctttgtggatttactggcggagaggctgtcgttctacgcatcataa

SEQ ID NO: 71403 - DNA, 483 bp, Citrobacter koseri
atgaacaaggttgctcaatattaccgtgaactggtgacgtcattaagcgaacgcctgcgtaatggcgaacgcgatattgacgcgctggtggaacaggcgcgtcagagcgtaatgaaagcaggggagttaacgcgaattgaggtggacgaactgacgcgcgccgtcagacgcgacctggaagagttcgccatgagctacgaggagagccaggaagaggagagcgacagcgtctttatgcgggtgattaaagagagcctctggcaggagctggcggacatcaccgacaaaacgcaactggagtggcgcgaagtgttccaggatctcaatcaccacggggtctaccacagcggcgaggtggttggcttgggcaaccttgtgtgcgagaagtgtcattaccatttagcggtgtatacgccggatgtactgccgctgtgcccgaaatgcggccacgaccagttccagcgcagaccgtttgagccgtaa

SEQ ID NO: 71404 - DNA, 2583 bp, Citrobacter koseri
atgcaagagcaataccgcccggaagagatagaatcaaaagtccagcaacactgggacgagaagcgcacctttgaagtaaccgaagacgagagcaaagagaagtattactgcctgtcgatgcttccctatccttctggtcgactacacatgggccatgtgcgtaactacaccatcggtgatgtgattgcccgctaccagcgcatgctgggtaaaaacgttctacagcccatcggctgggatgcattcggcctgcctgctgaaggcgcggcggtgaaaaacaacacggcgccggcgccgtggacctatgacaacatcgcctacatgaaaaaccagctcaaaatgctgggcttcggctatgactggagccgcgagctggcgacctgcaccccggaatactaccgctgggagcaaaaattcttcaccgagctgtataaaaaaggcctggtgtacaaaaagacctctgcggtgaactggtgcccgaacgaccagaccgtactggcgaacgagcaggttatcgacggctgctgctggcgctgcgacaccaaagttgagcgtaaagagatcccgcagtggttcattaagatcaccgcctacgccgacgaactgctgaacgatctggataaactggatcactggccagacaccgttaaaaccatgcagcgcaactggatcggccgttctgaaggcgtcgagatcacttttgacgtgaacggctacgacaatacgctgacggtgtacaccacgcgtccagacacgttcatgggcgccacttacctggcagttgccgcaggtcacccgctggcgcagaaagcggctgccaacaacccggaactggctgcctttatcgacgaatgccgcaacaccaaagtggcggaagccgatatggcgacgatggagaaaaaaggcgtcgacaccggttttaaagccattcacccactgaccggcgaagcgatcccggtatgggccgccaacttcgtgctgatggaatacggtactggtgctgttatggccgttccgggccacgatcagcgcgactacgaatttgccaccaaatatggcctgaccatcaagccggttatcctggcggcggacggctctgaaccggatctgtccgagcaggcgctgaccgagaaaggcgtactgtttaactccggcgaatttaacggtctgggctttgaagacgccttcaacgcgattgccgataaactggcggcgaaaggcgtcggcgagcgtaaagtcaactaccgtctgcgcgactggggcgtttcccgtcagcgttactggggcgcgccgattccgatggtgactctggaagacggcaccgttctgccgaccccggaagatcaactgccggtcatcctgccggaagatgtcgtcatggacggcatcaccagcccgatcaaagccgatcctgagtgggcgaaaaccaccgttaacggtcagcctgcgctgcgtgaaaccgacacctttgacacctttatggagtcctcctggtactacgcgcgctacacctgcccgcagtacaacgaagggatgctggacccggaagcagcaaattactggctgccggtcgatatctacatcggcggtattgaacacgcgatcatgcacctgctctacttccgcttcttccacaagctgatgcgcgacgcgggcatggtgaactctgacgaaccggcgaaacagctactgtgccagggtatggtgctggcagacgcattctactatgtaggcgaaaacggcgagcgtaactgggtttccccggttgatgccatcgttgagcgcgacgagaaaggccgcatcgttaaggcgaaagacgcggcgggccatgagctggtgtacaccggcatgagcaagatgtccaagtccaaaaacaacggcatcgacccgcaggtaatggttgagcgttacggcgcggacaccgtgcgtctgttcatgatgtttgcttctccggccgatatgacgctggaatggcaggaatctggcgtggaaggggcaaaccgcttcctgaagcgcgtctggaaactggtctatgagcacaccgcgaaaggcgaggttgcggcactgaacgttgatacgctgagcgaagatcagaaagcgctgcgtcgcgacgtccacaaaaccatcgcgaaagtgaccgatgatatcggccgccgtcagaccttcaacaccgcgattgccgcaattatggagctgatgaacaaactggcgaaagcgccgcaggaaggcgagcaggatcgcgccctgatgcaggaagcgctgctggctgtcgtgcgtatgctcaacccgttcaccccacatgcctgcttcacgctgtgggaagcgctgaaaggcgaaggcgatatcgataacgcgccgtggccggtcgctgacgacaaagcaatggtagaagactctacgttggttgtggttcaggtgaacggtaaagtccgtggcaaaatcaccgtaccggtgaacgccactgaagaacaggttcgtgaacgtgctggccaggaacatttggtcgcaaaatatcttgatggcgttaccgtgcgtaaagtgatttacgttccgggtaaactcctcaatttggtcgttggctaa

SEQ ID NO: 71405 - DNA, 594 bp, Citrobacter koseri
gtgcgacatctgacaacattgttgttatccctggcggtgctggtcaccgccgggtgcggctggcatctgcgtagcactacgcaggtgcccagcacgatgaaaactatgattcttgatacaagcgatccgaatggaccattaagccgggcggtacgtaaccaactgcgtcttaacaatattgaattgcttgaaaaagatacaatgcgccaggatgttccgtcactgcgccttggccggaccagtatctctaaagataccgcctccgtgttccaggatggccgtacggcggaataccagatggtcatgagcgtcagtgcaagcgttctgatcccgggtcatgatatttatccgatcagcacgaaagtgtaccgttcattctttgataacccgcaaaccgcgctggcgaaggataatgaacaggatatgatcatcaaagagatgtatgacaaagcagccgaacagttgattcgcaagctgccgagtatccatgtcgctgatgctcagtcatcccaggaaaacgcggacgccgctgaaaacaccacggcgacgccagcatcttccccggcacgcgtgtccaccacgctgggtaactga

SEQ ID NO: 71406 - DNA, 1032 bp, Citrobacter koseri
atgatccggttgtaccctgaacaactccgcgcacagctcaatgaagggctgcgcgcggcgtatttgctcctgggcaacgaccctctcttgttgcaggaaagccaggacgctattcgtctgacggccgctgcgcaagggttcgaagaacaccacgcctttacgatcgacaccagcaccgactggggaactctgttctcacagtgtcaggcaatgagcctgtttgccagccgtcaaacgctgctgttgttgctaccggaaaatggcccgaatgcggcgatcaatgaacagctcgcaacgctcagcggtttgctgcatgacgacctgttgctgatcgtgcgcggaaacaagctcactaaagcccaggaaaacgccgcctggtatacctcactggcgggcactggcgtgcaggtaagctgtcagacgccggagcaggcgcagctaccgcgctgggttgccgccagagcaaagcagaataatttgcaactggatgacgccgcgaatcagctgctgtgttattgctacgaaggcaacctgctggcgctggcgcaggcgctggagcggctttcactcctctggcctgacggtaagcttacgcttccacgcgtagagcaggccgtcaacgacgcggcgcacttcacgccataccattgggtggatgcgttattgatgggcaaaagcaaacgcgccctgcatattttgcagcaactgcgccttgagggcagtgagcccgtgatcctgctgcgcaccctgcaacgcgaattactgatgctggttaaccttaaacggcaatccgcccatacgcctctgcgcacgctgtttgataaacatcgggtatggcaaaaccgtcgcggcatgattggcgatgcgttgaatcggctccagcagacccagcttcgccaggcagtgcaactgttgacgcggacggaaattacgctaaaacaagattatggacagtcagtgtgggctgagctggaagggctttctcttcttctctgccacaaagcgctggcagatgtttttattgatggttga

SEQ ID NO: 71407 - DNA, 663 bp, Citrobacter koseri
atgtttttattgatggttgatatgaaatcgttacaggctctgttcggcggcacctttgatcccgtgcattatggtcatctcaagcccgtggaaacgctggccaatctgattggcctgtcgcgggtgattatcatgcccaataacgtaccgccccatcgtccacagcctgaagcatccagcgcacagcgtaaatatatgcttgagctggctatcgccgacaaaccgctgtttatcctggatgagcgcgaactcaaacgcgataccgcctcttacaccgcgcaaacgctgaaagagtggcgggaagaacaaggcccggacgcgccgctggcgtttatcatcggccaggactccttactgacgttcccgacctggcacgactatgaaaccattctggacaacactcacctgatcgtttgccgacgccccggctacccgcttgagatggtgaaagagcagcatcagcagtggctggagcgccatttaacccatacgccggacgatctgcacgcgctcccggcgggtaaaatttatctggctgaaacgccctggttcaatatttccgccacccttatccgcgagcggctggagaaaggcgaaccgtgcgacgatctcatgccggaatccgtcctgaactacatcaaccagcaagggttgtatcggtaa

SEQ ID NO: 71408 - DNA, 1095 bp, Citrobacter koseri
atgcctttactgaagagtgcgcatggcggtaacacccgggaagccgccgcattgttgggcatctcgcctgaacagttgctggattttagcgcaaatattaatcctctgggtatgccagggcgcttaaaacgcgcgcttatcgacaatcttacctgcgcggagcggtatcctgatgtggattatctgcatctgcaccaggcactggcgcagcaccatcagatccccgcgtcatggctcctggccggaaatggcgagacggaatccatcttcacgctggttcacgggctgaagccgcgtcatgccatgatcgtcacgccgggctttgccgagtatcgccgtgcgctacagtggggcgcgtgtgagatacatgaatttgcgcttcgcgaagccgatggctggcaactcacggacgccattctgaatgcgctgaccccggatctggactgcctgtttctctgtacgccaaataatccaaccggactcctgcctgcccgcgagctgttactggctattgcggagcgctgtaagacgcaggggatcgcgctgatcctggatgaggcgtttatcgattttattccgggtgaagagggctttattccgctgttgcagggcaacccgcatatctgggtgctgcgttcgctcaccaaattttacgccattccggggctgcggctgggctatctggtgaacagcgacgagcaggcggtcgcgcaaatgagagcgcaacagatgccctggtcaatcaacgcgtttgcggcgctggccggagaggttatcttgcaggatgccgcctatcaccaggcgacctggcagtggctggcggaggagggacaacgcttccgtcagcggttatatgcgtttcctgagctaacggtttatcccggtcgggcgaattatcttttattacgctgtgagcgggaaggtctggatttgcaacgcgccttgctggagaagcacattctgatccgcagctgtgctaactatccggggcttgacgcgcgttattaccgggtggcgattcgcagtcaggaagagaacagccgtctgctgacggcgctggcggaagtctttaccgatacaacccttgctggttga

SEQ ID NO: 71409 - DNA, 612 bp, Citrobacter koseri
atgcgactctggttagttcgtcatggggaaaccgaagccaatgtagccggattatacagcggccacgcccccactccgctgacagaaaaagggatagcccaggcgcaaacgttgaataacctgctgcgcaatgtccccttcgacaacgtattctgtagcgaactggaacgcgcccgccacacggcgcggctggtgcttcacgaccgcgacgtaccgcagcgcctgttcccggagcttaacgagatgttttttggcgactgggagatgcgtcatcaccgcgatctgagccgcgaagacgcggcaagttacgcggcctggtgcaccgactggcagaacgccgtcccgaccaatggggaaggcttccaggcattctcacaacgcgtagagcgttttattgcacaacttgctgattataaagataataaaaacctattggtcgtgagccaccagggggttctgagtctcatgatcgcgcgattattgtccatgcccgccgcctcattatggcatttcagggttgagcagggatgctggagcgccattgatttttgtgaagatttcgccacgctgaaggtgttaaacagtcgggccgtctggcatcacggcgagtga

SEQ ID NO: 71410 - DNA, 318 bp, Citrobacter koseri
ttgcagggtaaagcactccaggattttgtaatcgacaaaattgatgacctgaaaggtcaggacatcatcaccttagatgttcagggtaaatccagtatcaccgactgcatgattatctgcaccggtacatccagccgtcacgttatgtctattgctgaccacgttgtacaggaatctcgcgcggcgggcatgttgccgcttggcgttgaaggtgaaagcgtagccgactggattgtcgttgacctgggtgatgtgattgtccatgtcatgcaggaagagagccgtcgcctgtatgaactggaaaaactctggagttaa

SEQ ID NO: 71411 - DNA, 468 bp, Citrobacter koseri
gtgaagcttcaacttgtcgctgtcggtacgaaaatgcccgactgggtacaaaccggttttacggagtatctccggcgttttcctaaagacatgccgtttgagctgatcgaaattccagcgggcaaacgcggcaagaacgcggatattaaacgtattctcgataaagagggtgagcagatgctggcggccgcaggcaaaaaccgtatcgtcacccttgatatcccagggaaaccctgggacacgccgcagctggcgactgagctggagcgctggaagctggatggtcgcgacgtcagtctcctgattggcggccctgaggggttgtctccggcctgtaaagcggcggcggaacaaagctggtcactttctgcgttaaccctcccccacccgctggttcgggtgctggtggcagagagtctgtaccgggcgtggagcattaccaccaaccacccttatcaccgtgagtga

SEQ ID NO: 71412 - DNA, 1902 bp, Citrobacter koseri
atgaaactacagaattcttttcgcgactatacggctgagtccgcgctgttcgtgcgccgggcgctggtcgcttttttgggtattttgctgctgaccggcgtgctcatcgccaacctttataatctgcaaatcgtgcgttttaccgattaccagacccgctcgaacgaaaaccgcatcaaactggtccctatcgcccccagccgtgggatcatctatgaccgtaacggcatccccctcgccctcaaccgcactatttatcagatagaaatgatgccggagaaggtcgataacgttcagcaaacgctggatgcgttacgcagcgtggtcgatttgaacgacgatgacattgccgcgttcaagaaagagcgcgcgcgttcacaccgttttacctctattcccgtcaaaacgaacctgaccgaagtgcaggtcgcgcgttttgccgtcaaccagtaccgttttcctggcgtggaagtgaaaggctacaagcgccgctactatccttacaactccgcgctgacccacgtcatcggctacgtttcgaagattaacgataaagacgtcgaacgccttgataaagacggtaagctggccaactacgccgccacgcacgatatcggcaagctggggattgagcgctattacgaagaggtgctgcacggccagacgggttatgaagaggttgaagttaacaaccgtggccgcgtcatccgtcagcttaaagaggtgccgccgcaggccgggcatgacatccatctcacaattgacctgaaactccagcaatatattgaaacgctgctggcgggcagccgcgccgccgtgatcgtaaccgacccacggacaggcggcgtactggcgctggtttccatgccgagctacgacccgaacctgtttgtggatggcatctccagcaaagattactcagggttgctcaacgacccgaatacgccgctggttaaccgggcgacgcaaggtgtttacccgccggcctcaacggttaaaccgtatgtcgcggtgtccgctttaagcgctggggtgatcacccgcaataccagcctgttcgaccccggatggtggcagttgccgggttctgagaagcgttaccgcgactggaaaaaatgggggcacggtcatctgaatatcaccaaatcccttgaagagtcagcggataccttcttctaccaggtggcctatgacatggggatagaccgactctccgagtggatgagcaaatttggatacggggaatataccggcatcgatctggctgaagagcgttccggcaatatgccaacccgtgaatggaagcaaaaacgctttaaaaagccgtggtatcagggcgataccatcccggtgggcatcggccagggttactggacggcgaccccgatccagatgagcaaggcgctgatgatcctgattaacgacggggtggtaaaagtgccgcatctgctgatgagcacggcggagaatggcaagcaggtgccgtgggtacagccgcacgaaccgcctgtcggcgatattcactccggttactgggaaatcgccaaagacggcatgtacggcgtcgcaaaccgcgcgaacggcactgcgcataaatatttcgccagcgcgccgtataaaatcgccgcgaagtctggtacggcgcaggtctttggcctgaaagccaacgaaacctacaacgcgcacaaaattgctgaacgactacgcgaccataaactgatgacggcattcgcgccgtataacaatccccaggttgctgtcgccataatcctggaaaacggcggcgcgggcccggctgtcggtacaatcatgcgtcagattcttgaccacatcatgttgggcgacaacaacaccaatttgcctgcggaaaacccggcggttgcagcggcggaggaccaataa

SEQ ID NO: 71413 - DNA, 1113 bp, Citrobacter koseri
gtgacggataatccgaacaaaaaaacattctgggataaaatccatatcgatcccacgatgttactgattctgctggcgctgctggtttacagttcattagtcatctggagcgccagcggccaggatattggcatgatggagcgaaaaatcggtcagatcgcgatgggtctggtcattatggtggtgatggcgcaaatcccgcctcgtgtctacgaaggatgggcgccctatctctatattttctgcatcatcctgctggtggcggtagacgccttcggggcgatatccaaaggagcgcaacgctggctggatctggggatcgtccgctttcagccttctgaaatcgccaagatcgccgtccccttgatggtggcgcgctttatcaaccgtgatgtctgcccgccgtcgctgaaaaacacggctatcgcgctggtattgatttttatgccgacgctgctggtcgccgcgcagcctgacctgggcacctcgattctggtcgccctttccggcctgttcgtgctgtttttgtctggtttgagctggcgtttaatcggcattgcggtggtgctgattgccgcgtttatcccgatcatgtggttcttcctgatgcatgattatcagcgccagcgcgtcatgatgcttctcgacccggagaccgaccctttaggcgcgggttatcatatcatccagtctaaaattgcgattggctccggcggcctgcgcggtaaaggctggctgcacggcactcagtcgcagcttgagtttttacccgaacgccacaccgactttatcttcgccgtactggcggaagagttaggcctggtgggaatattaatcctgctggcgctctacattctgctgattatgcgcggactgtggatcgctgcccgcgcgcaaaccacctttggccgcgtgatggccggtggtttaatgttgatattattcgtttatgtcttcgtaaatattggtatggtgagcggtattctgcccgttgtaggggttccactcccgctggtcagttacggaggctccgcactgatagtgctgatggccgggttcgggattgttatgtcgatccacacccacagaaaaatgttgtcgaaaagcgtgtaa

SEQ ID NO: 71414 - DNA, 1119 bp, Citrobacter koseri
atgcgtaagcagttgccaggagtctgcgtcgcggcaggaataatgttactcgcggcgtgttcgagtgatgatggtcagcagcaggttgccgtcgcgccgcagcctgcggtgtgtaacgggccgattgttgagatcggcggggcggagccacgttatgaacctctgagcccgacagcaaatcaggattatcaacgagacggtagaagttacaaaattgtccaggacccgtctcgctttagccaggccgggcttgccgctatttatgatgcggaacccggcagcaatttgaccgcatcaggcgaagcgtttgacccgatgcagctcaccgctgcgcatccaacgctgccgatcccgagctatgcgcgaatcacgaatctggcgaatggccggatgatcgtggtacgcattaacgatcgcggcccttacggtaacgatcgggtcatttcactctcccgcgcggcggccgatcgtctgaatacgtcgaataacaccaaagtccgcgttgatcccattatcgttgcgcaggatggttcactgtcagggccaggcatggcctgcacgactgtggcgaaacagacctacgccctgcccgcgcgccctgatttaagcggcggcatgggcagcgtctcttccgcgccggaatcagtacagccgcaaggcgatgtccgggcgataagcaattcgacactgaaaagcgatgatccaagcggcgcaccggtcaacagcagcggcttccttggcgcgccgaccacgctcgcctccggggtgctcgaaggcagcgaagcaacgcccgcgccacaacccgccgcagcgacacccgccgcgccggtaacggctcctggttcgactcagggcgcagtcgctgccccgacgccaaccccggctgccgcaagcagcggtttcgtggttcaggttggcgcggtcagtgatcaaacgcgcgcgcagcagtaccagcagcgtttaagccagcagtttggcgtaccgggccgtgtgatgcaaaacggcgcggtctggcgcattcagcttgggccattcgccagcaaaactgaagccagcgcgttgcagcagcgtctgcaatctgaagcccagttacagtcctttatcgccagcgcgcagtag

SEQ ID NO: 71415 - DNA, 1212 bp, Citrobacter koseri
atgaagaccactttttccgctcgtttcatgcagcgcatggcgctcaccacggctctttgcgccgcctttatcacaagcgcgcatgccgatgacctgaatatcaaaaccatgatcccaggcgttccgcagatcgatgcggagtcgtatatcctgatcgactacaactccggcaaagtgctggcggaacagaatgcggatacgcgccgcgatcccgccagcctgaccaaaatgatgaccagctatgtcatcggccaggcgatgaaagcagggaaatttaaagaaaccgatctagtgacgatcggcaacgacgcctgggctaccggcaacccggtatttaaaggctcatccctgatgttcctgaaaccgggtatgcaagttccggtttcccagttaatccgtggtattaacctgcaatccggcaacgacgcctgcgtggcgatggccgactttgccgccggtagccaggatgccttcgtcgggctgatgaacagctatgtgaatgccctgggtctgaaaaacacccacttccagaccgttcatggcctggatgctgatggacaatacagctctgcgcgcgacatggcactgatcggccaggcgttaatccgcgatgtgccaaacgaatactccatctacaaagaaaaagagttcaccttcaacgggattcgccagttaaaccgcaatggtctgctgtgggacaacagcctgaacgttgacgggatcaaaaccggccacacggataaagcaggctacaacctcgtggcgtcggcaactgaaggccagatgcgcctgatctctgcggtgatgggtggacgtacctacaaaggtcgtgaaacagaaagcaaaaaactgctgacctggggcttccgcttctttgaaaccgtgaacccgctgaaagtcgggaaagagtttgcctctgaaccggcctggtttggcgataccgatcgcgcctcgctgggtgtggataaagacgtctatctgactatccctcgcggccgcatgaaagatctgaaagccagctacgtgctgaacacggcggaactgcatgccccgttgcagaaaaaccaggtcgtcggcacaatcaacttccaattggatggcaaaaccattgagcagcgcccgctggtggtactacaggaaattcctgaaggtaacttcttcggcaaaatcattgattacattaaattaatgttccatcactggtttggttaa

SEQ ID NO: 71416 - DNA, 264 bp, Citrobacter koseri
atgaaaaccaaacttaacgaactgcttgaattccctacgccatttacttacaaagtaatggggcaggcgttgcctgagctggttgatcaggtggttgaagtggtacagcgccatgcgccaggtgattactccccgacggtaaaaccgagcagcaaaggtaactaccactcggtctcaatcaccatcaacgcaacccatatcgagcaggttgaaacactgtacgaagaactgggtaatatcgatatcgttcgtatggtgctgtaa

SEQ ID NO: 71417 - DNA, 642 bp, Citrobacter koseri
ttgtatcaggataaaattcttgtccgccagctcggtcttcagccctacgaacccgtttcccaggccatgcacgaattcaccgatacccgcgatgaaaacacgcccgatgagatctggttagttgagcactttcctgttttcacccagggtcaggccggtaaagcggagcatgtattaatgcccggcgatattccggtgatccagagcgatcgtggcgggcaagtcacctatcacggccccggccagcaggtaatgtatgttctgctgaatcttaaacgccgtaagctgggcgtgcgggagctggtaacgctgctggaacaaaccgtcgtcaatacgcttgccgaactgggtattgatgcgcatccgcgagccgatgcgcccggagtttatgtgggagaaaaaaagatctgctcactgggtttacgaatccgtcgcggctgctcttttcatggtctggcattaaacgtcaatatggatctctctccgttcttacgcatcaatccttgcggttatgccgggatggaaatggcgaaaatatcgcaatgggataataacgcaacgacggataatattgcccctcgcctgttggccaatattttagccctgctaaacaatccacctcatgaatatattcctgcttaa

SEQ ID NO: 71418 - DNA, 975 bp, Citrobacter koseri
gtgaatgataataatctgccgggacgacgtctaatcgagcaacggccagaagacaaacctcaaattttcagaacgctgagaaatattgaccttaatctcttgactatttttgaagcggtatacgttcataaaggcatcgtcaatgctgcgaaaattcttaatttaacgccatccgctattagccagtctattcaaaaattacgcgctatatttcccgacccgctatttatccgtaaaggccagggcgtgaccccgacggcctatgccacccacctgcatgagtatattagccaggggttggaatctattctgggcgcgctggatctgaccggcagctacgacaaacagcgcaccatcacgataggcacgcctccctctatcggggcgttagtcatgccaaccatctatcaggcgatcaaatcccggtatccgcagcttctgttacgcaacattccggtaagcgacgccgaatgccagctcagccagtttcagaccgatttggtcatcgatacccatatctacagtagtcgggccattcatcaccatgtgctgtttgccgatactgttgagctggtttgtcgccaggatcacccttcactttccgccccgctaaccgaagagaagctgaaagcggtcgaccatactctgctgatgctcgaagggcagaatttcagcctggtgcgtcagcgtatccaggatctcttccctgaacgacaaatcaactttagcagctacaacatcttcaccattgcctcactcatcgccagcagcgacctgctggggatgatgcctacccggttctacaccttatttagccgttgctggccgctcaagcgcattccctatgcgccactgagcgatgagagaatcgacttttcgctgcattacaacaaattaagcttgcgtgacccggtgctggagaatgttattgatgtaatacgcgatgcgtttcgaaccggagatgttgctgcttag

SEQ ID NO: 71419 - DNA, 966 bp, Citrobacter koseri
atgagtaaacccattgtgatggaacgcggtgtcaaataccgcgatgccgataagatggcccttatcccggttaaaaatgtggcaacagagcgcgaagccctgctgcgtaaaccggaatggatgaaaataaagcttccagcggactccactcgtatccagggcatcaaagcggcaatgcgcaaaaatggcctgcattctgtctgcgaggaagcctcttgccctaacctggcggaatgtttcaatcacggaaccgccacctttatgatcctcggcgcgatttgtacccgccgttgcccgttctgtgacgttgcccacggccgccctgtcgccccggataccaacgaaccgttaaaactggctcagacgattgcagatatggcgttacgctatgtggttatcacctccgttgaccgcgatgatctgcgcgatggcggcgctcagcactttgctgactgcattaccgcgattcgtgaaaaaagcccggcaattaaaattgaaacgctggtgcctgacttccgtggtcgtatggatcgcgcactggagatccttaacgccactccgccagatgtcttcaaccataaccttgaaaacgtaccgcgtgtctatcgtcaggtacgcccaggcgccgattacaactggtcgctgaagctgctggagcgtttcaaagaggcccacccggaaatcccaaccaaatcgggtctgatggtcggtctgggagaaaccaacgctgaaatcattgaggttatgcgcgacttgcgccgtcatggcgtcaccatgctgacgctgggccagtatttacagccaagccgccatcacctgccggtacagcgttatgttagcccggaagagttcgatgagatgaaagccgaagccatggcgatgggctttacccatgccgcttgcgggccgtttgttcgttcttcttaccatgcagacatgcaggcgaaaggactggaagtgaagtga

SEQ ID NO: 71420 - DNA, 204 bp, Citrobacter koseri
atgggtgagattagtattaccaaactgctggtggttgccgcactggtcgttctgctgtttggtaccaggaagttacgtacgctgggcggagacctgggcacggcaattaaaggtttcaaaaaggcgatgaatgatgaagacgctggcgcgaaaaaagaagcgggcggcgatattcaggctgagaaactctctcataaagagtga

SEQ ID NO: 71421 - DNA, 789 bp, Citrobacter koseri
atgctcgttgcagcaggacaatttgccgtggcgtcggtctgggaaaagaacgccgaaacatgcgtttcgttaatgtctcaggcggcagaaaatggcgtttccttactggtgttgcctgaggcgctgctggctcgcgacgatcgcgatcccgatctgtcggttaagtccgcgcagctactggagggcggatttttgcgctgcttactgcgtgagagcgcgcgcaatacgatgacgacaatcctgacgattcatgttccttcaacgccggggcgggcattcaacatgcaggttgcgttgtgcgggggaaagattgttgcgcattacgccaagctgcatttgtacgatgccttttcgattcaggagtcccgcagcgttgatgcaggcgacaccattgctccgctgctggatgttgaggggatcaaagtcgggttaatgacctgctatgacctgcgcttcccggagctggctctggcgctggctttgcagggggctgacattctggtgctgcctgccgcctgggtaagaggggcgctgaaagagcatcactgggcgaccttactggcggcaagagcgctggattcaacctgctatatcgttgccgcaggggagtgcggcaacaaaaatatcggtcaaagccgaatcgtcgatccgtttggcgtcacaatagccgctgcggcagagactccggcgctgattatggccgaggtctccgccgagcgcgtcaggcaagttcgggcgcaacttcccgttttgcgtaaccgtcgttttgcgccaccgcaattattatga

SEQ ID NO: 71422 - DNA, 384 bp, Citrobacter koseri
gtgttacaactccttttagcagtttttattggcggtggtacaggaagcgtagcgagatggatgttgagtatgcggtttaatccgcttcatcagtccattccgttcggcaccctgacggcgaatttgatcggcgccttcatcatcggtatgggcttcgccttatttagtcgcatgacgaatattgatccgatgtggaaggtattgattaccaccggtttttgcggcggactgaccacgttttccaccttctcagcggaagttgtttttttgctccaggatgggcgttttggctgggcgatggtgaatatactggtcaacctgctcgggtcatttgccatgaccgcgcttgcgttttggctgttttcggcatccaccgcgcattaa

SEQ ID NO: 71423 - DNA, 210 bp, Citrobacter koseri
atgtctaagattaaaggtaacgttaagtggtttaatgaatccaaaggattcggtttcattactccggaagatggcagcaaagacgtgttcgtacacttctctgcaatccagactaatggttttaaaactctggctgaaggtcagcgcgtagagttcgaaatcactaacggtgccaaaggcccttctgctgctaacgtaatcgctctgtaa

SEQ ID NO: 71424 - DNA, 564 bp, Citrobacter koseri
gtgattgtcgctaaaaaatattttcttactctttcatttctctttgtgcaattcgcccttctgccccaggccttttcagcagataaaggctggtttgatacgctgaaagataatgtgtcggaaacctggcaacaacccgagcattatgatttgtacgtgccggccattacctggcatgcgcggtttgcctacgataaagaaaaaacggatcgctacaatgagcgcccgtggggggcagggtttggtcagtcacgctgggatgataaaggcaactggcatgggctttacatcatggcgtttaaagactccttcaataagtgggagcctatcggcggttacggttgggaaaaaacctggcgacctctggcagatgaaaacttccacatggggctaggatttaccgctggcgcaacggcgcgtgataactggaagtacattccggtgccggttctgttgccgttagcctcgataggctacggtctggcaacgttccagatgacctacatccccggtacgtataacaacggtaacgtctactttgcctggatgcgtttccagttttga

SEQ ID NO: 71425 - DNA, 1386 bp, Citrobacter koseri
atgctaacgtttattgaactccttattggggttatggttattgtgggtgtagcgcgctacatcattaaaggttattcggcaaccggcgtgctctttgtgggcggcctggtgctgctgattatcagcgcgttaatggggcataaagttctgcccgccagtgaaaccagtaccggctacactgcaacggacatcgttgaatacattaagattctgttgatgagccgtggtggcgacctcggtatgatgatcatgatgctgtgcggtttcgccgcctacatgacgcatatcggcgcaaacgacatggttgtaaaactggcctccaaaccgctgcaatacattaactcaccttacctgctgatgatcgccgcctattttgtcgcctgcctgatgtcgctggcggtctcttcggcaacagggcttggcgtattgttgatggcaacgctctttccggtgatggttaacgtcgggatcagccgtggcgctgccgcagcaatctgcgcttcccccgcagcgatcatcctctctccgacctcaggcgacgtggttctggcggcaaaagcggctgagatgccgttgattgattttgcctttaaaacgaccctgccgatctccattgccgccattatcggtatggcgattgcccactttttctggcagcgttatctggataaaaaagagaacatctcccatgaaatgctggatgtaaacgaaattaccaccaccgccccggcgttttacgccattctgccattcacaccgattatcggcgttctgttttttgatggtaaatggggtccgcagctgcacattattactattctcgtcatctgtatgctgctcgctgccgtgctggagttcattcgcggattcaatacacagaaagtcttttccggtctggaagtcgcgtaccgcgggatggctgacgcgtttgcgggcgtggtgatgctgctggtcgcagccggggtattcgctcaggggctgagcactatcggtttcatccagagtctgatctctatcgccacctcgtttggctccgccagtattatcctcatgctggtactggtgatcctgaccatgctcgcggcaatgaccaccggttccggtaacgcgcctttctatgcctttgtcgaaatgattcccaaactggcgcactcttccggtattaacccggcttacctgtccattcccatgttgcaggcttcaaatctggggcgcacgatctccccggtctctggcgtcgtcgttgcggtggcagggatggcgaagatttcgccgtttgaagtggtgaagcgtacttccgttccggttatggtcgggctgctggttgtcatcattgcaactgaagtgatggtgccaggcacttcttctgctgtggcgggtggttaa

SEQ ID NO: 71426 - DNA, 678 bp, Citrobacter koseri
atgacggaaccattaaccctattgatcgttgaggatgaaacgctgctggcggaaatgcatgcggaatatatccgccatattcccggtttcagccagatatggctggcgggcaatctggcgcaggcccgtatgatgatcgaacgttttaaacccgggcttattctgttggataactatctgccggatgggaagggcatcacgctgctgcatgaactgatgcaggcgcgctatcccggcggaattgtgtttaccacggccgccagtgatatggaaaccgtctccgaagcggtgcgctggggggcgtttgattatctggtgaagccgattgcctatgagcgcctggggcagacgcttacgcggtatcagcaacgccggcgtatgctggcaggtaacgatagcgccagccagcggcagattgacgagatgtttaatgcctatgcgcgaggggagccaaaaggtgatttgccgaccgggattgatgctctgacgctgaatgccgtgctgaagctgtttagcgacccagcgacgcgccatacggctgagacggtggcgcaggcgttgacgatcagccgtaccacatcccggcggtatctggagtattgcgccagtcagcatttgattattgccgagattattcacggtaaagtgggcaggccgcagcgtatttaccacggttga

SEQ ID NO: 71427 - DNA, 1662 bp, Citrobacter koseri
atgcccgacccaaaaaataaaaaacggtttcttttttttcgtcaactcgcgttcccgctgcggatttttctgctcattctggtcgtttctgttttcatcatcgcggcgttagcccgctatttttccgccagctttgaagactatctggcatcgcatgtcagggatatggcgatgaaccaggcaaagattatcgcctccaacgacagtatcatcacggccgtgaaacaccgggattacaggcggctggcgaccatcgcggataaactacaaagcgacaccgattttgattatgtggtcatcggcgacaaaaactcgattcgcctctaccatcctaacccggaaaaaattggttatccgatgcagttcacgaaacccggcgcgctggagaacggtgagagctatttcatcaccggtaaggggtctattggtatggcgatgcgtgctaaaacgccgatatttgacgacaatggcaacgtgatcggcgtggtttccatcggttatctggtcagtaaaattgacagctggcgactggattttttactgccgatggcgggcgtattcgtcctgttgctggtggtgcttatgctgctttcctggtttttcgccgcccacattcgccgccagatgctggggatggagccaaagcagattgcgcgcgttgtgcgccagcaggaggcattattcagttcagtgtatgaaggattaattgcagtcgacccggaagggcacattaccgccattaaccgcaacgcgcgaaaaatgctggggctgcgttcgccgggacggcaatggctgggtaagtcgatagagacggtagttaatcctgcggacttcttcacacagcagattgcggaaaaacgccaggatgtgatggcgaatttcaatgggttgagcgttattgccaatcgtgaggccattcgctccggggatgaattactgggggcaatcatcagctttcgcagcaaggatgaaatttccaccctgaacgcccaactgacgcaaataaaacagtatgtggagagcctgagaacgctgcgtcatgaacacctgaactggatgtcgacgctcaacggtctgctccagatgaaagagtatgatcgggtcagggaaatggtgcagggcgagtcgcaggcgcaacagcaactgatcgatagtctacgcagcgcgtttgccgatcgccaggtcgccggtctgctgttcggcaaagtccagcgggcgcgggagctggggctaaaaatgacgatcgtgcctggcagtcagctgcaccgactcccggaagggcttgatagcaccgaatttgccgcgattgtcggcaatcttctcgataacgcgtttgaagccagtttgcgtacccgggaagggaataacgtcgttgaactctatttgagcgacgaaggggacgatgtggtgattgaagttgccgatcagggatgcggcgttcctgaatctctgcgcgaaaaaatatttgaacagggtgtcagcacccgaaccgatgaaccaggcgaacatggcatcgggctgtatctgattgcaagttatgtggggcgctgtggcggggtgattacgctggaagataatgatccctgtggcaccttgttttctctatttcttccgaaagtgaaaaaaaacgatgacggaaccattaaccctattgatcgttga

SEQ ID NO: 71428 - DNA, 1077 bp, Citrobacter koseri
atgttcggtaataatgtattcacgcaagtgaaacgctcagaaaataaaaagatggcggttatcacgcaatttctgaaagagaatgatttaagcgtagataccaccgtcgaagtttttattaccgttacgcgcgatgatcgtcttattgcctgcggcggtattgccggaaatatcattaaatgcgttgctatctgccaatccgtgcgcggcgaagggttggcgctgacgctggctacagagttaatcaacctcgcctacgaaaggcactgtacgcacctcttcatctacaccaaaacagaatacgaagcgctctttaaacagtgtggcttctcaacgctggctgatgtgcctggcgtgatggtgctcatggaaaacagcaatacgcgcctgaaacgctacgctgaatccttaacgaaactgcgtcatgacgggaaaaaaatcggctgtatcgtcatgaacgccaaccccttcacaaacgggcatcgctatctgatccagcaggccgccgcacagtgcgactggctgcatctgttcctggtaaaagaggatacgtcgcgttttccgtacgaggacaggtttgatctggtgatcaaaggaacaacggatattccacgcctgactgtgcatcgcggttccgagtacatcatctcgcgtgcgacctttccgtgctacttcatcaaagaacaaagcgtcattaaccactgttacaccgaaatcgacctgaagattttccgccagtacctggcgccagcattgggtgtaacacaccgttttgtcggcacggaaccgttttgcaccgtcacctcccagtacaaccacgatatgcgctactggctggagacgccaacgcttcccgccccgcccatcgagctggtggaaattgagcggctgtgtttccaggagatgccgatttccgcctcctgggtgcgcaagttgctggttaaaaaagatctcacggctatcgcaccgctggttcccaaccccactctgcactatctgcaaggcatggttgaacgtaacccgtccagcgcggtagtccgccaaaagacccccgcattagaaacaggtgaaaaatga

SEQ ID NO: 71429 - DNA, 297 bp, Citrobacter koseri
atgaaaatagaccaggctgccgtcgctggcacacttgagtccggtgatgtgatgattcgcattgctccactcgacacgcaggatattgacctgcaaatcaacagcagcgttgaaaaacagtttggcgacgccattcgcgccaccattctggatgtgcttgcccgttataacgtccgcggcgtgcaattaaatgttgatgacaaaggcgcgctggactgcattttgcgtgcgcggctggaagcgttactggctcgcgccagcggcatccccgctctgccgtgggaggatcgccaatga

SEQ ID NO: 71430 - DNA, 909 bp, Citrobacter koseri
atgatttccgcttctctgcaacaacgtaaatcccgcacccggcgcagcatgctgttcgtccccggcgcaaatgccgcgatggtcagcaactcgtttatctacccggccgatgcgctgatgttcgacctggaagactccgtcgcgctgcgtgagaaagataccgctcgccgtctggtgtatcacgccctgcaacacccgctgtaccgtgatgtggaaaccattgtccgcgttaatgcgctggattccgaatggggcattaacgaccttgaagcggtggttcgcggcggcgctgacgttgtccgtttgccgaaaaccgacaccgctcaggatgttaccgacatcgagaaagagatcctgcgcattgagcaaacctgcggccgtgaacccggcagcaccgggctgctggccgcaatcgagtcgccgctgggcattacccgcgccgttgaaatcgcccacgcctccgaacgtctcatcgggatcgcgctgggggcggaagactatgtgcgcaatctgcgtaccgaacgttccccggaaggcaccgagctgctgtttgcccgctgctccattttacaggcggcacgctccgcaggcattcaggcgttcgataccgtctattccgatgccaataacgaagcgggtttcctgcacgaagcgtcacacatcaaacagctgggttttgacggcaagtccctcatcaacccacgccagattgaactgctgcacaacctgtatgccccgacgcttaaagaagtcgcccatgcgcgtctggtcgtggaagccgcagaagccgccgcccgtgaaggccgcggcgtcgtctccctgaacggcaaaatggtagacagcccggtgattgaacgcgcccgtctggtgctctcccgtgcagaactttccggcattcgcgaagaataa

SEQ ID NO: 71431 - DNA, 1533 bp, Citrobacter koseri
atgacgcagaaaatcgaacaacttcaacgacaagaacgggtagcggcctggagtcgccatgccgaaagcgaattttccgcttttcagagcacttcaaaactgaatttacaggcgcaaaaaccgcgcgataaaaaactgtgcgccacgcttgaagaagccatccgccgttctggtttacaggatggaatgaccatctctttccaccacgctttccgtggcggcgacctgacgatcaacctggtgatggacaccatcgccagcatgggctttaaaaacctgacgctggcctccagttcgctgagcgattgccacgcgccactggtcgggcatattcgccagggcgtcgtgagccgaatttacacgtctggtctgcgtggccctctggcggaagagatctcccgcggattgctggatgagcccgtacaaatccactcccacggcggtcgcgtccatctggtgcaaagcggtgagctcaatatcgatgtggccttcctcggcgtgccgtcctgcgatccgtttggcaatgccaacggctacaccggtaaagcctgctgcggttcgctgggctatgcgaaagtggatgccgaaaacgctcgccaggttgttctgctgacggaagcgctgctgccgtatccgcataatccagccagtatcgcccaggaccaggtggacctcatcgtgcagatcgaacgggtaggcgacgccgacaaaattggcgcagatgcgacccgtatgaccaccaacccgcgtgaactgttgattgcccgcagcgcggcagacgtgattgccaactcaggctatttccaggaaggcttctctctgcaaaccggaaccggcggcgcctctctggcagtaacccgttttctggaagacaaaatgcgcagccgcgatattcacgcggatttcgcgctgggcggcattaccgccacgattgtcgacctgcatgaaaaagggctgatccgcaaattgctggacgtacagagcttcgaccgtaacgccgcagaatcgctggcccgcaacccgaatcacatcgaaatcagcgccaaccagtatgccaactggggctcaaaaggcgcatcggtcgatcgtctggatgtcgtggtgctgagcgccctggaggtggatacccagttcaacgtgaacgtgctgaccggttccgatggcgtactgcgcggcgcgtcaggcggtcactgcgataccgccgttgccgccgcgctgtcaatcatcgtcgcaccgctggttcgcggccgcatcccgacgctggtcgataacgtgctcacctgcgtaacgcctggctccagcgtcgacattctggtgaccgaccacggcatcgccgtcaacccggcgcgcccggagctggcggaacgcctgaaagaagcgggaatgaaagtggtctccattgaatggctgcgtgaacgtgcgcagttgctcaccggccaacctcgcgccattgaatataccgatcgcgtcatcgccgtagtgcgttaccgcgacggttcggtcattgacgttgttcatcaggtgaaggaataa

SEQ ID NO: 71432 - DNA, 552 bp, Citrobacter koseri
atgcacctgctccctgaacaggccactcgccatgcggtttccattcccgagctgctcgtcagccgtgatgagagacaagcgcggcaacacgcctggctgacgcgccatctcactccactggtctcctttaccgtggtggcgcccggcccgattaaagacagcgagcttactcgccgaatcttcaatcacggcgtaaccgccctgctcgccgtggcgaaaaaagcaggctggtctgtcagggagcaggctgcactggcctcagccagtgggccggaagggttcctcgccattgaggcgccagcccgcgatctcaagctcgccacgatcgagcttgagcatcagcatccgctgggacgtttatgggatatcgatgtgctgacgccggaaggcgacattctgtcccgccgtcatttttcgcttcctgtccgccgctgcctgttgtgcgagcaaagcgccgctgaatgcgcccgggggaaaacccacgcgctttccgacttacttattcgcatggaggcgctgctgcatgatgccgattccagccacatcaactga

SEQ ID NO: 71433 - DNA, 909 bp, Citrobacter koseri
atgatgccgattccagccacatcaactgattccgccgccattcctcagacgctgcttgacgcctacgccctgctggcgtggcgcgccatgctgactgaggttaatttatctcccaagccgggtctggtcgatcgcattaactgcggcgcgcacaaagacatggcgctggaagatttccatcgcagcgcgctggccattcagggctggctgccgcgttttatcgaatatggcgcgagctgcgcgcagctaccgtcagacgatgtactgaaagggctacgtccattaggtatggcctgcgaagccgacatgtttcgcgccactgccggcgttaacacgcataaaggcagcatattttccctgggactgctgtgcgccgccatcggacgcctgcaccagcagcattccccgatcactcctgtaaacatctgctcgaccgccgcaacattttgccggggtctgaccgagcgtgaactgcgacagaacaatcaacaactcaccgcaggtcaacgcttgtaccaacaactggggttaactggcgcgcgcggcgaagccgaagcgggttacccgttagtgatccgccatgctttaccacactaccgcgcattgctggcgcaggggcgcgaccccgagctggcgctgctcgacaccctgctgctgctgatctcaatgaacggcgacaccaacgtcgcatcacgcggcggcgcggaaggcctgcgctggatgcaacagcaggcgacaacattattacggcaaggaggcattcgttctcctgccgatcttgaacatctccaccggttcgatcagcagtgcattgcacgcaacctcagcccaggcggcagcgccgacttgctgatcgtcacctggtttttagcacaaatttcgcaagttaatcatttacataattattga

SEQ ID NO: 71434 - DNA, 1464 bp, Citrobacter koseri
atgtctttatctaaagataatatatggaagttattggccccattagtcgttatgggcatcatgtttttgatccccgtcccggacggcatgccccctcaggcatggcactacttcgccgttttcgtggcgatgatcgtcgggatgatactggagccgattccggccaccgcgatcagttttatcgcggtgaccatttgcgttatcggcagcaactatctgttatttgatgcctcagagctggccgacccggcctttaacgcgggcaagcaggcgctgaaatggggtctggcgggcttctccagcaccaccgtctggctggtgttcggcgcattcattttcgcgctgggctatgaagtcaccggtctgggccgccgtattgcgctcttcctggtgaaattcatgggtaaacgcaccctgacgctgggttatgccattgtcatcatcgatattctgctggcgccgtttacgccgtccaacaccgcgcgtaccggcggtacggtattcccggtgatcaagaacctgccgccgctgtttaagtcgtttccaaacgatccttccgcgcgccgcattggcggttacttgatgtggatgatggtcatcagtaccagcctcagttcttccatgttcgtgaccggcgcggcgcctaacgttctgggtctggaattcgtcagcaaaattgccggcattcagatcagctggttgcagtggttcctgggcttcttaccggtagggatcattctgctgatcgtcgcaccgtggctctcttacgtactctacaaacccgaagtgacccacagcgccgaagttgcggcatgggctggcgaagagttaaaaacgatgggcacgctgacccgcaaagagatgacgctgatcggtctggtgttgctcagcctcggactgtgggtatttggcggtgaagtgattgacgccaccgctgtcggtctgctggcggtatccctgatgctggcgctgcacgttgtgccgtggaaagacatcacgcgttataacagtgcgtggaacacccttgttaacctcgcgacgctggttgtcatggccaacggcttaacccgttcgggctttatcgactggtttgctaccacaatgagcgcccatctggaaggcttctcacctaacgcaacggtgattgtgctggtactggtgttctactttgctcactacctgttcgccagcctgtccgcacataccgcaaccatgctgccggtcattctggcgataggtaaaggtattccaggcgttccgatggagcaactttgtattctgctggtgctgtccatcggtatcatgggctgcctgacgccgtatgcaacagggccgggggtcatcatctacggctgcggctatgtaaaatccaaagattactggcgtctcggcgcgatctttggggtcatctacatcaccatgctgctggtggttggctggccgattctggcgctgtggaactaa

SEQ ID NO: 71435 - DNA, 807 bp, Citrobacter koseri
atgaaatcaacatggcgttatggttctctcctggcggtattcctgcttcccctcttcaacgttaacgctgagccacttcaggcaaaacagtacgctgattttgaccgctatgtgctggcgctctcctggcaaaccggtttttgtcaaagtcagcatgagcgcgatcatcgggaacccgaagagtgccgtcagcagaaagagattcccaacaaagctgattttctgactgtccacggtctgtggccaggtctgccgggatcggttgccgcgcgtggcgtggacgagcgccgttggatgcggtttggctgcgcgactcgtccgatccccaatctgccggaagcgcgcgccagccgtaaatgcgccgcgcctgaaaccggcctttcactggagagcgcggcaaaactcagcgcggtcatgcccggagccggtggaaaatcctgcctggaacgttatgaatacgccaaacacggtgcctgctttggatttgatccagacgtttatttcggcacaatggtacggctgaaccatgagataaaacacagcgcgctgggcgattttctggctgcaaattacgggaaaagggtcagccgcgccgcgtttgacgctgccgtcgcccaaagctgggggaaagaaaacgtgaaggcggtgaaactgagctgccacgggaacccggcctatctgacggaaatacagttctcgctcaacgccgccaggattaacgatccgctttccgcttcctcgtttatatcgcaaccccatccgggcaattgcgggaagcggtttgtgattgacaaagcgggttactga

SEQ ID NO: 71436 - DNA, 411 bp, Citrobacter koseri
atgtccagaccaactattatcatcaacgacctcgacgccgaacgcatcgaccgcctgttggagcagcctgcgtttgctggtttacccattgctgatgcattaaatgcggagctggatcgcgcccagatgtgctcgccggaagccatgccgcacgacgtcgtcaccatgaacagtcgggtgaaattccgcaatctcagcgatggcgagattcgcgtgcgcacgctggtgtatccggcgaatatgaccgacagcaatacgcagctttccgtaatggcgccggtgggcgcggcattgctgggcctgcgcgttggcgataccattcactgggatctgcctggcggggcgtccactcaccttgaagtgctggaacttgaatatcagcctgaagcagcgggcgactacctgcgctaa

SEQ ID NO: 71437 - DNA, 429 bp, Citrobacter koseri
atgtataagacaatcattatgccggttgatgttttcgaaatggaacttagcgacaaggccgtgcgccacgcagagtttctggcgcaacaggatggcgtcattcatctgttgcatgttcttccgggctccgccagcctgagtctgcaccgctttgccgccgacgttcgtcgttttgaggagcatttgcagcacgaagcggagactcgcctgcaaacgatggtgagtcatttcagtatcgacccttcccggattaagcagcacgtccgctttggtaacgtgcgggatgtggtgaacgaactgggcgaagagctgaatgcggacgtcgtggtcattggctcccgcaatccgtctatcaccacgcatttgctgggttctaacgcctccagcgttgtccgccatgctacgttgccggtgctggttgtgcggtaa

SEQ ID NO: 71438 - DNA, 1566 bp, Citrobacter koseri
atgctcgacactaacatgaaaactcagctcaaagcgtatcttgagaaactgaccaggcctgttgagctgattgccacgctggacgacagcgctaaatcggcagaaatcaaggaattgctggctgaaatcgctgaactgtcagagaaagtcacatttaaagaagataacagcctgccggtgcgcaagccttctttcttgatagcaaacccgggttctgaccaggggccgcgctttgcgggttctccgctggggcatgaatttacctcgctggtgctggcgctgttgtggactggcggccatccgtcgaaagaggcgcagtctctgctggagcagatccgcgatatcgacggcgatttcgagtttgaaacttattactcgctctcctgccacaactgccctgacgtcgtacaggcgctgaacctgatggcggtgctgaacccgcgtatcaaacataccgcgattgacggcggcacattccagaatgaaatcaccgatcgtaatgtgatgggcgttccggctgtgtacctgaacggtaacgaattcggtcagggacgtatgacgctgacggaaatcgtcgccaaagtggataccggcgcagaaaaacgggcggcggaagagctgaataagcgtgacgcttacgacgtactgattgtcggttccggcccggcgggggcggcagcggcagtttactccgcacgtaaaggcattcgtaccggtctgatgggcgagcgttttggcggtcaggtgctggataccgttgatatcgagaactatatttccgtgccaaaaacggaagggcagaagctggctggcgcgctgaaagcgcacgttgatgattacgatgttgacgtgatcgacagccagagcgcgagcaaactgcttccggcggcaacggaagggggcctgcatcagattgagaccgcttccggcgcggtgctgaaagcccgcagcattatcattgccaccggtgccaaatggcgcaacatgaacgtgccgggcgaagatcagtaccgcacgaaaggcgtaacctattgcccgcactgcgacggcccgctgtttaaaggcaaacgcgttgcggtgatcggcggggggaactccggcgtggaagcggcgattgacctcgcggggatcgttgagcacgttacgctgctggaatttgcgccagaaatgaaagccgaccaggttctgcaagataaagtgcgtagcctgaaaaacgtcgacattattctgaacgcgcagacaacggaagtgaaaggcgacggcagtaaagtgacggggctggaatatcgcgatcgcgtaagcggcgacatccacaacgttgcgctgtccgggatcttcgtacagattggcttgctgccaaacaccaactggctggaaggcgcgattgagcgtaaccgtatgggcgaaatcatcattgatggccggtgcgaaaccagcgtgaagggcgtattcgccgcaggcgactgcaccacggttccttacaaacagatcatcatcgcgacgggcgaaggcgcgaaagcctctctgagcgcatttgattatctgatccgcagtaagacggcataa

SEQ ID NO: 71439 - DNA, 564 bp, Citrobacter koseri
atgtccttgattaataccaaaattaaacctttcaaaaaccaggcgttcaaaaacggtgaattcatcgaagtaaccgagaaagataccgaaggccgctggagcgtcttcttcttctacccggctgacttcactttcgtatgcccgaccgaactgggcgacgtagcagatcattacgatgaattgcagaaactgggcgtagacgtttactctgtttctaccgacacccactttactcacaaagcatggcacagcagctctgaaaccatcgcaaaaatcaaatatgcgatgatcggtgacccgactggcgccctgacccgtaacttcgacaacatgcgtgaagacgaaggtctggctgaccgtgcgactttcgttgttgacccgcagggtatcatccaggctatcgaagttaccgctgaaggtatcggccgtgacgcatctgacctgctgcgtaaaatcaaagcggctcagtatgttgccgctcacccaggcgaagtttgcccggctaaatggaaagaaggcgaagcgactctggctccatccctggacctggtcggcaaaatctaa

SEQ ID NO: 71440 - DNA, 747 bp, Citrobacter koseri
atgataaaacgaacattgctgctgacgctgttcccgctcatcgcctttgctgaagaactgcctgccccggttaaagcgatagaaaaacaaggaattacgatcctgaagtcttttgacgcccccggcggaatgaaaggctatctgggcaaataccaggatatgggcgtgaccatctacctcacgcctgacgggaagcacgcgatttccggctacatgtacaacgaaaaaggcgcaaacctcagtaatgcgctgatagaaaaagagatctacgccccggtcggcagagaaatgtggcagcggatggaaaaagcgtcgtggattctggacggcaaaaaagaggcgccggtgattctttatgtctttgcggaccctttctgcccttactgcaaacagttctggcagcaggcgcgcccctgggtcgaatccggcaaagtacagctgcggacgctactggtgggcgtgatcaaacccgaaagcccggcaacggctgccgctatcttatccacccgcgatccggcaaaaacctggcatgactatgaagcgtcaggcggtaaactcaacctggcgatcccttcaccgctgccagaagataagatgaaaacgctgaatattcatcagaaactcatggacgatctgggggcgaatgcaacgccagccatttactatatgaataaagaaaatatgttacagcaggtcgtcgggttaccggaaaaagcgcaactggacattatgatgggtgaacattaa

SEQ ID NO: 71441 - DNA, 903 bp, Citrobacter koseri
atggctaatctctacgatctcaaaaaattcgatctcaacttgctgattatttttgagtgtatctaccagaatttaagcattagtaaagcggcggaaacgctgtacatcaccccgtcagccgtgagtcaatctctgcaacgattacgaactcaattcaacgatcctttatttattcgttcaggaaaaggcatcacgccaaccgtcaccggtataaatctgcatcatcatcttgaggaaaacctcaatagcctggaacaaacaattaatattatgcatagttccagtcttaagaaaaaatttatcatttacagcccacagctacttactgcaatgaacgtaataaagctgattaattttattatggaagattcttccgttgaaattgagcatcatgatatcctgatgtctgcggaatcagcagaagacctgctggcataccgcaaggcggacatggtgatcaccaccacgccgctgaacaaccattcggttgtctgtacgccttttaaaacaatcaaaagcgtactggtgtgtcgtgccgatcaccccagaatcagcgacgccagtacattagcgcaaatactcgaagaaccgtttacctcataccagggagaggagccaggcgttaaagaataccagtcgctggtcaactcccttcttgccagccggaaaattgggtttcgcagtgactcgatggttgcaatcattaatactattgctgaaaccaacataattggcatcgttcctgaagtcatatatgacttctttcactccacccttaaactgcaacgggttaatattgatcaagatttaccttcagttcagttatacctggtatataatcgaacgtcactgaataacaaaggttttacgagtatcattaacaaaatgacggaaaatagctga

SEQ ID NO: 71442 - DNA, 1236 bp, Citrobacter koseri
atgtctgtttataaaatcccacttgaccaaaatgttttggaagctgcggaagagcgcattacatggacactcaccaccttaccgcgtatttgcgtgtcattttccggggggaaagactcagggttgatgctgcaccttaccgccggaatcgcgcgtaagttaaagaagaagatctgcgtaatatttattgactgggaagtgcaattctcctgcacaattgactatgttcagtcattacgcgaacaatattccgatgtcattgaacatttttactgggttgccctgccgctcaccacacaaaattcgctgtcgcaataccaacccgaatggcaatgctgggacccgaatgccgaatgggtgcgtcaaccgcctgccgacgccattaccgatccggcttactttcctttttatcagccaggcatgaccttcgaacaatttgttcgcgactttgccgagtggttttcagaaaagcgtcctgcggcgatgctgatcggcatccgcgctgacgaatcttacaatcggtttgtcgctatcgcctccctgagcaaacagcgttttgcggacgacaaaccctggacgaccgccgctcagggcgggcacacctggtatatttacccgatgtatgactggaaaacggcagacatctggacatggttcgcaaaaacgaagcagccttgcaacccgctttataacctgatgtaccaggccaacgtgccgctccggtatatgcgcatctgcgaacctttcggcccggagcaacgtcagggattgtggctctatcatgtcattgaacccgaacgctgggcagcaatgtgcgccagggtaagcggcgtgcgcagcggagggatatatgcaggccaggataaccatttttacggccatcgaaaaatactgaaacccgagcaccatagctggcaaagctacgccatgctgctgttggacagcatgccggaacagagcgccgagcattaccgcaacaaaatcgcggtctacctgcaatggtataaaaagaaaggaatggagaacattccacaaacgcaggaaggcgatatcggctccaaagatatcccctcatggcgacgtatctgcaaggtgctattgaacaatgattactggtgtcgggcgctctcattcagcccgacaaagcctaaacactatcagcgctacaatgaacgcatgaaagcaaagcgcaaagaatgggggattttatgcaacagcgactcacccaacaaataa

SEQ ID NO: 71443 - DNA, 618 bp, Citrobacter koseri
atgcaacagcgactcacccaacaaataaccgactttctctccacgctgaacgaagaagagagaattgcggcaatcaacgaattcaggatggcgatccaccgcgtcagcccctttcgcgatcagccggtagactgcgtgcaatgggtaaaaaacgaacaaatcgagcctaatgattacaacccaaacaatgtggcgcccccggagaaaaggctcctgctgaagtctattgaggtagatggcttcacgcagcctattgtcgttgcagaaacggcggcagaaaaatatgaaatcgtggatggctttcaccgtcacgaactcggtaaagggaaatccacattacgctcaaagttaaaaggctatcttcccgtcacctgtctggaacgcaatcgccatgaacgaattgcggcgaccattcgtcacaaccgcgcccgtggtcgtcatcagattcacgcgatgtcggaaattgtgcgagaactctccctgttgggctgggacgagacgcgaatcggaaaagagctgggcatggataaagatgaagtcctgcgtctgaaacaaatcaacggcctacaggaactctttgccgaccgtcgattctccaaagcctggaccgtaaagtaa

SEQ ID NO: 71444 - DNA, 1161 bp, Citrobacter koseri
atgagtaataacccactgattccgcacagcaaactgcctaatttaggcaccacaatctttacacaaatgagcgccctggcgcaggagcatcaggcgattaacctgtcgcagggatttcctgatttcgatggcccgcgctatctacaggaacgtctggcctggcatgttgcacaaggggcgaatcaatatgcgccaatgaccggcgtgcctgcattacgcgaagccattgcggaaaaaacggcggcgttatacggctatgaggctgatgccgggagcgaggtgacggtaacggcgggggcaacggaagcgttgtatgccgctatcaccgcgttggttcgtgcgggagatgaggtgatctgcttcgatcccagctatgacagctacgcgccagccgttgaactgtccggcggcgtgctgaaacgtctggcgcttcagccgccacagtttcgcgttgactggcaggcatttgctgcgttactgagcgaacgtacccggctggtgatcctcaatacgccgcataacccgagcgcgaccgtctggcgcaaagccgactttgaagcgctgtggcaggcgattggcgatcgcgaaatctatgtattaagcgatgaagtgtatgagcatatctgctttgcgccagaaggccatgccagcgtactggcgcatccgcagctacgtgagcgtgctgttgcggtctcgtcattcggtaaaacctttcatatgaccggctggaaggtggggtactgcgtagcgccagcggcgatcagcgcggaattgcgtaaagtgcatcagtatctgacgttctgcgtcaacacaccggcgcaactggcgctggccgatatgctgcgtgctgaaccggaacattaccgcgatttacccgcattttaccggaagaagcgtgacgttctggttaatgccctgcgtgacagtcgtctggaaatcctgccctgcgaaggcacctattttctgctggtggattacagcgcggtatcagacctcaatgacgtggatttctgccagtggctgacccgggaaatcggcgttgcggcgattccgctgtcggtattttgcgccgatcctttcccacataaactcatccgtttatgttttgccaagcaggaatccacgctgctggcggccgcagaacgcttgtgtaaattgtaa

SEQ ID NO: 71445 - DNA, 1089 bp, Citrobacter koseri
atgagcaacactgacatccgcgtcgttaccggcccggctaactacttttcccataccggcagcctctccagactgaaggattttttcagcgccgggcaactctccgccgcagtatgggtgtatggcgaacgtgcgattgccgccgcccgcccttacctgccggatgcgtttgatcttccgggagccagacacctgccgtttaccggccattgcagcgaaagcgatgtgaaacaactggccgcgaaagcaggcgacgaccgccgcgtagtgatcggtatcggcggcggcacgctgcttgataccgccaaagcccttgcccgtcggctacaactccccttcgtggcgatcccgactatcgcggccacctgcgcggcctggacaccgctgtcggtctggtacaacgatgccggtcaggcgctgcactttgaaatttttgacgacgccaattatctggtgctggtagagccggaaatcattctccgcgcgccagaggcctatctgctggccggcatcggcgacacgctggcaaaatggtacgaagccgttgtattagcgccacagccagaaaccttaccgcttaccgtgcgtctgggcattaacggcgcgctggcgatccgtgatgtgctactggagagcagcgaacaggcgctggcggacaaagagcgtggagaactcacccaggcatttcgcgatgtggtggatgcgattattgccgggggcggcatggtcggcggtcttggcgagcgttatacccgtgtggcggcggcacacgccgtccataatgggctcaccgtattgccgcaaaccgagaagtttctgcacggcaccaaagtggcttatggcattctggtgcaaagcgcattgctgggtcaggatgaggtactggcgcagcttatcgccgcttatcagcgctttagtctgcccaccacgctggcggcgctggatgtcgatatccagaaccaggcggagattgataacgtgattgcccacaccctgcgcccggtcgaatctatccactttctgccggtgacgttaacgccagccacattacgcgccgcgtttgaaaaggtagagtcgtttacggtttag

SEQ ID NO: 71446 - DNA, 198 bp, Citrobacter koseri
atgtttgatacgctttctaaggccgggaaatatctgggtcaggcggcaaaactgatgattggcgtgccggactatgacaactacgttgagcatatgcgcgtgacgcacccggatcagacgccaatgacttacgaagaattttttcgtgagcggcaggatgcgcgttatggcgggaaaggcggcgcacgttgctgctga

SEQ ID NO: 71447 - DNA, 2106 bp, Citrobacter koseri
atgaacaaatcagggaaatacctcgtctggacattgctctccgttatgggagcatttgccctgggatatattgcgttaaaccgtggggaacagatcaacgcgctatggatcgtcgtggcgtcagtttgtgtctacctcattgcctaccgtttttatggtctgtatatcgccaaaaatgtgctggcggttgacccgacgcgcatgacgcctgcggtgcgtcataacgatggtctggactacgtacctaccgataagaaagtgctgttcggtcaccattttgcggcgattgccggggcagggccgttggttgggccggtgctggcggcgcagatggggtatctgcccggtatgatctggctgcttgccggggttgtgctggcaggcgcggtgcaggactttatggtgctgttcgtttctacccgtcgtgatggtcgttcgctgggtgaactggttaaagaagagatgggcccaacggctggcgtgatcgcgctggtggcctgtttcatgatcatggtgattatccttgcggtactggcgatgatcgtcgtgaaagccctgacccacagcccgtgggggacgtacaccgttgcgttcaccattccgttggccatttttatgggtgtctacctgcgttacctgcgtccgggacgtattggcgaggtgtctgttattggtctggtgttccttgtctttgccatcatctccggtggctgggtggcggaaagtccaacctgggcgccgtattttgactttaccggcgtacagttaacctggatgctggtgggctacggctttgtggcggcggttctgccggtatggctgctgctggcgccgcgtgattacctctcaaccttcctgaaaattggtacgattgtcggtctggccgtcggcattctgattatgcgtccgacgctgacgatgcctgcgctgaccaaatttgtagatggcaccggcccggtgtggaccggtaacctgttcccgttcttgttcatcaccattgcctgtggcgcggtgtctggcttccatgcgctgatctcttccggcaccacgccgaagatgctggcgaacgaagggcaggcctgctttatcggctacggcgggatgttgatggaatccttcgtggcgattatggcgctggtttccgcatgtatcatcgatccgggcgtttacttcgccatgaacagcccaatggccgtactggcgccagccggaaccgctgatgtggttgcttctgctgcgcaggtggtcagtagctggggctttgcgattacgcctgatacgctgcatcagattgccaacgaagtgggcgaacaatccattatttctcgtgccggtggcgcgccaacgctggcggtggggatggcttacatcctgcacggcgcgctgggcggtatgatggatgtggcgttctggtatcacttcgcgattctgtttgaagccctgttcattctgacggcggttgatgccggtacgcgtgcggcgcgctttatgttgcaggatctgctgggcgtggtctctccgggtctgaaacgtacggattcactgcctgcgaacctgttagcgacggcgctgtgcgtgctggcgtggggatacttcctgcaccagggtgtggtggacccgttaggagggatcaacaccctgtggccgctgtttggtatcgcgaaccagatgctggcgggtatggcgctgatgctctgcgcggttgtactgttcaagatgaaacgtcagcgttacgcatgggtggcgctggtgcctaccgcctggctgctgatctgtacgctgaccgcaggctggcagaaagcgtttagcccggataccaaaattggtttcctggcgatcgccaataaattccaggcgatgatcgacagtggcgatattcctgcgcagtacacgcagtctcagctggcgcagctggtgttcaacaaccgtctggatgccggtctgaccatcttcttcatggttgtggtggtggttctggccctgttctcaatcaaaactgcgctggcagcgctgaaagaggacaaaccgacggcgaaagaaacgccgtatgaagccatgccggaaaacgttgaagagattgtggcgcaggcgaaaggcgcgcactga

SEQ ID NO: 71448 - DNA, 414 bp, Citrobacter koseri
atgatctggaaacgccatttaacgcttgatgagctgaacgccaccagtctgaacacgatggtggcgcatctggcgatcgtctatacccgtctgggcgatgacgtgctggaggcggaaatgcccgtcgatgcgcgaacgcatcagcctttcggcctgttacacggcggcgcttcggcggcgctggcggagaccctggggtcaatggccgggtatctgatgacccgtgacggccagtgcgtggtgggaaccgagctgaatgccacgcatcatcgcgccgtgtcgcaggggaaggtgcgcggcgtttgccagccgctgcatctggggcggcaaagccagagctgggaaattgtgatttttgacgaacagggacgacgttgctgtacctgccgcctggggacggcggtgatgggctag

SEQ ID NO: 71449 - DNA, 756 bp, Citrobacter koseri
atggccggattggattttaacggcaaaaccgtctgggtgaccggcgcgggaaaagggattggttataccacggcgttggcgtttgttgcggctggcgcgcaggtgacgggattcgatcgcgagttcacgcaggatgcgtatccctttgcgaccgaagtgctggatgtcgcagacgccgcgcaggtcgcgcaggtttgccagcgcgtgctggcgcaaaccgaacggctggatgtgctggtgaatgccgccgggattttacggatgggggcgaccgatgcgctaagcgccgaggactggcagcagacgttcgccgtcaacgtcggcggcgcgtttaacctcttccagcagacgatggcgcaatttcgtcagcagcagggcggggcgattgttaccgtcgcgtctgatgcggcgcacacgccgcgcattggcatgagcgcctatggcgcgtccaaagcggcgctgaaaagcctggcgctgaccgttgggctggagctggcgggcagcggcgttcgctgtaacgttgtctctccgggatctaccgataccgatatgcagcgcacgctgtgggtgagcgatgatgcggaacaacagcgtattcgtggctttggcgagcagtttaagcttggcattccgctgggaaaaatcgcgcgtccgcaggaaatcgcgaataccattttattcctcgcgtccgatctggccagccacattacgctacaggacattgtggttgacggcggctcaaccctgggagcgtaa

SEQ ID NO: 71450 - DNA, 858 bp, Citrobacter koseri
atggcaattccgaaattgcaggcgtacgcgctgcctggcgcgctcgatattccgcccaataaagtgaactgggcctttgaacctgaacgcgcagcgctgttgatccacgatatgcaggattattttgtcagcttctggggcgacaactgcccaatgatgaaacaggtgatcgcgaatatcgccgccctgcgtcagtactgcaaagagcacaacattccggtctattataccgctcagccgaaagatcagagcgatgaagatcgcgccctgttgaacgatatgtgggggccgggcctgacgcgttctcccgagcagcaaaagattgtcgatgcgctggcaccggacgaggcggacaccgtgctggtgaaatggcgttacagcgcgtttcaccgttcgccgctggagcagatgttaaaagaaaccgggcgtaatcagctgattatcacgggtgtgtatgcgcacattggctgtatgaccacggcgaccgacgctttcatgcgcgatatcaagccgtttatggtggcggatgcgctggccgatttcagccgtgaagaacatgtgatgtcgcttaactatgttgccggtcgctccggtcgcgtggtgatgacgcaggaactgctgccgacgccggttccggcgagcaaagcggagctgcgggcgctgatcctgccgctgctggatgaatccgacgagccgctggatgatgaaaacctgattgattatgggctggactctgtacgtatgatggcgctggcggctcgctggcgtaaagtgcatggcgatatcgacttcgtgatgctggcgaaaaacccgacaatcgatgcctggtggacgctgctttcccgtgaggtgaagtga

SEQ ID NO: 71451 - DNA, 1611 bp, Citrobacter koseri
atgaccattcctttcacccgttggccggaggagtttgcccgccgctatcgtgaaaaagggtactggcaggatctgccgctgaccgatattttaacccgccacgcagacggcgataaaacggcggtgattgatggcgatcgacacctgagctatcgcgaactgaaccaggcggcggataatctggcctgtagcctgcgtcgtcaggggatcaaacccggcgaaaccgcgctggtgcaactgggcaatgtggcggagttgtatatcactttcttcgccctgctgaagcttggcgtcgcaccggttctggcgctgttcagccatcaacggacggaacttaacgcttacgcgaagcaaattgaaccggcgctggtgattgctgaccgccagcacgcgctgttcaccggggacgatttcctcaatacgtttattgccgaacacaattccgtgcgtgtggtgctgttgctcaacgatacgggtgaacacaacctgcaaacggcgattgaccagcctgcggttgattttaccgccacgccatcacctgccgatgaggtggcttatttccagctttccggcggtacaaccggaacgccgaagctgatcccgcgcacccataatgattattactacagcgtgcgccgcagcaatgaaatttgccactttaccgaagccacgcgtttcttatgcgcgattccggctgcgcataactacgccatgagttcgccgggatcgctgggtgtctttctggcccagggaacggtggtgctggcggctgacccgagcgctacgctctgtttcccgttaattgaaaagcatcagattaattcaacggcgctggtgccgcctgcggtgagcctgtggttacaggcgattcaggagtggggcagcaacgcgcaactggcctcgttgaaactgttgcaggtaggcggcgcgcggctttcagcgacgcttgccgcgcgtattccggcggaaatcggctgtcagttgcagcaggtattcggcatggcggaaggactggtgaattacacccgtctggacgacagcccggagcgcatcatcaatactcagggttgcccgatgtgcccggacgatgaggtctgggtggctgacgctgacggcaatccgctgccgcagggggaaacgggacgcctgatgacgcgcgggccgtacacgtttcgcggctattttaaaagcccggagcataacgccagcgcgtttgatgccaacggcttttactgctccggcgatctgatctccattgatccagatggctatatcaccgtgcagggacgtgaaaaagatcagatcaatcgcggcggggagaagatcgccgctgaagagattgaaaacctgttactgcgccacccggccgtaatccatgccgcgctggtcagcatggaagatgagctgatgggggaaaaaagctgcgcctggctggtggtgaaagagccgctgcgcgcggtacagatacgccgcttcctgcgtgagcagggggtcgccgaattcaaattgccggatcgcgtggagtgcgtcgaggcgttgcctctgaccccggtcggtaaagtcgataaaaaacaattacgtcagtggctggcgtcacgttcactgacctga

SEQ ID NO: 71452 - DNA, 1176 bp, Citrobacter koseri
atggatacgtcactggccgaggaagttcagcagaaaatggcaacgctcacccccgatcgctttttctttatgtcgccgtatcgcagctttacgacgtcaggatgcttcgcccgtttcgctgaaccagcggttgacggggattcgttagacagccccttccaacaaaaattacagcaagcctttgccgacgccagagcgcagggtatcgcaaatcctgttatggtcggcgctatccccttcgatacccgccagccatcctcgctgttcattcctgagtcctggcaggccttctcccgaccggcaaagcaacaatcctcgcgttactttaccgggcatcaggcactgaatgttgttgatcgtaaaagtatccctgaacaggaaacgtttgaagcgatggtggcgcgcgcggcagcgctgacggcgacgcctgaagtcgacaaagtggttctgtcacgcctgattgatattacgaccgatgccaccattgacagcggcgcgctgctggagcggctggtggcgcagaacccggtgagttacaacttccatgtgcctctggaggatggcggcgtgctgcttggcgccagcccggaattgctgctgcgtaaagagggcgagcgctttagttcgctgccgttggccgggtcggcgcgtcgccagcctgatgatgtgctggatcgtgaagcgggcaaccgactgctggcttctgaaaaagacagacacgaacatgagctggtcactcaggccatgaagacggtgctgcgcgaccgcagcagtgaattacagctgcctgcatctccacaattgatcaccaccccgacgttatggcatctcggtacgccgttcgaaggtaaggcgaatgcggaagaaaatgccctgacgctggcgtgtctgctgcatccgacgcctgcgttgagcggtttcccgcatcaggtggcgaaaaaattaattgccgaactggagccgttcgatcgtgaactgttcggcggcatcgtcggctggtgtgacgccgaaggaaacggcgagtgggtcgtgacgatccgttgcgcgaagctgcgacaaaaccaggttcgcctgttcgcgggcgccgggattgtgcctgcttcctctccggtcgcggagtggcgcgagaccggcgtgaagctttctaccatgttgaacgtttttggactgcattaa

SEQ ID NO: 71453 - DNA, 957 bp, Citrobacter koseri
gtgagacttcccctgctttgcagaacatccctgatactggttgggcttttcatttcaggaatttctttaggtcatgccgctgactggccgcgccagatcaccgacagccgcggcacgcatacgctggaccataaacctgaacgtatcgtctctaccagcgtgaccctgacgggctcgctgctggcgattgatgctcccgttgtcgccagcggagcgaccacccctaacaaccgctttgccgacgatcggggatttctgcgtcaatggagcgacgttgcgaaagcgcgcaagctggcgcgcctgtacatcggcgaaccaagcgctgaagccgttgccgcacaaatgccggaccttattctgattagcgcaaccggtggcgactctgcgctggcgctgtacgatcagctttctactattgcccccacgcttatcatcaattacgacgataaaagctggcagtctctgctgacacaactgggcgagatcaccggccaggaaaaacaggccgctgcgcgcatcgcggaatttgataaacaactggcgaccgttaaacaacagctcacattaccgccgcaaccggtcagcgcgctggtctacaccgctgccgcacacagcgccaacctgtggacgcaggattcagcccagggcaagctgatggaacagttaggctttacgctggcgcccctccctgccggactgcaaaccagtaaaagccagggcaaacgtcatgacatcatccagcttggcggggaaaacctggcagcaggtctgaacggcgaagcgctgttcctgtttgccggtgacatcaaagatgccgacgctatttacgccaacccactgcttgctcacctgcctgccgtacaaaacaagcgcgtttatgcgctgggcaccgaaacgttccgtctggactactacagcgcaacgttactgcttaaccgtctcgccgcgctgttttaa

SEQ ID NO: 71454 - DNA, 1251 bp, Citrobacter koseri
atgaatcgacaatcctggctgctgaatctcagcctgttgaagacgcaccctgcatttcgcgctgtcttcctcgcccgttttatctctattgtctcgctgggcctgctgggcgtagcggtgccggtacagatccagatgatgacccactcgacgtggcaggttggtctgtcggtgacgctgaccggcagcgcgatgtttgttggcctgatggtcggcggcgtgctggcggatcgttatgaacgtaaaaaggtgatcctgctggcgcgcggcacctgcggtattggctttattggcctgtgtctgaacgcgctgttgccggaaccttcgctgctggcaatctatctgctcggtctgtgggatggcttttttgcctcgctgggggtcacggcgctactggcggcgacgcctgcgctggtagggcgagaaaaccttatgcaggccggggcgattacgatgctgacggtgcgtctgggatcggtgatttcaccgatgctgggcggcgtattgctggctaccggcggcgtggcctggaactacggtctggcggcggcaggaacatttatcacactgctgccgttgctgagccttcctgcgctcccgccgccgccgcaaccgcgtgagcatccgttgaaatcgctgttggcggcgttccgtttcttgctctccagcccgctcattggcggcatagcgttgcttggcggacttttgacgatggcaagcgcggtgcgtgtgctttatccggcgctggcgattaactggcacatgtccgccgcgcaaattggtttactttatgccgctatcccgctgggggcggctgttggcgcgctaaccagcgggcaactggcgcacagcgttcgccctggactgttgatgctggtttccaccgtagggtcgttcctggcgattgggttgtttgggctgatgccagtctggttgctcggggtgatctgtctggcgctgtttggctggctcagcgcgattagctcgttactgcaatacaccctgttgcagacgcaaacgccggaagccatgctcgggcgaatcaacggcctgtggacggcgcaaaacgtgaccggcgacgccatcggcgcagcgctgttgggcgggctgggcgccatgatgacgccggttgcgtcagcgagcgtgagcgggtttgggctggtgattgttgggttgttgttaatgctgctgctgggcgagttgcgtcgttttcgccagccgccgccggtgccagatggcgcaccgctttaa

SEQ ID NO: 71455 - DNA, 1008 bp, Citrobacter koseri
atgtcatgctctgtttccgtggcacgcgccatcgccgtgcccggcttgttgttattacttattctcgccacggcattaagtctggctatcggcgcaaaatcactgcctgcgtccgtcgtacttgaagcaattaccggcacctgccaaagcgctgactgcaccatcgtgctggacgcgcgattgccgcgcacgctggctggcctgctggctggtggcgcactggggctcgccggggcgttaatgcaaacgctcacccgcaacccgcttgccgacccgggcattctcggcgtcaattccggcgccagtttcgcgatcgtactcggcgcggcgctgtttggtttttcctctccacaggaacagttgctgatggcgtttgccggagcgctggtcgcctcgctgattgtcgcctttaccggcagtcagggtgccgggcagttaagcccggttcgcctcacgctggcgggtgtcgcgctcggcgcagtgctggaggggctttccaacggtatcgcgttgctgaacccggatgtgtacgatcagctccgtttctggcaggccggctcgctggacattcgcagtctgcaaacgctcaaggttattgtcgtgccggtgctgattgctggtgctaccgcgctgtttctcagccgcgcgctgaacagcctgagtctcggtagcgatactgccaccgcgctgggcagcaaagtagcgcgtacccagctcatcggcctgctggtgattaccgtgttatgcggcagcgcgacggcggttgttggccccatcgcgtttatcggtctgatgatgccgcacatggcccgctggctggtgggggcggatcaccgctggtcgctgccggtcacgttgctggcgaccccgaccctgctgctgtttgccgatattatcgggcgactcatcgttcccggtgaattgcgcgtttcggttgtcagcgcctttctcggcgcgccagtacttattttcctcgtgcggcgcaagcagcgcggaggtgccgtatga

SEQ ID NO: 71456 - DNA, 993 bp, Citrobacter koseri
atgatgcacctttcccgccgcctgatcataagttgtctgttgctggtgctcggctgtatcgctgtcggcttgtggagcctgcgcagcggcgccgttacgctggaagtctcgcaaatcatcaatgcgctgctgggagacgccccacgcagcattacccttgtggtgaccgaatggcgtctgcctcgcgtgctgatggcgctgctgattggcgccgcgttgggcgtcagcggggcgatttttcagtcgttgatgcgcaacccgctgggtagcccggacgtaatgggttttaacaccggggcctggagcggcgtgctggtggcaatggtgctgtttggccagaacctgacggcgatcgcgatggcggcaatggctggtgggattctcacctcgctgatcgtctggctgcttgcctggcgcaacggcattgagaccttccggctgattattatcggcatcggcgtgcgcgccatgctggtggcgttcaacacctggctgctgttgcaggcgtcgttagaaacagccctctccgccggattgtggaacgccgggtcgctcaacggactgacctgggccaaaacgtggccctcggcaccgctgatcgttctgatgctggcgtgtgccgcattgctggtacgccgtctgcgcttgctggaaatgggtgatgacagcgcctgcgcgcttggcgtcagcgttgaacgttcccggttaatgatgatgctggtcgccgtggtgctgaccgccgccgcgacggcgctcgcaggcccgatctctttcattgcgctggttgcgccgcacatcgcgcggcgccttagcggcacggcacgctgggggttaacccagtccgcattgtgcggcgcgctattgctgctggccgccgacctgtgcgcccaacaactgtttatgccttaccagcttccggtaggcgttgtcaccgtaagcctcggcggtatttaccttatcgtcttgttaattcaggagtcccgcaaaaaatga

SEQ ID NO: 71457 - DNA, 798 bp, Citrobacter koseri
atgaccgaatcagtagcccgtttgcgtggcgaccagttaacgctgggttatggcaagtataccgtcgcggagaatctgaatgtttctatcccggatggtcacttcactgccattattgggccgaatggctgcggcaaatcaacgttattgcgtacgctaagccgtctgatgtcacccgtacatggccacgtctggctcgacggcgagcatattcagcactacgccagtaaagaggtggcgcgacgaatcggcctgctggcgcaaaacgccaccacgccgggcgatatcaccgtacaggagctggttgcccggggccgctatccgcatcagcctttgtttacccgctggcgcaaagaagacgaagacgccgtcgccggtgcgatgcgcgccacggggattactcacctggcgacgcaaagcgtggacacgctttcaggcgggcagcggcagcgagcatggatagccatggtgctggcgcaggaaacgtccatcatgttgctggatgaaccgacgacctggctggatatcagccaccagatcgatctgctggagctgttgagcgagctgaatcgcgagaaaggttacaccctcgctgcggttctgcacgaccttaaccaggcctgccggtacgccacgcatttaatcgcgttacgtgaaggcaagatcgtcgcagagggagcgccaaaggagattgtgacagcggatcttattgagaaaatttatggattacgttgcacgatcatcgacgatccgatcgccggaacgccgctggttgtgccgctgggtcgcccgaagtaa

SEQ ID NO: 71458 - DNA, 1137 bp, Citrobacter koseri
atgtcatcactcaatgttaagcaggaaaaagattcggaatttactggctatccgttagcgccgtcaaacagtaatgaaattgatttgttaagccttgttgatgttttatggcgggcgaaaaatcgcattattgcgactgtttttgcgtttgcgctggcaggtattctgctgtcctttattctgccgcagaaatggaccagtcgggcgattgtcaccccggcagaggccgtacagtggcaggaactggaaaaaacgctgaccacattgcgtgtgctgaacctcgacattaatttgcagcgagacgccgtctttacgcttttcattaagaagttcagctcaacatcgctgctggatgaatatcttcgcgcctccccgtatgtgatggatcaattgaaaggggcggatattgatgaaatggaactgcatcgggcgattgttgcgctcagtgaaaagatgaacgcggtggataccaacgccggtaagaaaaacgagacgtcgttatttacctcgtggacattgagttttactgcgccaacgaaagaagaggcgcagaaggtgctggctggctatatccagtatgtgtcggacatcgtcgtgaaagagacgctggagaatattcgtaaccagctggacaccagaacgcattttgagaaagaaaaactggcgatggaccgggtgagattgcgcaaccagcttgatgcgaacattcagcgacttaattattccctggagattgccaacgccgccgggattaagaagccggtctacagtaatggtcaggcggtaaaagacgacccggatttctctatttctctgggcgccgacggtattgcgcaaaaattgcaaattgaaaagtccgtcacggacgttgcggaaattaacgctgaaatacgcaatcgccagtattacgtagagcaactgaccgcgatgaatatcaatgatgtgaaatttatgccgtttaaatatcagctatcgccttcgctgccagtgaaaaaagacggcccgggcaaagcgttgatcgtgattctggctgcgttgctgggtggtatgatcgcgtgcggcggtgttctgctgcgtcatgccatgctgtcccgtaaactggatgatgcgattcaactggaagaacggttagtctaa

SEQ ID NO: 71459 - DNA, 3885 bp, Citrobacter koseri
atgactacgcgtttaccgttagtggccgcccagccagggatctggatggcggaaaaactctctacgctgccttccgcctggagcgtggcgcactatgtggaattacacggcacgctgaatgcccctctgctggcgcaggcggttgtaaccggtatggcgcaagcggataccctccgtatgcgatttactgaagataacggcgaggtctggcagtgggtggacccggcattcacgtttgcacaacctgagcttatcgatctgcgtgacgagcccgatccgcatgcggcggcgctggcgcggatgcaggccgatctgcgacaaaatttacgcgttgatggcggcaaaccgctggcgttccaccagttgattcaggtcgatgatacccgttggtactggtatcagcgttatcaccatctactggtggatggcttcagtttcccggcgataacccgtcagatcgcggcgatttaccgcgcctggcagtgtaacgccccgacgcccgactcgccgtttacgccatttgctgacgtggtggaggagtatcagcgttaccgtgagagcgaggcttatcaacgcgatggcgccttctgggcggagcagcgtcgccagttgccgcctcccgcttcgctgtcggctgcgccgcttcccgggcgggcggccagcgccgatattttgcgtatgaaactggatgtgcccgacggtgttttccggcagttggcggcacgcatgtctgatattcaacgtgcggatttagcgctggcgctggtggcgctatggctgggccgcctgtgcggccggatggactatgctgccggatttatattcatgcggcgtatgggctcggcggcgttaacggcgaccggcccggtactgaacgtcctgccgttaggggtaagcattaatgcggcggaaacgctgccggaactggcgacgcgtcttgccgggcagatgaaaaaaatgcgtcgccatcagcgttatgacgccgaacagatcgttcgcgacagcggccgcgcggcgggtgaagagccgctgtttggcccggtactgaacgtgaaggtctttgattatcaactggatattcccggtgtacaggcgcaaacccatacgctggcgaccggcccggttaacgatcttgaactggcgctgttcccggatgaagagggcggcctgagcattgaaatcttagccaacaaacagcgctatgatgaggcgacgttatcccgccatgcgtcacggctgacggcgctgatacgccagtttgcggacaatccggcgctgcgctgcggcgatgccgaaatgctcctgcctgccgaatatgcgcaactggcgcagattaatgatacggcggtaagcataccgctcacgacgctcagcgcgctggttgacgaacagacacgcaaaacgccggacgcgcccgcgctggctgatgcgcgccatcagctcagttatcaggagatgcgcgagcaggtgatcgccctggcgcacctgctgcgtgaacgtggcgttaaaccgggcgacagcgtcgcggtggcgttgccgcgctcggttttcctgacgctggcgctgcacggtattgtggaggccggagccgcctggctgccgttagatacggggtatccagacgatcgtctgcgaatgatgctcgaagacgcgcagccgaaattactgatcacaaccgcagaacagctgccgcgatttaacgatatccccggcgtagaaagcctgtgctacaacgcgctgctgccgacgagcggcgctgaatcgctggcgttgtcgttgccgcaccacacggcatacatcatctttacatccggttcgaccggcaggccgaaaggggtaatggtcgggcaaaccgcgatcgtgaatcgcctgctgtggatgcaggatcactatccgttaacggcagaggatgtggtcgcacaaaaaacgccgtgcagtttcgatgtttcggtgtgggagttcttctggccgtttattgccggggcgaagctggtgatggcggagccggacgcgcaccgcgatccgattgccatgcagcatttctttgcgaagtatggtgtgaccaccacccattttgtcccgtcaatgctggcggcgttcgtcgcctcgctcacccctgaatccgctcatgaaagctgcgctacgctacagcgcgtattttgtagcggcgaggcgctgcccgccgggctgtgccgcgagtgggaacagttgaccggcgcgccgctgcacaatctgtacgggccaacggaagcggcggtggatgtcagctggtatcccgcctgcggcaaagaactggcggatgtcaccggaaacagcgtgccgattggctatccggtctggaataccgggctgcgcattcttgatgcgatgatgcgcccggtgccgccgggcaccgcgggtgatttatacctgaccggcatccagctggcgcaggggtatctggggcgcccggatctgacggcgagtcgctttattgccgatccgtttatgccgggcgaacgcatgtatcgcaccggagacgtggcgcgctggctggaaaatggcgcggtagagtaccttggccgcagcgacgatcagctaaaaattcgtggtcagcgcattgaactgggcgagattgatcgggttatgcaaacgctgccggacgtcgagcacgccgtggctcacgcctgcgtgtttaaccaggcggccgcgacaggaggcgatgctcgccaactggtaggctatctggtgtcacaatccggtttaccgctggatattccggcgcttcaggaacggttacgcgagacattaccgccgcatatggtgcctgtggttctgctacagcttgcggaactgccgctcagcgcaaacgggaaactggatcgtaaagcgctgccgatgccgcaactgacgcaacgtacgccggggcgcgcgccattaccagggacagaaaaaacggtggctgacgcctttgccggcctgctgggttgcgaggtcaatgatgtggaggccgatttctttgcgctgggcggacattcgttactggcgatgaaactcgccgcgcagttgagtcgcgcgtccgggcgtcaggtgacgccggggcaggtgatggtggcgtcaaccgttggtcagcttagcgcgttgctggattccgccgatgacgagcaatctcagcgtctgggctttgaaacgctcctgccgctgcgtgaaagcagtggaccaacgttattctgcttccatccggcgtccggttttgcctggcagtttagcgtgctggctcgttatctcagcccacactggtcgattacggggattcagtcgccaaggcctgatggaccaatgcaaacggccacgaatctggatgaggtgtgcgagcgtcatctggaaacgctgctggcgcagcagccgcatgggccttactacctgttggggtattcgctgggcggaacgctggcccagggcattgcggcgcgcttgcgtgcgcgtggcgaaacggttgccttcctcgggctgctggatacctggccgccggaaacgcaaaactggcaggaaaaagaggccaatggtctggaccctgaagtgttagcggagatcgcgcgtgaacgcgaagcgttccttgctgcgcaacagggaaatgcctccggggagttattcagcaccatcgaaggaaactacgccgatgccgtgcggcttctgacaaccgcgcatagcgtaccgttcgatggacgcgcaacgctgtttgttgcggagcgcaccctgccggaaggaataagccctgaacgcagctgggcgccgtggatggcagaactggatatctatcgccaggattgcgcccacgtcgatattatttcacctgccgcgtttgagaatatcgggccgattattcgcgcattgctcgaccagtaa

SEQ ID NO: 71460 - DNA, 219 bp, Citrobacter koseri
atggaattcagtaatcccttcgataacccgcagggacaattttacattctgcaaaacccgcagcgtcaatttagcctctggccacagcagtgttctctccctgctggctggcaggtggtgtgcgaaccgcaatcgcaggcgctttgccagcagtggctggatgcacactggaccacgctaactcccgcccattacgccgctgcgcaggaggctcaatga

SEQ ID NO: 71461 - DNA, 1209 bp, Citrobacter koseri
gtgacggcgttaacgacaggaagtgagacctggtggcagtcaaaacacggtcccgaatgggagcgtgaaacagacgaaaaatatcgggtgactttctggtggcgcgatccgcagggaacggaaaaccgctcttcaattcgccgcgtatgggtctacattacgggcgtcaccgaccatcaccagaatgcggttccgcaatccatgcagcgtattgcgggcacggatgtctggcgatggagcacgacattaagcgccgactggcgtggcagttactgtttcatcccttctgaacgcgatgatatttttgcttctctggcagtagacgaaacgcctgacagaaccacgctgcgtgaaggctggcgtcagttattgccgcaggcgattgccgatcctcttaacccggtgagctggaagggggggcggggccatgcggtttccgcgctggaaatgccagacgcgccagtgcaacccggctgggataagcctgaaaatccgtcagctcccccggtatgtttgcaatggcgcagcgagcggctgggcaatacgcgtcgcgtgtgggtgttcacgaccggcgacgcccggcctgaacgtccgctagcgattttgctcgacgggcagttttgggcggaaagcatgcccgtctggcccgcgctcacctcactgacccggcggcgtcagctccctcctgcggtctacctgctgattgatgccattgataccccccaccgtagccgtgaactgccctgcaatgccgatttctggctggcggtacaacaagaactcctgccgctggtgaaaaccgttgcgccattcagcgattgtgcaaaaaggacgatcgtcgccgggcagagttttggcgggctctcctcgctgtatgccggtctgaactggcctgagcgctttggctgcgtactgagccagtcgggatcgttctggtggccgcagcgcggcgcagatcgggaaggcgagattattgaacaactgaaggcgggcacattgaccgccagaggattgcgcatcgtgctggaagccggtatcagagagccgcttattttccgggcgaatcaggcgctttacagccaactacacactacgcagcagtcggttttctggcgtcaggttgacggcggacatgatgcgctttgctggcgtggcggattaatgcaggggttgatgaccctctggcaaccgttaaccgacacgctgtag

SEQ ID NO: 71462 - DNA, 2244 bp, Citrobacter koseri
atgaacaataagattcattccctggccttactggtcaatctgggaatttatggggtcgctctgcctgttatggcggaggagaccactgatagcgcagcgcttcatgaagacaccatcgtggtcaccgccgcccagcagaacctccaggcaccgggcgtatcgaccattaccgccgacgaaatccgtaaaaatcctcccgctcgcgacgttgccgaaatcatccgcaccatgccgggcgtgaacctgaccggtaactcaaccagcggccagcgcggcaacaaccgccagatcgacattcgcggcatgggcccggaaaacaccctgattctgatcgacggcaaaccggtgaccagccgtaactccatccgtctgggctggcgcggtgagcgtgacacccgtggcgataccggttgggtgccgccagagatgatcgaacgcattgatgtgattcgtggccctgcggcggcacgttacggcaacggcgccgcgggcggcgtggtaaacatcatcaccaagaaattcgacgatcagtggcatggttcgtggaacacctatctgaatgcgccggaacacaaagacgaaggttccaccaagcgcaccaactttagcctgagcggcccgctgggcggcgaattcagcttccgcatgtacggcaacctggataaaactcaggccgacgcctgggacatcaaccagggccatcagtctgagcgtaccggcgcctacgccaacaccctgccagcaggtcgcgaaggggttgaaaacaaagatattaatggtgtcgtacgttgggatttcgcgccaatgcaggcgctggagtttgaagcaggctacagccgccagaacaacctttacgcgggtgacacccaaaacaccaataacgacaatgccctggtgaagaaaaactacggtaaagagactaaccgtatttatcgccagaacttcgcagtgacctggaacggcggctgggataacggtatcaccaccagcaactgggcacagtacgaacacacccgcaactcgcgtctgggcgaagggctggcgggcggtctcgaagggttgttcaacagcgacgaattcaccgacaccgacctggccgacgtgatgttgcacagtgaaattaacctgccgcttgatttcatcgttaatcaaaacctgacgctgggtactgagtggaaccagcagcgtatgaaggattccgcctcgaatactcaggctcaacagggcggagccatcccaggcatgagcgacgaccgcagtccgtactcatccgcagaaatcttctccctgtttgccgagaacaacatggagataactgacagcaccatgctgaccccggcgctacgcttcgatcaccacactatcgtcggcaacaactggagcccgtccctgaacctgtcgcaggcgctgggcgatgatttcaccctgaagatgggtatcgcccgtgcctataaagcaccgagcctctatcagaccaacccgaactacctgctgtacagcaaaggccagggttgctatgcaagctccgatggcgtcggttgctacatgatgggtaacgatgacctgaaagcggaaaccagcgtcaacaaagagattggtcttgagtggaaacacgacggctggcaggccggtgtgacctggttccgtaacgactaccgcgataagattgaagcgggctatgcgccagtcggccatacctcttcaggtaaagtgcaaaccgatatctaccagtgggaaaacgtgccgaaggccgtggtagaaggtctggaaggatcgttgaatattccggtcagcgatgcaataaactggaccaacaacattacctacatgctacagagcaagaacaaaacaaccggcgatcgtctgtcgatcatcccggagtacacgctgaactcaaccctgagctggcaggtacatcaggatgtgtcagtgcagtcaaccttcacctggtacggcaagcagcagccgaagaaatacaactataagggccagcctgctaccggctctgagaaagatgaagtcagcccgtacagcattgtcggcctgagcgcgacctgggacgtaaccaaaaacgtcagcctgaccggcggcgtggataacgtcttcgacaagcgtcaatggcgtgcggggaatgcccagaccacgggtaacgacgcgaccggcgcttatatgtacggtgcaggtgcttacacctacaacgaaccgggtcgtacatggtacatgggcgttaacacgcgcttctga

SEQ ID NO: 71463 - DNA, 654 bp, Citrobacter koseri
atgcgaaccacttacaccgccctctctttttcccgccacaaacttcatcttatcgggttcgatatcgatagcttccacgaacacgatctgctctggttgccgcatcacgcgcagctgcttcccgccgggcgaaaacgtcaggctgaacacttagcgggacgtctcgccgcgtttcatgccctgactgaatatgggcacaaaaccgtacccgctatcggcgataaacggcagcccttgtggccagaaggcctgttcggcagtatcagccacagcgccgccacggcgctggcagtcgtctccctcactccggtaggggttgatatcgaagcaatcttcacgcctcaaacggcggcagaactcaccagcagtatcgtcgataacgatgaacaacgcgttttacagcgcagttccctcccttttccgctcgcgttaaccctggcgttttccgccaaagagagcgtctataaagcgttctccgatcgcgcggcaacgttaccgggttttgccagcgccaggatcgtttcagtgacgaaaacacatctaaccatgcaaatgacgtcggcgttttcgccgcagcttgctgattgcacagtggatatttcgtggcgtgagtacgacggtcaggtcattacgctctgcgcgtccgccctgtag

SEQ ID NO: 71464 - DNA, 2034 bp, Citrobacter koseri
atgacgaaccttgctcagaacagagaaaaggacaaaatcaatcccgttgtgttttatacgtctgccggactgattttgttgttttccctgacgaccattttttttagtgatttctccgcagtctggatcggccgcacgctgaactgggtctccagaacgtttggctggtactatctgctggccgccacgctctatatcgtttttgtcatattcattgcctgctcgcgtttcggttccgtcaagctcgggcctgagcagtcaaagccggaatttagtctgctaagctgggcggcaatgcttttcgccgccgggattggcatcgacctgatgttcttttcggtggcggagcccgtcacccaatatatgcagccgccggaaggcgcagggcagactattgaagccgcccgccagtcgatggtctggacgctgtttcactacggcctgaccggttggtcgatgtatgcgttaatggggatggcgcttggctactttagctatcgctataacctgccgctgaccattcgctcagcgctctatccgatcttcggtaagcgcatcaacgggccgattgggcatagcgtggatattgccgcggttatcggcaccatctttggtatcgccacgacgctggggattggtgtggtgcagctcaattacggtctgagcgtgctgtttgatatcccggattcaatggcggccaaagcggcgctgattgtgctgtcggtggtgattgccacgatctcggtgacttctggcgtggacaaaggcattcgggttctgtcggagctgaatgtgctgctggcgctggggttgatcctctttgtgctgtttatgggggacacctcattcctgctcaatgcgctggtgctgaatgtgggcgactacgttaaccgctttatggggatgacgttgaacagctttgcgttcgacaggccggttgagtggatgaacaactggacgctctttttctgggcgtggtgggttgcgtggtcgccgtttgtcgggctgttcctggcgcgtatttcgcgtggccgcaccattcgccagtttgtcttcggtacgttgattatcccgttcactttcaccctgctgtggctgtcggtgtttggcaatagtgcgctgtatgaaatcattcatggcgatgccggttttgccgaagaagcgatggcgcaccctgagcgcggcttttatagcctgctggcgcagtatccggccttcaccttcagcgcgtctgtcgccacaatcaccggtctgttgttctatgtgacatcggcggactccggtgcgctggtgctgggcaatttcacctcaaaactgaaagacatcaacagcgatgcgccagcctggctgcgtgttttctggtcggtagcgattggcctgctgacgctggggatgctgatgaccaacgggatttcagcgctgcaaaacacgacggtaatcatggggctgccgtttagttttgtgatcttcttcattatggcgggattgtataaatcattgaaagttgaagattatcgtcgggaaagcgccagtcgtcataccgcgccgcgtccgatgggcgtacaggaccggctgagctggaaaaaacgactgtcgcgcctgatgaactacccgggaacgcgctatacccgcgaaatgatggagaaggtatgttttccggcaatggaagaggtcgcccatgagctacaactgcgcggcgcatcggtggagctgaaaagtatgccgccgcaggaaggggaaaaccttggtcatctggatctgcgggttcatatgggcgatgagcgcaactttatctatcagatctggccgcagcagtacgcaatccccggctttacctaccgggcgcgtagcggcaaatcgagctattaccggctggaaacgttcctgctggaaggaagccagggaaatgacctgatggactacagcaaagagcaggtgattacggacattctcgatcagtatgaacgtcatctgaactttattcatctggatcgtgaagcgcctggcaacggggtgttgttcccgggaatgtaa

SEQ ID NO: 71465 - DNA, 594 bp, Citrobacter koseri
atgcccaaagtggggatgcaaacccttcgtcgcaggcaactgattgacgccaccctggaggccattaatgaagtcgggatgcatgacgcgaccattgcgcaaatagcccgacgagcaggcgtgtcgaccggcatcatcagtcactatttcaaggataaaaatggattgctggaagcgacgatgcgcgacatcaccagccagcttcgctatgccgtcttgcgtcggttgcacgcccttccagaggccagcgcagaattgcgtttgcgcgccatcgtagcgggcaactttgacgacagtcagataagccaggccgcgatgaaagcctggctcgcattctgggcaagcagcatgcatcagccgatgctctaccgcctgcaacaggtcgccagcaagcggctgctgtcgaacattgtgtacgaattcaggcgcgaacttccgcgccagcaggctcaacaggccggctatggcctggcggcgcttatcgatggactgtggctacgcgccgcgctgagcggaaaaccgtttaatctcagtctcgctcaggcgctgaccactcatttcatcagtcagcatttgccgaacgccactgactaa

SEQ ID NO: 71466 - DNA, 1473 bp, Citrobacter koseri
atgccccgaatggcagaacaacagctttatattgacggcgcatatactgccgccaccagcggtcgcacctttgagacgatcaatcccgctaacggcgaggtactggctaccgtacaggccgcaggccgcgacgatgtcgatcgcgccgtgaaaagcgcgcagcgcgggcaaaaaatgtgggccgcgatgagcgcaatggcgcgctcgcgaatcctgcgtcgggcagttgatattctgcgtgaacgcaatgacgagctggcgcaactggaaacgctcgataccggtaaaccactgagcgaaaccgccagcgtagacatcgccaccggcgcagacgtgcttgagtattacgccgggctgatccctgccctggaaggcagccagatcccgctacgcgagacgtcattcgtctacacccgtcgcgagccgctgggcgtggtggccgggatcggcgcatggaactaccccattcaaatcgccctgtggaaatccgctccggcgctggcggcaggcaatgccatgatcttcaaacccagtgaagtcacgccgctaaccgcgttaaaactggcggaaatctacagcgaagccggtctcccggacggcgtgttcaacgtgctgccaggcaccggcgcggaaacagggcagttcctgacggaacatcctgatatcgccaaaatctccttcaccggcggcgtcgccagcggcaagaaagtgatggccaattcagcggcttcatcgctgaaagaggtgacgatggagctgggcggcaaatcaccgctgattatctttgacgacgcggacctcgacctcgcggcggatatcgccatgatggcgaacttcttcagctccggccaggtctgcaccaacggcacgcgcgtattcattccggcgcacatgaaaagcgccttcgagcaaaaaattctggcgcgcgtaagccgcattcgcgcaggcgatctgtctgacccggcaaccaattttggcccactggtgagcttccctcatcgcgacaacgttctgcgctatatcgccagcggaaaagcggaaggcgcaacgctgctttgcggcggcgacgtattaaaaggcgaagcgtttgataacggcgcctgggtcgcccccaccgtattcaccgactgccgggatgagatgaccatcgtacgtgaagaaattttcggcccggtgatgtccattctgacctacgaaaacgaagaagaggcgatccgccgcgccaataacaccgattacggactggccgccggggtagtgacagccgatctcaaccgcgctcatcgctcaatccaccagcttgaagcggggatctgctggatcaatacctggggggaatctcctgctgaaatgccggtcggcggctacaagcattccggtattggtcgcgagaacggcatcatgacgctgcaaagctacacccaggtgaagtccatccaggttgagatgggtcagtttcaatccatattttaa

SEQ ID NO: 71467 - DNA, 1677 bp, Citrobacter koseri
ttgcattttgactacatcattattggcgccggttcggcgggcaacgtactggcaacacggctgaccgaagacagcgacaccaccgtgttgctgctggaagcgggcggcccggactaccgtgcggatttccgcacccagatgcctgccgcgctggcgtttccgctacagggtaaacgttataactgggcgtatgagaccgaaccggagccgcatatgaactaccgtcgcatggagtgcggccgtggtaaagggctgggcggctcatcgctgattaacggcatgtgttacattcgcggcaacgcgatggatctcgacaactgggcgcaggagccaggcctcgaacactggagttacctcaactgcctgccctattaccgcaaggcggaaacccgtgatatcggccccaacgactaccacggcggcgacggcccggtaagcgtcgccacgccaaagcacaataacaacccactgttccatgcgatgatagaagcaggcgtccaggcgggatatccacgtaccgacgacctcaacggctatcagcaggaggggtttgggccgatggacagaaccgtgacgccgcaaggacgacgcgccagtacggcacgcgggtatctcgatcaggccaaaggtcggccgaatctgaccatcatcacccatgcgttgaccgaccatattctattcgaaggtaaaaaagcgtcaggcgttgagtggctggaaggcgacagcaccatcccgacccgggcgatggcgcgtaaagaggtgttgctgtgcgcgggcgccattgcgtcgccgcaaatcctgcaacgctctggcgtgggtgacgcatcgctactgaaagcgtttgatattccgctggtgcaccacctgccgggcgtgggtgaaaacttgcaggaccatctggagatgtatttgcagtacgagtgcaaagaacccgtctctctctacccggcattgcaatggtggaaccagccgaaaattggcgctgagtggttatttggcggcaccggtgtgggtgccagcaaccattttgaggcaggtggatttatccgcagcagcgaagcgtttagctggccgaatattcagtatcacttcctgccggtggcgattaattacaacggctcgaatgcggtgaaagagcacggttttcagtgccatgtcggttcaatgcgctcacccagccgtgggcatgtgcacattaaatcgcgcgatccgcgcgagcatccggccattctgtttaactatatgtctaccgggcaggactggcaggagttccgcgatgccatacgcatcacgcgtgaaatcatcaaccagcctgcgctggacaaataccgtggacgcgaaatcagccccggcattacgtgccagaccgacgaacagctggatgcgtttgtgcgcgaccatgcggagaccgcgtttcatccttgcggcacctgcaagatgggttacgacgaaatggcggtagtcgacggcgaaggccgggttcacggcgtggaaaatctgcgcgtggtggacgcctctattatgccgcaaattatcaccggcaacctgaacgccaccaccattatgatcggcgagaagatggccgatgcgattcgtggccgcgaaccgctggcaaagagcaccgcaagctattacgtcgcaggtgatgcgcccgtgcgtcagccgccgctgcgttaa

SEQ ID NO: 71468 - DNA, 1119 bp, Citrobacter koseri
atgccgctacccgattttcacgtttccgaaccgtttacgctgggaattgaactggaaatgcaggtggtcaatccgccgggttacgatttaagccaggagtcttccaccctgattgacgccgtcaaatcccaactcaccgccggagaagtgaagcacgatatcaccgaaagcatgcttgagatggcgacgggagtctgccgcaacattgaccaggcggcggcgcagttctccgccatgcagcaggtgattttgcaggctgccgcagaccatcatcttgaaatctgcggcgggggcacgcacccttttcaaaagtggcagcgccaggaggtgtgcgacaatgcgcgctaccagcgtacgctggaaaacttcggttatctgattcagcaggcgacggtatttggtcagcacgtccatattggatgcgcgaacggtgatgacgctatctacctcctgcatggtctgtcgcgctttgttcctcactttattgcgctggcggcggcatcgccgtatatgcaagggtcagatacccgtttttccagcgcccggctgaatatcttctcaagctttcctgataacggcccgatgccgtgggccagcaactggcaggaatgtgaagggctgttccgccgcctcgcgtacaccagcatgatcgacagcatcaaagatctgcactgggatatccgtcccagccctcacttcggcacggtagaagttcgggtaatggatacgcctctgacccttgctcatgcggtcaatatcgcggggctgattcaggcgacggcccactggctgctgaccgagcgcccgttcaggcatcaggagcgggattatctgctgtacaaattcaaccgctttcaggcctgtcggtatggtctggagggaacattgaccgatgtccacaccggcgaccatcacctgctgtctgatgacacgctacgcctgctggagaatgtcgcctcctccgcagataaagtcggcgccgccagcgccattaacgctctgcgcctacaggtgaaaaatgggctgaatgaagcgcggcagatgcgggagtttgtgacggatggcggttcgctgattgggctggtgaaaaaacattgcgagatctgggcgggtcagtag

SEQ ID NO: 71469 - DNA, 249 bp, Citrobacter koseri
atgaaacacccgcttgaatcgttgatgaccgctgctggcatcctgctgatggcttttctctcctgcctgctgctgcctgtgccctcgcctggcatggtgctggcgcgaaagctggttgcgaccttccatttaatggatctcaaccagctttacactctgctgttttgcctgtggtttttaacgcttggcgctctcgaatatttcgtgatccgttttatctggcgtcgctggttttcgctggctgactaa

SEQ ID NO: 71470 - DNA, 1626 bp, Citrobacter koseri
atgaagatggcatggagtggtttggtgattgggctggggacgatgtcggctcaggcgatgccgtgttcgacgccctccgttcagggagagcagcaggggaaatttgatgccagcggcgagatctgctttgtgcttcccgcgctgagtgaaaattatgtttcggccaccctgtcggggattaccgatgctcgtttgctggacggtcagaaccgtcgcatccgtactttactggaaggtggcccggccgatggcgagcatcagctgttgttttcgttgccggtacaacaggccacctcgctggtgttgcacggtaatgagggcgctcgctggcggtttacatggcagatgaaagaaaccacgccgctgccgaaaatacagcgcgtcgctcccgtcagcccaaccttgcagcaactggaaaaagcgctggcggcaggcgccggaaccgcccatttctggcaggatctacagcgcaacggcacgccgctggtggagccggttgacgacagccataagcgggttacgtttctgtggcgcggtgcgaagcagaacgtttttattctcggttctccggcaggcgatcacgatcctctgttccgcctgggcgattccgacgtctggttccgcagctatgtggtgcctgcggatacggtaatgcagtacaaactggcgccggatgttccgttggtgaacggttcgccgcgcgatcagcggcgggcgattctggtcagcgcgcagagagatccgcttaacccgctgacgcttggcgagaagtatgccgatcgctggaatcagttttcccttctcgatctgagtcccgcgcggttttgctctgcgcaagctaccgcgcagcctgttcgttacggttcgcttacgcgcaaaacattgttcagcgaacgtctgggcaacagtcgtgaaattgcgatttatcgcccacacagcgcacaaccggcacgctggacgctgatgctgtttgacggcaaaacgtatcttgatgattaccatatcgatcgcgtgctggatgggctgatcgcgcgccatcaactgccgccgataaacgtggtgtttattgatacgctcgatcacgccagacgggcgaaagagctgccgccgaaccctgattttgccgactttatggcgcatgaattattgccctggctgcgtcagcagggggtgaccacgcaacgacaaaaaacggtgctggcgggctccagctatggcgggctggcgtcatcctgggtcgcgttgcgctatccgcgcctgttcggcaacgtgctgagtttatccggttcgtactggtgggcgccaaaagacgaggaggccagctggctgacgcgtcagtaccagaattcgccgcgttatcctgtccgcttctggttgcaggctggccgctttgaaaccaaaggcccggacggcggtatttatcgcaacacgctggaatttgcgcaggtactacgtgaaaaaggctatccggtgagtttccatccgtggtcaagcggacacgattacgccgcgtggtgtgaagcgctggttcacggtatgcgggatttcactggcttagtcagccagcgaaaaccagcgacgccagataaaacggatcacgaaatattcgagagcgccaagcgttaa

SEQ ID NO: 71471 - DNA, 2148 bp, Citrobacter koseri
atgatatttaaaaataacaagataatgcagctctgggttctcagtctggcgaccgtcagtacgacgacgtttgccaaaacgcaggaggagaccattctggtgacgcaaggcgtcagccaggaacccactgcgccggtgaagggaatggtggcgaccaaaaccctgtcggcaaccaaaacctcagcggagctggtgaaaacgccgcagtccgtctccgtcgttacccgcgaccagatggacgcgctggacgccacctccgtctcccaggcgctacgctacaccgccggggcatttacggagtatcgcggctcatccaaccgtaacgatgaagtgtttgtacgcggcttcagctacgttcctaaattccttgatggtctgagctttggcgcaacggcgtcatcgcaaaccggcaccgttgatccgtggctgctggagcgggtagagctggtacgcggcccggcttcggttctgtttggccaggtgaaccccggcgggcttatcagcatgaccagcaaacgccccaccagcgaaccgattcataaggttcagttcagcaccggtaatcgcgatctggcggaaggcgcatttgatttcggcggcccgctgagcgatgacggccgggtactgtatcgcctgaacgggatcgcccgcactcagcataaccaggttgaagactataaagattcgcgcgtcgcgattgctccggctatcacctggtatccaaacgatcagacccgtttcacgctgctgaccagctaccagaaagatcccgatgcgggctaccgtaacttcctgcctgcttatggcaccgtcaccagcgctaacggaaaatatattccgctcgattttaacgtcagcgatcctgattacgatcagtcatggcgtgagcagacgatggtgggttatgagtttgaacatcagttcaatgacatgatgaccttccgccagaacgcccgctatgccagcatcaagcaaaaataccgctatctggtttacttcaacagcaaaccggaaagcacgctgctcagccgtcgcgcccagcatgaggagcgcacgaccaatgagtttggcattgataaccaactggaagcacagtttgcgaccgcgcagatgaaccatacgctgctcggcgggctggattacaagtccagcaacgacaagcaactgttaatgcgcggttccggctcgcagtacgatatggactggacgcacccggtttatggcgtaaacgtcgatgaaagcaccttcagcaccgccagccacgaacagcagaacctcgatcagatgggcctctatttgcaggatcagatgagctggaacaactgggagctgctgctctccgggcgctatgactggacggaagttcgcaccaccgattacatcaacagtgagaaaacgcagcagaacgacaacaagttcacctggcgtaccggcttgctgtatgcctttgatttcggcctctcgccgtacatcagctacagcacctcgtatgaacctaatctgcaaaccaaccgcgcgccgggcagcgcgccgtttaaacccaccaccggtaaacaaaccgaagtgggcgtgaagtatcagccggtggataacacgctgatgtcgctggcgttatacgatctcaaacagagcaatgtgtccacttacaacagcacgctgggctggttcgaaaacgcaggggaagtgcgttccaaaggcgtggaagcggaaattcactcttcactgtgggatagcgtcaacctgattggctcgtatacctacacggatgcggaaaccgtcaacaccacggtagcgggtacggaagggaaaacgcctgcccgtattcctgcccacatggcttccgccttcgccagttataccttccctggcggcccgctgaaaagcctgacgaccggcgtgggcgtacgctacatcggcaccagctacggcgatgcgaaaaacacctttaaagtgccggcggtggatctgtatgacgcgatggtgagctacgaactgggagaactgaacagcagcctgaaaggcgcagccatacagtttaatgtcaataatatcgccgatacgaaatacgtggcctcttgcgccagcgacaccgcctgcttctatggcgtaggtcgtacggttacggcaacagtgagctattcctggtaa

SEQ ID NO: 71472 - DNA, 342 bp, Citrobacter koseri
atgaccatttccgctcaggtaatcgacactattgtcgagtggattgatgataatttaaatcaaccgttgcgcattgatgatattgcccgccacgccgggtactccaaatggcatctgcaacgcctgtttatgcagtacaaaggggagagtctggggcgctatatccgggagcgtaagctgcggctggcggcgcgtgatttacgcgataccgaccaaagggtgtatgacatctgcctgaagtacggttttgattcgcagcagacctttacgcggatcttcacccgaacctttaatcagccgccgggtgcctaccgtaaagagaatcacagccgtacgcactga

SEQ ID NO: 71473 - DNA, 1101 bp, Citrobacter koseri
atgaagcgtctcacaatttgtgtggttgttattatgcttattgcttctacagcgagtctgccgtttgtccttaacgccgggtttggtcaggtgccgcagggcgctcaactgagcctggtggaacagtctccacactatcgtgatggacagtttcataatcaattacccactcccggttacaccggggataaggggatgctcgccgcatggtgggagtttctggtcgctaaacgtgaaaacgcgcggcctgcccagccgttgccgctggtaaacaccgatctcgccagcgtaccgcgcgatcgggacacgctcatctggctgggccattcctcctggtatctgcaactggcgggaaaacgcattctgatcgacccggtattcagcagctatgcggcgccgttttcgtttctgaataaagcctttgccggagactacccctggacggcgcaaaatatgccggagatcgacctgctgatcatctcgcacgatcactatgaccatctggactacgccaccatcaaagtgctgatgccgaagattaagcgggtcattacgccgctgggtgtgggatcgcatttgcgctactggggcatgaatggcgggattatcgacgagcgcgactggaaccagtccgtcaggatcgatgacgcgctgctgatccacgtcctgcccgcgcgccatttttctggtcgggggctcaaacgtaaccagacgctgtgggcgagttttatgtttgagacgcctgagcagaaggtttattacagcggggactccggttacgggccgcattttaaggcgattggagaacagttcggctcagtcgatctggccatcatggaaaacggtcagtacgaccgggactggcgatacattcacatgatgccggaagagaccgcgcaggcggcgcaggacctgcgcgcaaaagcgattttacccggtcatgccgggcgttttgtcctggcgaaacacagctgggacgatccgtataaacgtctggcgctggcgagtcgtcataaacgctaccgcctgctgacgccgacgctgggagaaccggtgatgttggccgatccgacccagcagtttacggcctggtgggaataa

SEQ ID NO: 71474 - DNA, 582 bp, Citrobacter koseri
gtggctcgtccgaagagtgaagacaaaaaactggcgttactggaagccgcaacaaaagcgatcgcgcaatccggcattgccgcctccaccgccgtcattgctcgcaacgcaggtgttgctgagggaacattgtttcgctatttcgcgacaaaagatgacttaatcaacgagctttatctgcatttgaagcaggatctctgccagtcgatgatggcgaatctggaccgctcaatcaccgacaccaggaccatgacgcactttatctggaacagctacatcaactggggtctgaacaacactaacgggcaccgcaccatccgccagcttgcggttagtgagaaaatcacgaaagaaaccgagcaactggcagacgatatgttcccggaactgcgcgatctctgccatcgttcggttctgcccattttcatgtctgacgaataccgcgcctttggcgatgccctgttcctcaccctggcggaaaccacgatggaatttgccgcccgcgatccggcccacgcaaatgagtacatctcgctgggttttgaagcaatgtggcgcgccctcacccgcgaggaaaaataa

SEQ ID NO: 71475 - DNA, 369 bp, Citrobacter koseri
atggacggccagacgctgcatcattgtgcgaaacgcatcgcgctcgaactgcctttcaccgaacactgctggccgttcggcccggagttcgatgtctttaaagtcggcggcaagatattcatgatcgtttctgaacaacgcggccgtcggtttgtgaacctgaagtccgatccacagaaatccctgttaaatcagcagatttaccgcagtattgaacccggttaccacatgaacaaaaaacactggatttccgtttacgcaggagacgatatcacaccgtcgctgcttgccgacctgatcggcgactcctggaatctggtggtggatggtctggctaaaaaagatcaaaagcgtctgcgccccgcctga

SEQ ID NO: 71476 - DNA, 654 bp, Citrobacter koseri
atggatatcgtttctgtcgccttaaaacgctactccactaaggcgttcgatcccagcaaacaactgaccgcagacgaagcggaaaaactcaaaacattgctgcaatatagcccttccagcaccaactctcagccgtggcatttcatcgtcgccagtaccgaagaagggaaagcgcgcgttgcgaaatccgccgccggtaatttcgtgtttaacgagcgcaaaatgctggatgcttcccatgtcgtcgtgttttgcgcaaaaaccgcaatggacgacgcctggctggatcgcgttgtcgatcaggaagatgccgatggccgttttgccacgccggaagccaaagcggcaaataacaaaggccgtcgctttttcgcggatctgcaccgccgcgacctgaaagatgacgatcagtggatggcgaaacaggtatacctgaatgttggcaacttcctgctgggcgtcgccgcgatgggtctggacgccgtaccgattgaaggcttcgacgctgcggttcttgacgctgaatttggcctgaaagagaaaggttataccagcctggtcgtggtgcctgtcggccatcacagcgtagaagattttaacgctgcgctgccgaaatcccgcctgccgcaggaaaccaccctgacggaagtctga

SEQ ID NO: 71477 - DNA, 867 bp, Citrobacter koseri
atgacggtgatgacgcgacgtgagctcacggtgatgcaacccgcagacaaccggaagcagctcggcgcatttttacgcgcccggcgggaaagcctcgatccgcaacgtatggggctgccgcgcgtcggtcggcggcgaacgcccggtctgcgccgcgaagaggtggcgatgctggcggaagttggcgtgacctggtacacctggctggaacaggggcgggaggtgaatccctctgagtcggtactggttggcgttgcgaatgcgctgcaatgcagcccgctggaaacccgacacctgtttgtactggccgggctgacgccgccggaatcgacgcagatcaccgtgtgcgaggggatcagtgcgggaacccgccgtatgcttgatagcctgatgccgcagccagccagcattcagaaacccaattttgatattgtggcgtggaatgagagtttttgtcggctgatgggcgtggattttgccacgatcccggatgacgatcgcaactgtatttacctctacctcaccaacgaaacctggcgcagccgcatagaaaaccgcgacgtgctgccgacgtttgtctcttattttcgtgcggcaatggcggaacaccgtggcgatccggggtgggaaaataaactggcgcgctttttcgccgcatcttccgagtttgaagcgttatggcatcagcgttatgaggtgcgtggcgtggaaaaccaggtgaagaattttctccatccccggttagggcgttttagtttgcagcagatgtactggtattccgcaccgcgtaacggctcccggttgttggtgtatttaccgatggatgaggccggagaacaggcgctggcgtggctggataagcagtaa

SEQ ID NO: 71478 - DNA, 1437 bp, Citrobacter koseri
atgaatacgtcagtcgtttcactcagtcgcaccgggctatcgctcttgctgacaggccaaatgctgccgcttattgatacatcgattaccaacgtcgccctggagtccatcacccggtctttgcaggcgacgacgacgcaactggagttaattgtcgccctctatgggataacgttcgcggtctgtctggcgctggggagcaagctcggcgataactacggtcgccgccgcctgtttatgtggggagtcgcattctttggcgtcgcctccctgctctgcggtctggcgaactctattcacatgctgctgggcgcccgtattttgcagggggctggcgcggcgttgatcgtgccgcaaattctcgccacgcttcacgtcacgctaaaaggaagcgcgcacgcaaaggccatcagtttatatggcggtattggcggcattgcctttatcgtcggtcaaatgggcggtggctggctggtctcggcggatatcgccgggcttggctggcgcaacgcattttttattaatgtcccggtctgccttctggcactggcattcagccgccgccacgttcccgaaacggccagcgaaacccgcgccgacatcgactggttgggcaccgtctgtctggccgccatcctctgctgcttgctttttcctatggcgctggggccagaaaccggctggccctggcaggctcaggcggcgctatttgccattctcccgctgggatggtggatgcgtaaaaatgcgctccggcaggagctgcgccaccagcacccgcttctgccgccgcgcctgttacggctgaccagcatccgtttcggcattctgatcgcattgctgttttttagcgcatggtcaggttttatgttctgtatggcgctgactctgcaaatgggtctggggatggcgccgtgggaatccggcaacagctttatcgccctcggtgcggcctatttcatctcggcctgctacgcaccgcgattgattgcgcgctacagcatggggcgtattctgttgatgggtctggcgattcagataatcggcttagccgggttaatgatgaccttctggcattcgggtatgcaaacatccaccttcgcgctggcgccggcaacggccctgataggttatggacaggcgctgatcgtgaacagcttttatcgtatcggcatgcgcgatatcagcacgcaggatgccggagccggaagcgccattttaagcacgttgcagcaagccacattggggcttggcccggcggtgctgggggcgttatttttgcatctgcaacacaatagtcacggcgattatacgcagtcggtgatcggttttctggccgtcgaagctgccatgatgctcagtctggttctggcgacattatggtttcgccgcgcattgaatatcaatgcagcccgcccctgtatggcgtcaaaatag

SEQ ID NO: 71479 - DNA, 1245 bp, Citrobacter koseri
atgcaggaattaatatctcaggtagaagaactcgggatcgaaatgaatcacaccacttcgctggtgatgatttttggcattatttttctcactgccatcattgtgcatattattttgcattgggtggtgctgcgagcctttgaaaagcgcgccagcgccagttcacgcctgtggctgcaaatcattacccagaataaattatttcaccgcctggcatttacgctccaggggattatcgtcaatattcaggctgtgctctggctacaaaaggggactgaggcggctgagatattaaccacctgcgcacagctgtggatcatgatgtatgccctgttgtccgtcttttcattactggatgttattctcaacctgtcgcaaaaattcccggcggcgtctcagcttccgctgaaagggatattccagggcatcaaactcatcggcgccattatcatcggtattttgatgatctccctgctgataggtcagtctccggccattctcattagcggtctcggcgcgatggccgccgtcttaatgctggtgtttaaagaccccattctcggtctggtcgcgggtatacagctttcagcgaacgatatgttgaagctgggcgactggctggaaatgccgaaatacggcgcggacggcgcggtgatcgatatcggcttaaccaccgtgaaagtgcgtaactgggataataccattaccaccatccccacctggtccctggtttcggactctttcaaaaactggagcggcatgtccgcctctggcggtcgccgaattaaacgcagcatcagtatcgacgccaccagcattcattttcttgatgaggatgagcagcagcgtttatataaagcgcatttgttaaagccctatttaaccacccgccatcaggaaatccaggaatggaaccaacagcagactgcgccggaatccgtactcaatcatcgtcggatgaccaatattggcactttccgcgcctacctgaatgaatatttacgccaccatccgcgtatccgcaaagatatgaccatgatggtacgccagcttgcgccggacgatcagggcttacccattgagatttacgcgtttaccaataccgtggtgtggctggaatatgaaagtattcaggccgatattttcgaccacatttttgccgtggtcgaagagtttggcttacggattcaccagtcccctacaggaaacgatattcgcgcgctgtccggggcgtttcagcgctaa

SEQ ID NO: 71480 - DNA, 981 bp, Citrobacter koseri
atgtctattcaaaaaatcgcccagctcgccggtgtgtcggtggcgacggtatcacgcgtgctcaataacagtgataccgtcaaagccaaaaaccgcgagcgcgtgctgcaagccatcaaggaaagtaactatcagcccaacctgctggcgcgccagcttcgcaccgcgcgcagctcaatgattctggtgatggtttcaaatattgcgaaccctttttgcgcagaagtggtgaagggcattgaagaagaggcggagaaaaacgggtatcgcattctgctgtgtaattcaggctcggatatggcgcgttcaaaatcggcgctgaaactgctctcggggaaaattgtcgatggcattatcactatggacgcgttttcaaaattaccggagctgaccaccatgatcggcgatgcgccttgggtgcagtgcgcggaatacgccgataaaggcgcggtctcctgtgtggggatcaatgacgttgatgccgcacagtcggtcatctcccatctggtcgaaaaggggtatcagcggattgcgctgatcaaccatgatttaagctataaatatgcgcgtctgagggagcgggggtataaggcggcgcttcatgcctggtctctggattatcaggcggtagagtatgccagcgaactgagttccagcgccggaatggcggcgatggacgttttgctgacggccgaaacgcgcccggatgcggtttttgcggtatcggataccctggcggcaggcgccatgcgcgccattgccagcgccggattgcgcatcccgcaggatatcgccgtcgtaggttttgacggtacggagctggcggagatggtttccccgcagctgaccactatcgagcagccttcccgcgatattggccgtaaagcggtcgggctgctgctgaaccggattgaacacccggatgcgccaaccgaaagggtgatgatggactggcgctatatttcccgcgccagtacctga

SEQ ID NO: 71481 - DNA, 1152 bp, Citrobacter koseri
atgattcaggttggcattatcggaaccgggtttattggccctgcgcatattgaagccttgcgccgaccgggaaacgtatcggtggttgcgctttgcgacagttcgctggagaaggcgcaggagaaagcccgggcgctaaacgttccgcacgcttacggcagcgtggaggcattactggcgcatccgggattgcaggtggtacacaactgcacgccaaaccaccttcatgccgacatcaatcgccaggtgttgcgggcggggttgtctgtgttctccgaaaaaccgctctgcatgacgccggatgaagcgcgtgaactggccgcgctggcggagcaggcgggggtggtgcatggcgtgagttttgtctaccggcagtttgcgatggtgcagcaggccgccagcatggtacgcgccgggagcgtcgggcggcagttttccgtgcagggcagttatttgcaggactggatgctgctggaaaccgactataactggcgcgtagaccccgcgcttggcgggagctcacgcgcggtggcggatattggttcacactggtgcgacacggtgcagtttgttaccggaaagcggattgtggaggtgatggcggatcttgcaactgtctggccaatgcgtaaggccagcgtggaagggaactcgacgtttactcagccgctcacggagcgccagtgggtagataaaccggtcagcacggaagacagaggcgcggtgctggtgcgttttgatgacggcagcaaaggctgtttcagcgtttcacaggtgagcgccgggcggaaaaaccagctgacatttgagattaacggcagtcactgttcgctggcctgggatcaggaggtgccgcagcagctgtggatcggccaccggcagcaggcgaatcagatcctgacggacgaccccggattaatgaacgcggatgtggctggcagcgcgcactttcccggtgggcatattgagggctggccggatgcctttaaaaacatgatgcagcagttttatcttgcggtgcaggcaggaaaaatgcccgcgccggaggtgcgtcgttttgcctcgttcgcggacggtgctgacgtgatgtatatcattgacgctattgtgaaaagccatcaacaccagcggtgggtgagcgtgatgcggtaa

SEQ ID NO: 71482 - DNA, 1029 bp, Citrobacter koseri
atgagaaccattaagggaccgggtatttttctggcgcagtttatcggggggcaacccccgtttaatacgctggaagggctggccggttgggcggcagggctgggctataaggccttgcagatcccctgcaatcataaagcgttgtttgatgttgaacaggccgccgtgagccagacctactgtgatgatattcgcgggatgctggcggatcacggcctggtcatcagtgagttatcgacccatcttgaaggtcaactgattgcggtacacccggcctatgatgaggcgtttgccggttttgcgccgcagtcggtgcgcggaaacccgcaggcgcgacaggcatgggcgacgcagacgttgcaacaggctgccgccgcttcgcaaaaactggggctgaccgcacatgccaccttctccggttcgctcgcctggccctatttttacccctggccgccgcataatcgtcagcgttttgacgaggcgttcagcgaactggcgcgccgctggcgaccgattctcgactgctttgatgagcatggcgtggacgtgtgttatgagattcaccccagcgaagatttgcacgatggcgtcacgttcgagcgttttttagcgctggtcgacgatcatccgcgttgccatattctgtacgatcccagccacctgctgctgcaacagatggattatctgggctttgtggatgtgtaccactcgcgcattaaagcgtttcatgtgaaagatgccgagtatcgcgccagcagccgtagcggcgtatacggcgggtatcaaccctggattgaacgggccgggcggtttcgttcgccgggcgacggacaggtggatttcaaaacgctgttcagcaagttcgcccaatatgattaccccggctgggcggtactggagtgggagtgctgcctgaaagaagccgccaccggcgcgcgtgagggcagtgaatttattcgccgtcatattattccggtttctgagcatgcgtttgatgatttcgctgcgggtgatgaggtacgtaaatga

SEQ ID NO: 71483 - DNA, 1242 bp, Citrobacter koseri
atggtgtcgacaaccgaaagtagtggaaaacagaccgtacagtaccggctgctggtgccgagactgtcgttaatgatgttcttacagttcttcatctgggggagctggtcggtgacgctggggctggtgatgacccagtacaacatgtcgctgctgattggcgatgcgttttccgccgggccgatcgcctccatcctgtcgccgtttgtactggggatgctggtggatcgcttctttgcgtcgcaaaaagtgatggcggtgatgcatgtggcgggggcggcgattctgtggtttgtaccgcaggcgctggtggcgcaaaacggggcattgctcatcgggctgctgtttggctatacgctgtgctacatgccaacgctggcgctgaccaacaatatcgcctttcatagcctgtcagataaagataagaccttcccggttgtgcgcgtgttcggcacgattggctggattgtggccggtatttttatcggcgtgacggggatttccgacaccaccgggatcttcacgcttgccgcgctctgctctgtgattctggcgctctacagcctgacgctgccgcacacccctgcgccagcgaaggggttgccggtgaagatacgcgatcttttttgcgctgatgcgtttgcattactcaagacccgccacttctttgtgttctcgctttgcgcgacgttaatctccgtgccgctgggaacttactacgcctataccgcctcgttcctggcggatgctggcgtgggcgatgtcagcaccgcgatgtcattcggccagatgtccgaaatcgtctttatgctggtgatccccttcctgttccgccgtctgggggtgaaatacatgctgctgatcgggatgtgcgcctggtttgtccgttatgccttctttgcgctcggcatcagcgaagaggggcgcttcctgctctatctcggtattttgcttcatggcgtgtgttatgactttttctttgtcgtgggttttatctataccgaccgcattgccggagaaaaggtgaaggggcaggcgcaaagtatgatcgtcatgtttacctatggcatcggtatgctgctcggctcgcagatctccggcgtgctgtacaaccgcctggtggcggggcaggcggttcctcaggcctgggtaacgttctggtggctcccggcagtggccgctgcggtgattgccgcgattttccttttcgctttcaagtatgacgagaaagagcaggcgtaa

SEQ ID NO: 71484 - DNA, 1395 bp, Citrobacter koseri
gtgaaaaacgcgtcaactgcatctggcaacagtttgcctgatgctgcgtcgaacggagagccgacgcttcaacgggggttgcaaaaccgccatattcaattgattgcgctgggcggcgcaattggtacaggtctgtttctggggattggccccgccattcaaatggctggcccggcggttctgctgggttacggcgtcgccggaattatcgctttcctcatcatgcgccagctgggtgaaatggtggttgaagaacccgtttccggctctttcgcgcactttgcatacaaatactggggccccttcgccggttttctttccggctggaactactgggtcatgttcgtactggttgggatggcggagctgactgccgccggtatctatatgcaatactggcttcccgatgttccaacctggatctgggccgccgcattcttcattatcatcaacgccgttaacctcgtgaacgtgcgcctgtacggtgaaacggagttctggtttgcgctaatcaaagtgctggcgattatcggcatgatcggctttggcctgtggatgctcttttctggtaacgggggagaacatgccagtatcgagaacctctggcgctacaacggctttttcgctaccggctggaacgggctgatcctctctctggcggtgatcatgttctctttcggcgggcttgagcttattgggatcaccgccgctgaagcgcgcgatccgcataaaagcattccaaaagcggtgaatcaggtggtttaccgtattctgctgttttatatcggttcgctggtggtgctgttagcgctttatccgtgggtggaagtgcaatccaacagcagcccgttcgtgatgattttccataatctcgacagtaacgtggtggcttctgcgctgaactttgtcattctggtggcctcgctgtcggtttataacagtggcgtctattccaacagccgtatgctgttcggtctttccgttcagggaaatgcgccgaagtttttaacccgcgtcagtcgccgtggcgtaccggtgaactcgttggtgctctctggcgctatcacctcgctggtggtactcatcaactatctgctgccgcagaaagcctttggcttactgatggcgctggtggtcgccacgctgctgctgaactggattatgatctgcctggcgcatctgcgttttcgcgcggcgatgcggcgcaaaggtcgcgacacgcagttcagggcgttgctgtaccctgccgggaactacctgtgcattgcttttctggcgatgattctggttctgatgtgtaccattgacgatatgcgcctgtcggcgatattgctgccggtatggatactgttcctgttcgttgcctttaaattactgcgccgtaaaacccgttaa

SEQ ID NO: 71485 - DNA, 1086 bp, Citrobacter koseri
atgaaaaagacaacatccgcgttggccctgctgattgccgttgcattaagtggttgtgcggccacttccggttcttcaacccccgttgcgccgcaggcaacgccgactgcgccagccgttgcgaccgatgttcagaaacgtgatttagccgatggactgtatgaaatggcgttaagcccgtcaggcgatgcgctttacgttgccagcgccgaaggttttaaagatgtgcagggcggggtggtctacaaactggacccgaagacgctgaaaaccattggcgccagccacactgacctgaaaaacttcggtatggcgatttcgccggacggtaaaaccgtctatgtcaccaattcgctggatggcggcgtgagcgcgctgaataccgccgacggcaaagtgaaaaaccgtgtgctcttcccggaacgtaacccggaaggattcccgtacggcgcgcgtcaggttctgctgcataacggcctgctgtatatcggcgccgttgccgatccggcggtgatctgggtcgtcgatgccgacaccctgaagctgaaaacccgcatcaaaaataccggtaaatggatgaccggtctgcactactctgacagcacgcagcgtatctatgccgcgaatggcggcggtgaaattctggttatcaatcctcgcacgcagcgcgtagaaaaacgctggaaaccgctgggtgataaaccggcgctgctgctgaatatggcggaagatacgcaaaccagtcgcctgtttgttaccgacaactccaaagcgaaaaccacgctggtgctggatatccatacgggcaaactcatcaaacagctggatgtgggcgattccttatcggtgaaattcaacccgaaacgcaatgaactttatatttctcagcgtgagtccgggaagttgctcagcctcaacgcgacggattacagcgtgaagaaatcctgggatctgccgccgaatccaaacagcctgctgctgtccgccgatggtcagacgctgtatgtcacggtgaaacagaaattcaataaagatcactcgactgatgcgccagacagcgtggtgcgtattgatctgaacaaataa

SEQ ID NO: 71486 - DNA, 1176 bp, Citrobacter koseri
atgaataaaatcattaaacggttagagatcgtcaaaagcgccatcgaacttgaggatgaggagatcatccatcagcaacttgcgcacctgaaagacgcctctctggatgcggccatcggcaccattgccctggcgatcgaggagcgacgtttcggcgacgcgatgcgtgaaattgccgcctggttacagtcccagcgcgccgtctcgacgtggcaggaccccggcatcgccgccagcaagctggaactgaaggcgctcgaaacgcagctacgcgagctgatcgacaaacgcaatgcccgcatccagatcctcgacgatttcaacgatttgtatcacttgcgccttggcccgctcatgggccgtattctggagctgcgcaaacagctggccgccagcgcgcagcgtaggcaagaggccgaactcagacgacgtgaaaaggactatcagtcctgccagcagtatatttctcaggctatcgatcagttagtgaagcttaaacagcactgggtgagccttagctcaacctcccgggaagcagtggaaaccagagagcgtattcagcagcagacggaacttatcacctccctgctggcggaaattcgcgagctggagaatgatttctcacgtcaggatgacagcgcaacccgacaggcgcgtgaagaggccgatcacgaatatgaggaatatcaggagcagcatcaggatgcgcagcaccgctatgcgcgcgatcaacgcctctctgctgatgaacgtaatgagcttaaacgcctgtggcgccaggccagccgactctgccacccggatgtggtcgccgatgagctgaaagaaaaagcgcaccagatgatggttcaacttaaccaggcccggcagaatgccgacctggccacgatccgttcgctacttacccagttgcaaagcggtctggagccgatgctggcgagcgacaggctgaacaatcttgcccatctgcgcagtaagatagagcaactcagaacgcaaattaacgccctgctcaaagagataagcgagctggaaacggagaacgcctggcgtcttgccacatccgtaaccgacaaagaagcgtactttgccgagcaggagcgcgcattagcggaaattcgcgatacgctggaagttcaggtaaaacatgcggaacaagagatcctcgcagggtaa

SEQ ID NO: 71487 - DNA, 696 bp, Citrobacter koseri
atgagttttggattgatgaaggataacaagtttgaaattatcgctgttttccgtgaagagctactaaagaagactaaactagagcttaaatatgccaacactagtgtggtcacgcagctggaaaaagttgattttgaacattttgttatccctcaccataaggatattgtcaccaaaaagatccaaacgtttattcttcacagtgaaaatggaattataaaatttaacgccagaattgatcaggaaatgtcagacggcatggagaatgcgctggcgtatttcattcccgagatggtctttcttatacaacgacgccagcatcagcgcttctccttcctgaagggacacagtttcaactgctttggacgatataaaaatggagagaattattctttcaaaattaaaaatatgtccagggggggatgcgcattaattgcgcaggatgcgaatacgcgttttctctataaagatgccgtcataaaaggcgcgtctctggattttgagcaattcggctatttgcaactcgacttaaaagtggtggatgtggtgatggtcaatgaatttgatgcagagaatcagctgtattcctgttatcaggtctcctgccgttttgattttaaaaattcgcgtgaagaagcagagatcgaaagaatcatcattagttttttaatgggcaataaagttcgacggctataa

SEQ ID NO: 71488 - DNA, 3147 bp, Citrobacter koseri
atgattgaatggattatccgccgctccgtagcgaaccgttttctggttgtgatgggggcgctgttcctcagcatctggggaacctggaccatcattaacacgccggttgatgcgctgcctgacctgtctgacgtgcaggtaattgtgaaaaccagctatccgggacaggcgccgcagattgttgaaaatcaggtgacctatccattgacgaccaccatgctgtcggtgccaggtgcgaagacggtgcgcggtttctcgcagtttggcgattcttacgtgtacgtcatttttgaagatggcaccgatccctactgggcgcgttctcgcgtgctggagtacctcaatcaggtgcaggggaaactgcctgcgggcgtcagcgcggaaatggggccagacgccaccggcgtcggctggatatttgaatatgcgctggtggatcgcagcggtaaacacgatctggcggaactgcgctctttacaggactggtttttaaagtatgagctgaaaaccattccgaatgtggcggaagtggcctcggtcggcggcgtggtgaaagagtaccaggtcgttatcgacccgatgaaactcacgcagtatggcatcagccttgcgcaggtgaagtcggctctggatatgtccaaccaggaggcggggggctcctccgtcgaactgtcagaagcggaatacatggttcgcgccagcggctatttgcagaccctcgatgacttcaacaacattgtgctgaaatccggtgagaacggcgttccggtgtaccttcgcgatgtcgcccgcgtacagattggcccggaaatgcgccggggcattgctgaactgaacggcgaaggcgaagtggcgggcgggggggtgatcctgcgttccggtaaaaacgcccgggacgttatttccgccgtgaagacgaagctggaaacgctgaaaagcagcctgccggaaggcgttgacgtcgtgacaacctacgatcgcagccagctgattgaccgcgctattgataacctcagctacaaattgctcgaagagtttattgtggttgcgctggtctgcgcgctgttcctgtggcatgtccgctcggcgctggtggcgatcatttcgttgccgctgggcctctgtattgcctttatcgtgatgcattttcaggggctgaacgccaatattatgtcgctcggcgggatcgccattgcggtaggggcaatggtggatgccgcgattgtgatgatcgaaaacgcgcataagcggctggaggagtgggcgcaccagcatcccggcgacccgctggataacgaaacgcgctggaaagttatcacgaacgcctcggtggaagtgggcccggcgctgtttatcagcctgctgattattaccctgtcgttcatcccgatttttaccctcgaagggcaggaaggacgcctgttcggcccgctggcattcaccaaaacctatgcgatggcaggggcggctttcctggcgatcgtggtgatcccgatcctgatgggctactggattcgcggcaagatcccggcagagagcagtaatccgcttaatcgctttttgatccgcatttatcacccgctgctgttgaaagtgctgcactggccgaagaccacgctgctggtggcggtactttcgatcctgacggtcatctggccgcttaataaagtgggcggggagttcttaccacaaattaacgagggcgatctgctgtatatgccttccacgctaccggggatttcggcggcgcaggcggcggatatgctgcaaaaaaccgataagctgatcatgacggtgccggaagtggcgcgcgtgttcggcaaaaccggcaaggcggaaacggccaccgactctgcgccgctggagatggtggaaacgacgatccaactgaaaccgcaggatcagtggcggccgggaatgacgatgaacaaaatcatcgaagaactggataaaacggtgcgcttaccggggctggcgaatctgtgggtgccgccaatccgtaaccgaatcgacatgttgtctaccgggataaaaagtccgattggcattaaagtgtccggcaccgtgctggctgatattgatgccacggcggagcagatcgaagaggttgccagaaccgtaccgggcgttgcctcggcgctggcggaacggctggaaggaggccgttacctcaatatcgacattcatcgtgaaaaagccgcccgttacgggatgaccgtcggtgatgtacaactgtttattacctccgcagtcggtggggcgatggtaagcgaaaccgtggaagggattgcgcgttatcccattaacctgcgctacccgcaacgctatcgcgacagcccggaaaccttacgtcaactgccgattctgacgccaatgcagcagcaaattaccctggcggatgtggcggacgtgaagatcgcgccaggaccgtcgatgttgaaaaccgaaaatgcccggcctgcaagctggatctatattgatgcgcgcgatcgtgacatggtgtcggtagttaacgatctgaaaaaagcgatcgcggaaaaggtgcagttgaaaccgggaaccagcgtggcgttttccgggcagtttgagctgcttgaacgcgccagccataagctgaagctgatggtgccgatgacgctgatgattattttcgttctgctgtatctggcgtttcgtcgggtgggggaagcgctgctgatcattaccagcgttcctttcgccctggtcggcgggatctggttcctgtactggatgggctttcatttgtccgttgccaccggaacgggattcatcgcgctggcaggcgtcgccgcagagtttggcgtggtcatgctgatgtacctgcgtcatgcgattgaagcggagccgtctctggataatccacaaacctttacggtagagaaacttgatgaggcgctgtaccacggtgcggttctccgcgtgcggccaaaggccatgaccgtggcggtgattatcgccggtctgttgcctattttatggggaaccggggcgggttcagaagtgatgagccgtattgccgcgccgatgattggcggtatgatcaccgcgccgctgctgtcgctatttatcattccggcggcgtataaactgatgtggttgcgcacgcatcaacataagcgctcataa

SEQ ID NO: 71489 - DNA, 1278 bp, Citrobacter koseri
atggcgtctttaaaaataaaaaataccgcgcttattctcggcagtatgatcgtcggagggattatctcggtcggcgtttacgcttattttgcgtctgcgcatcagcctgtcgatactgcgcctgcctccgaaaaagaggcccgtaaggttctgttctggtatgaccccatgtatccgaatacgcgctttgataagcccggtaaatcgccgtttatggatatggatctggtggcgaaatacgctgacgaagagtcagacacgacctctgcgccaggcgtgcgtatcgatccggtacagacgcagaatttagggttaaagacggaggctgttcgccgtgggccgctgcgctacgcgcaaactttcccggctaacgtcagtttcaatgaataccagtttgtgattatgcaggcgcgttccgcaggctttatcgataaagtctggccgctgacggtgggggataaaattaagaaaggaacgccgctgatcgacctgaccattcctgactgggttgaagcccagagtgaatatttactgctgcgggaaacgggcggtacggcaacgcaggtggaaggcattcttgaacgactgcgtctggccgggatgccggaagaggatatccgccgcttagtctcaacccgtaaaattcagacccgctttaccctgaaagcgcctattgatggggtgatcaccgcgttcgatctgcgcgccgggatgaatatcgccaaagataacgtggtggcgaaaatccaggggatggacccggtgtggatcagcgcggccgttcctgaatccatcgcatggctgattaaagatgcctcgcagttcgatattgccgtgcccgcgtggccggataaacgcttcaccatcagtaaatggacgattctgccaagcgtggacgccaccactcgaaccctccagttgcgcttacaggttgataaccctgatgaagcgctcaagcccggaatgaatgcgtacctgaagctgaaaacgcaaagcgaaccgatgctgctaatcccgtctaaggcattgattgataatggaacggaacagcgagtgatcgccgtcgacaacgacggtcgctttgtgccgaaacaggtctcggtgttccatgaatcacaaggcgtgacggcgattcgcgccgggcttgccgaaggtgaaaaagtggtctccagcggactgttcctgattgactccgaagccaatatctccggcgcgctggatcgtatgcgggcgcaatcttcctctgctgcgcccgatcatgcggcccattcacattga

SEQ ID NO: 71490 - DNA, 348 bp, Citrobacter koseri
atgaacaatacagtaaaagcggcgattttgggtctgttctccgccgtggtatttaacgttcaggcgaatgaacatcaccacggcgagatgatgaataacgcatcagcggcgcagccggagcaggtgattcattcaaccggcgtggttaaagccatcgacaaagacacgaaaaaagtgactatcgatcatgaacctattccggcggtcaactggcctgcgatgacgatgcgctttaccctgaccccggaaacccgttccggtgacattaaacccggcgacaaagtggcgtttactttcgttcagcagggcaatctctctttattacgcgatattcaggtcagccagtaa

SEQ ID NO: 71491 - DNA, 1383 bp, Citrobacter koseri
atgcgcaaatttaagcttcttaccctcagcgtgatgcttgttctgacgggctgttcgctggcgccggactatcagcggcccgcgttgccggtgccgcaacaattctccctgagccagaatgcgctggtttctgcgcctgcggggtatcaggagaccggctggcgaaccttttttgttgatgagcaagtaaagtcgctgatcggcgaggcgttacgcaataaccgtgacttgcgcatggcgacgctgaaagtgcaggaagccagagcgcaataccgggtgacggatgccgatcgttatccgcagcttaattccgatgccagcggaagctgggaaggaaaattaaagggtgacagcagcagtacccgcgaatatgaagccgggctgaatctgagttttgatctggacttttttggccggctgaaaaacatgagtgaggctgaccgacagaactattttgccagcgaagaagcgcgccgggcagtgcatatcttattaatctcaaacgtggcgcaaagttattttaatcaacggctggcgtacgcgcagttgcaaatcgcacaagaaacgctggaaaactatacacgctcttacgcatttgtagaaaagcagttgctgaccggcagcacgaccgtgctggcgctggaacaggcgcggggcgtgattgaaagcacccgcagcgatattgcgaaacgacagggcgagctggcgcaggccaataatgcgctgcaattgctgttgggcacttattctgtgctgccggatgacagggcgcgcgatagcggagatattaaaaacgtgacgctcccgccgtcgctttcctcgcaaatcttgttgcagcgcccggatattatggaagctgaacatacgttgatggcggcgaatgccaatattggcgcggcgcgcgcggccttttttccttccattaccctgaccagcggggtgtccggcagcagcagcgatctctcccgtttatttaatgccgcgagcgggatgtggaattttatcccgaaagtggaactgccgatttttaacgccggacgtaatcaggccaacctcgatctggcggaaattcgccagcagcaatcggttgtgaattatgaacagaagatccagaccgcgtttaaagaggtggcggatgcgctggctttgcgccagagcctggccgaccagataaccgcgcaacagcgttatctgagctcgctgcgtattacgctgcaacgcgccagagcgctctatcagcatggcgcggtcagctatatcgaagtgctggatgcggagcgctctctgttttcaacccagcaaacgttactcgatctgaattacgcccgacaggctaatgaaattacgctgttcaccgcgctgggcggcggttgggtggaataa

SEQ ID NO: 71492 - DNA, 684 bp, Citrobacter koseri
atgaagattctgatagtcgaagacgagaaaaaaaccggtgaatacctgaccaaaggtctgacggaagcgggcttcgtggtggacctggcggataacgggcttaacgggtatcacctggcgatgacgggagattacgatctgctgatcctcgacatcatgctgccggatgtgaatggctgggatattgtccgtatgctgcgcaccgccaacaaaggcatgccaatccttcttcttaccgcgctgggcaccattgaacaccgggtaaaaggtctggagctgggggctgacgactatctggttaaaccgttcgctttcgctgaattactggctcgcgtcagaacgctgctgcgtcgcggcgcggcggtgatggtcgaaagtcagtttcaggtcgcggatttgacgctcgatctggtcagcagaaaagtgacccgcaacggcatgcgcatcacgctcaccagtaaagagtttacgctactggagtttttcattcgccaccagggtgaagtcttgccccgctcgctgatcgcttcccaggtctgggatatgaactttgacagcgataccaacgcgattgacgttgccgttaaacgtctgcgcgcgaaaatcgataacgagttcgaaccgaaactcatccagaccgtgcgcggcgtgggctatgtgcttgaggtaccggatggtgactaa

SEQ ID NO: 71493 - DNA, 1452 bp, Citrobacter koseri
atggtgactaaacgctttcagcgccctttctcgctggcgacgcgcctgacatttttcatcagcctcgccaccattgcctcttttttcgcgtttgcctggatcatgattcactccgtgaaagtgcattttgccgagcaggatatcaatgacctgaaagagatcagcgcgacgctggagcgaatcctcacgcatcccgacgaaccggaagcacgccgactggaaatcctaaaaaacgttgccgccggttactcgaacgtcattatttcgctggaagatgccaaccagcaggcgatttttcactctcccggttcgcctgaccttcgccagtttatcgccaaagccacgccggatagcagcgcgcgtaacggcgatgtctttttgttgtccagcccggacttacaaagcaagaggcacgctaacgggcacggtactcattccgcatggcgcatgattcgcctgccggtcgggcaactcgcagacgggcaaccggcctacacgctctatatggcgttatcgatcgacttccatctgcactatattaacgatctgaaaaataagctgattatgacggcttcgctgattagcatgatgatcatttttattgtgctgttcgccgtctacaaaggccatgaaccgattcgcagcgtcagccgccggattcaaaatattacgtcgaaagacctcgatgtgcgtcttgacccgcaggccgttccgattgagctggagcggctggtgctctcgtttaaccatatgcttgaacgcattgaggatgtttttacccgccagtcgaatttctctgcggatatcgcccatgaaattcgcaccccgattacgaacctggtgacgcaaacagagattgcgctaagccagacccgcagccaaaaagagctggaagacgtactctactccaacctcgaagagtttggccgtatgtcgaagatggtaagcgacatgctgtttctggctcaggccgacaataaccagctcatcccggagaaaaaggcgctcgacctggcggatgaagtccacaaggtgttcgacttttttgaagcctgggcagaagaacgcgaagtgcgtttgcattttgaaggacgcgcgtgttgggtatccggcgatcccatcatgttacgcagagcgctcagcaacttgctgtctaacgccatgcgctacaccccgaaaggcgaagccgtcaccgtgcggctcaaagaaatggacagacaggcgcagattaccgttgaaaaccccggcgttcccattgcgccagaacatttaccgcgcctgtttgaccgcttctaccgggttgacccttcccgacagcgtaagggcgaaggcagcggaattgggctggcgattgtcaaatcaattgtcatcgcccatcagggaaccgtgtccgtaacgtccgatctgcgcgcaacgcgctttattctgacattgccgaaacatggcgattga

SEQ ID NO: 71494 - DNA, 594 bp, Citrobacter koseri
atgctgagtgtcgccataaaagaacaaaatagccatttcgaacacggtcttaaaatcatcatgactcgtctgactcatcagtggcatcagaaaattcaatttctacctgctgatgatatagacaaagcggatatcgcatttttatcgctggatgaagactggtttagtgccggatgttatcagataccggtacatacccggcaccagcagagagtcattatttgtaatgaatacgataaagacaaacttatgttcaggccgtgtctctatatgctgccgcatatttaccgggaggacgatgttgatgagataaccaaaaagatggtgcttatcttgcataaacgggcacttcgccgcagcgttcccccttctgtttgccattactgtacgactcgccatttctccattctggaacgccagtttttaaagatggtcgcccgcgggcaccggttaagcgaaattgccgtgctcctttcgttgagcgaagaacaaaccaaatcaattcgccgcagcatcatgaagaaactgcacgtaaaaaatgaacagcagttcttaaattacatcagagttaacctgggttttctgcaagaatag

SEQ ID NO: 71495 - DNA, 726 bp, Citrobacter koseri
gtggcaactcgcccggtattacagggaaatattcttgaccctgcaacattgcgcactcaaaaggaacgttctttttgttgggaatatcctttaaagcttgaaccgatagttcatttatcttctgcccgcacctttggctatgaagttctgactcaggttccttttcatgtcaatactgagcatttttttcaccaccttccgccagaaaaaatagtggcgtatttttatcaacaagtcgccactattacgcattatcccaaaggcgtacattattttcttaatttaccgctaaaggtatttttacacctggatttttttaattcaggagtaaccccctgcccgtccaatctgatccttgaaatccaggacccagaaacgcttttttcacttaatagccgccagcgttcccaactctatgaaaaaataaaacaggttgagtctatcggaattcccgtctggctggatgatgtcgatgaaaatttgatcaaagaagtggctgccgcccgctggcgttttagtggtctgaaactggataaaaatgcgttctgggatctaattctgcatcctcagaaactgcgccaggtgatttttatggggtataacattgcagatgtcatactcattgaaggtattgaaaatcatgcgcaaaaagaaattgcttttcattctggcgcccaattaggccagggatacttatggcccgcgtttttgcaaaacaaagagtag

SEQ ID NO: 71496 - DNA, 723 bp, Citrobacter koseri
atgcgcagcgcacttcgcaaagaaagacatcgccgtttaagaaatactgattgcactcaccactaccatcaccttgaaccacaggtatttgatcgtctggaatatctgacccaacgtctcaattatgccctaccggacaatacaatctctcaggttattatcacgacggataactatctcggatatacactgaatcgctatttattttctggaaaacgcacggcggtgttcaactctctggaatcaccctcacgcaggctggaagagacgggcatcagacaattgattgttgatatggctggactggcagtctcctgctacgaaacgcttgagcgattacgcctgcttatccgagagcgaagcgatatccaggtttacttactggtgccggataaggatgttagtctgacgcgttttatgcaaaaagccggtaagttttatattctgcaacgtcgccagaatctctcatcattacgtaacgccttattatctccccccacagttaaaaatactgatggcacctttagccatactgactggaagatcatttccgcgttatcccagggtatgtctttaaaggaaatcgcgcttttactcaatacgccttatcaccgggtgatctatcgactcaatcaacttattactcagttggatctgccgcatcgacacagtttgctgtatctgatacaccgccttagcgtcacttctcttcacttaatttaa

SEQ ID NO: 71497 - DNA, 633 bp, Citrobacter koseri
atgaaacctgcatccgttatcattatggacgaacaccctattgtcagaatgtcgatagaagtgcttctcgaaaagaatagtaatatccaggttgtcctgaaaaccgatgacaatcgtaccgcggtagattatctgcgcacatatcctgtggatctggtcatcctggatatagagctgccgggtacagatggatttacactgcttaaacgaatcaaatcaatacaagaaaatacaaaaattcttttcttgtcgtctaaatctgaatctttttatgccgggagagctatccgggcaggcgcaaacggatttgtcagtaaaagaaaggatctcaatgatatttataacgcagtgaaaatgatcttatcaggatattctttttttccttcagagacgctaaattttatcagtaataccagttcacgaaaaggtgagcacaatgatatgccgctctcaaacagggaggttacggtactgcgctatctcgccaacggtttatcgaataaagaaatcgcagagcagctcttgctgagtaacaaaaccatcagcgcgcataaagcgaacatattttcgaaactcggcctgcataccattgttgagcttattgattacgcgaaggtacacgacttgctgtga

SEQ ID NO: 71498 - DNA, 513 bp, Citrobacter koseri
atgagacttttgctggctattttttgcagcgtgttgctaagcccgctttgccgggctgacaccgctctgggcgagattaatattgaactgcgcggtaatgttgtggacttcacctgcaccgcagtgaccggtgacagtaacaaaacggttgagctgggcacctggcctacgaagcagttgaaaaccagcggcgatactacccagcccgtgcctttcagcatcaaacttgagggctgcccgccgggcgcggcgtcgatgaccttttcaggaacgccagcggcggggacgtcgctgctggcgctggatgatgcggtcatggcgcaaaaagtggccattgagatccgcgacagcgatcgcagcagattaccgcttgagcaagccagccagtcggtaagcgttgatgaaaacggtaatgctacgctgacgttttatgcgaattacattgcgttggccgatggcgttcagccgggagtcgcaaaggcggatgcgacttttatgatcaattacaactga

SEQ ID NO: 71499 - DNA, 1008 bp, Citrobacter koseri
atgaaaatgaaatcagggttgttgccgggcgccatcgcattattgctggcgaatccggcatgggcgacggtctgccataactcgaacggtacgccgaccgatgtgttttacgatctgtcgaatgtttttaccagcagcaataatcaggtaggacaggtggtgacgctgtcggagaaatcgggctgggttggcgtacaggcgacgtgtcctgctggtacgaatgtggattatacctttcgaagctatgtgactgaacttcccgtgcaaagtacggaagggggattccagtatctcaagctcaatgactacctgctgggggcgatgagcatcaccgacagctatgccggattattttatccgccccgtaattatattcgcatggggacgcaccccaatgtaccgaaacaaaagcccttcggcgtgatggactcgaagctgatctttaaactcaaagtgatacggccttttatcaacatggtgccgattccccgccagaccatgttctcggtgtatgtcaccaccagcaccggcgatgccctgagcacgccggtttataccatcagctacagcggtaaagtcgaggttccgcaaagctgtgaagtgaatgccgggcaggttgtggaatttgattttggcgatatcggcgccgcgctgttcagcaaagccggggcggggaatcgcccggaaggggtgacgccgcagacaaaaacggtcgccataaaatgtacgaacgtcgcggcgcaggcctatttgtcgatgcgtctggaggcggagaaaatctccgggcaggcgatggtctctgataatcccgacttaggctttatcgtttccgacagcggcggcgtgccgctgacgcctaacaatctggccagcaaaattccattccgtctggatgacagcgccgccgccagcgtggggatccgcgcatggccggtaagcattacggggagtaaaccgacggaagggccttttaccgctcgtgggtatctgcgtgtggattacgactaa

SEQ ID NO: 71500 - DNA, 2613 bp, Citrobacter koseri
atgaagaagataacgtatcttcccggttcactgccggggtatacgccacatctgacgggggtggcgttgtccatattggcggcgctctatccggcgataagtcatggcgaaagttactttaacccggcttttttgtcggcagatgctgcgtccgtggcagatttgtcacgttttgagaaaggcaatcaccagcccccgggcatctatcgggtggatatctggcgcaacgatgagttcgtcgcgacccaggatattcgctttgaaacctcgtcgacgaaaaccggtgaaaaatcaggcggattaatgccctgttttgatctggcgtggatcaaaaggctgggggtaaataccaccgcctttcctgcgcttgggcaaagccaggaggagacctgcatcaatttgccagaggcgattcccggcgctgaaatcgcttttgatttttcctcaatgcgtttaaatatcagtcttccgcaggcgtcaatgctgaacagcgcgcgcgggtatatcccgccggaagagtgggatgaagggattcccgccgcgcttatcaactacagttttaccggcagtcgcgggacgaacagcgacagctattttttaagcctgatgagcggcctgaactatggcccgtggcggttgcgtaacaacggcgcgtggagctattccaaaggcgacggataccactcgcaaagctggaaaaacatcggcacctgggtacaacgcgccatcatcccgttgaaaagcgaactggtgatgggggacagcaacaccggcaacgacgtgtttgacagcgtgggctttcgcggggcgcggctctactcgtctgacaatatgtaccctgatagcctgcaaggctatgcgccgaccgtgcgtgggatcgcccgtaccgccgcaaaactgactatccgccagaacggctatgtgatctatcagagctatgtttcaccgggcgctttcgcgatcaccgacctcaacccaacgtcttcaagcggcgacctggacgtgacggttgatgagaaagacggcagtcagcagcgctatacggtgccgtactccaccgttccgctgttgcagcgcgaaggacgtatgaagttcgacctggtggcgggggattttcgcagcggcaatagccagcaatcctcgccattcttcttccagggaacgctgatcgccggtctgcctgaagggtataccgcttatggcggcacgcagctggcttcgcgctacagctcggtggtgctgggggccggacggaacctgggcgactggggcgcggtctcggtagacgtcacccacgcccgcagccaactggcggatgacagcacccaccaggggcagtcgctgcgtttcctgtacgccaaatcgttgaacaactacggcactaacttccagttactgggctatcgctattccacgcgcggattctacacgcttgacgatgtggcgtaccgcagtatggaagggtacgagtatgaatatgacagcgaaggtaagcgtcataaagtgccggtagtgcagagctatcacaacctgaactacagcaaaaaaggccgattccaggtcaacatttcacagaatctgggggattacggctcgctgtatatctccggcagtcagcaaacatactggaacacgtcggatgccaatacctggtatcaactgggatatgccagcggctggcaagggatcagctactccctttcctggtcgtggaatgaatccgtagggatttccggcaccgatcgcattctggcattcaacatgtcggttccgttcagcgtgctcaccgggcgacgctactcgcgcgacaatgccctggatcgcacctacgccacctttaacgcgaaccggaacagcaatggacagaacagctggcagaccggcatcggcgggacattgttagacgggcgtaacctgagctacagcgtgaaccagggacacagcagcaccaatggctacagcggcagcgccagcgcgaactggcaggcggcttacgggacgctcggcgtggggtacaactacgatcgagaccagcatgactacaactggcagctgtctggcggcgtggtcggtcatgcggacggcatcacgctcagtcagcctttaggcgataccaacgtcctgattaaagcgccaggcgccgaaggggtgcatatagaaaaccagaccggggtgcaaaccgactggcgcggatatgcggtcatgccttacgccaccgtatatcgctataaccgtgtcgcgctggataccaactcaatggataaccacaccgatgtggagaataacgtcagcagcgtggtgccgacgcaaggggcgctggtacgcgctgcctttgacacgcgaatcggcgtgcgcgcaattgtcaccgcaaaacagggcgatcgcccggtgccgtttggctcaattgtgcgcgaaaccgccagcggcgtcaccagtatggcgggcgatgacgggcaaatttatttgagcggactgccgctgaaaggggaactgctgattcagtggggagagggagcgaacgcccgctgcgtggcgcattattccctgcctgaagagagcctgaagcaggcggtgacgctgcttaatgcgacctgtaaacgtccgtcgtcatga

SEQ ID NO: 71501 - DNA, 639 bp, Citrobacter koseri
atgagtgcgcaggcggccgggggaattgcattaggcgccacccgcgttatttatccggcggacgccaaacagacttcgctggcaattagcaacagcgcatcgaaagagcgttatctggttaattcatggattgagaacagcgccggcgtcaaagaaaaatcgttcgttgttacaccgccgctgtttgtcagcgaacccaaaagtgaaaacacgctgcgtattatttatgccggacaacccctgcctgccgatcgggagtctttgttctggatgaacgtgaaagcgataccgtcggtggataaaaacagccttgaaggcaaaaacgtcctgcaactggcgatcctgtcgcgcattaagctgtttgttcgccctgccaatctgccgcaggtgcaggaagacgcgccaggaatgctgcaattctcccgttccgggaaccacctgaaaatcaccaatccgtctgcttactatctcacgctggtcaatctcaaagtgggaagtcagaaggttgataacgtcatggtcgcgccgaagaacaatacccagattctgcttccggcaggcgcgcagggaagtgtgacgttccagacggtaaatgattacggtgcgctgacaccggcgaaaacggttagcttgcgctga

SEQ ID NO: 71502 - DNA, 546 bp, Citrobacter koseri
gtgatacagcagatgattagcaaaggcgtggcgctggtggggctgatttgcgcgatgcccgcattcgcgcatacggtgatactggagagcggtaatcttcacctgcgaggccaactggtaaacggcgcctgcgcggtgaattccgaaagccaggatctccgtgtacagatggggcaataccgcaccaatgtcttttctggcgccgggagtttcgccccgaccagcattcctttcgcgctgcgattaaccgattgtagttcagaggtttatagccatgttgggatcgctttttccggtgtgactcccgcagaagatccgcaggtattcctggcgcgcagcgacacggcggcgacctccggtattggtctggcattatttgatgaagaacaacggcaaatcatacccaattccttgccgcttcattatgcccctattttaacgcaagaaatgacatttcatttcacggctcgctatcgggcaatctcggaaaatatgacgccgggaagtattcattcagatgtgtggtttacgctggtttacccctga

SEQ ID NO: 71503 - DNA, 576 bp, Citrobacter koseri
atgtgcgtaattcaagggaaatccatgaaacttaaattaatgacctcttccgttattgctggcctgatgtttgctgctggtgcggctcatgccgatccggtaagcgttagcggcggtacggttcactttgaaggtgagctggtcaatgctgcgtgtgccgttagcacgaaatctgccgatcagaccgtgaccctgggccagtatcgtaccgccagctttaccgctgttggcgataccagcgcacagattccgttcaccattgtactgaatgactgcgatccgagcgtagcagcgaccgctgccgttgcgttctctggtcaggctgacggtacaaacgacagcctgctggcagtcgtgtctggtgacaatggcaccacggcaggcggcgtagggatcgaaattcttgataacacctcttctccgctgaagccagacggcgcgaccttctctacggctcaggcgctggtagaaggtagcaacacgctgcgtttcaccgcgcgttataaagcaactgctgcggacaccacgccgggtcaggctaacgccgacgcaaccttcatcatgaagtacgaataa

SEQ ID NO: 71504 - DNA, 867 bp, Citrobacter koseri
atggcagcaaagattattgacggtaaaacgattgcgcagcaggtgcgctctgaggttgctcaaaaagttcaggcgcgtgtcgcggccggacttcgcgccccagggttggccgttgtattggtaggcagcaacccggcttcgcagatttatgtggcgagtaagcgcaaagcctgtgaagaggtgggattcgtctcccgctcctatgacctgcccgaaaccaccagcgaagcagaactgctggagctgattgatacgcttaacgccgacaacactatcgacggtattctggtgcagttgccgttaccggcgggcatcgataacgtcaaagtgctggaacgcattgcgccggacaaagacgtagatggtttccatccctataacgtaggccgtctgtgccagcgcgcgccgcgtctgcgcccctgtacgccgcgcggcatcgtcacgctgctggagcgttacaacatcgataccttcggactgaatgccgtcgtcatcggcgcctcgaatatcgtcggtcgcccgatgagcatggaactgctgctggcaggctgcacaacgaccgtgactcaccgcttcaccaaagatctgcgtcgccatgttgaacacgccgatctgctgattgtcgccgtcggcaaacccggatttattcccggcgagtggattaaagaaggcgccatcgtgattgatgtcggaatcaaccgactggaaaatggtaaagtggtcggcgatgtggtctttgaagacgctgccgcgcgcgcatcctatatcaccccggtgccgggcggcgtcggtccgatgacggtcgcaacacttatcgaaaacacgctacaggcgtgcgttgaatatcacgatccacaaggtaaataa

SEQ ID NO: 71505 - DNA, 243 bp, Citrobacter koseri
ttgaatatcacgatccacaaggtaaataacatggcaacattctctttaggcaagcacccgcacgttgagttgtgcgacctgctcaaactggaaggctggagcgaaagcggtgcccaggcgaaaattgccattgcagaaggtttagtgaaggttgatggcgcggttgaaacccgcaaacgctgcaaaattgttgccgggcaaaccgtcagcttcgcagggcaaagcgttaacgtcgtcgcctga

SEQ ID NO: 71506 - DNA, 1386 bp, Citrobacter koseri
atgttaaaaatctttaatacactgacgcgccaaaaagaggaattcaaacctattcatgccggggaagtcggcatgtacgtgtgtggtattaccgtttacgacctctgtcatatcggtcatgggcgtacgtttgtcgccttcgatgtcgttgcgcgctatttgcgtttcctcggttatacgctgaagtacgtgcgtaacattaccgatatcgacgacaagatcattaaacgggcgaacgaaaacggtgaaagctttgtcgcgctggtcgatcgtatgattgcggagatgcacaaagatttcgacgcgctgaatattctgcgcccggatctggagccgcgtgcaacgcaccatatcgccgaaattattgagatcaccgaacagctgatcgccaaaggtcacgcttatgtggcggacaatggcgacgtgatgttcgacgtgccgaccgacccgaactacggtcagctgtcgcgccaggatctggaacagctacaggcgggcgctcgcgttgacgtcgttgacgtaaaacacaacccgatggacttcgtgctgtggaagatgtccaaagagggcgaaccgagctggccgtcgccgtggggcgcgggtcgtccgggctggcacattgaatgttccgccatgaactgcaaacagctgggcaaccattttgatattcatggcggcggttccgacctgatgttcccgcaccatgagaacgaaatcgcccagtctacctgcgcgcacgacggtgagtatgtgaactactggatgcactccggcatggtgatggtggatcgtgagaagatgtcgaaatcactgggcaacttctttaccgtgcgcgatgtgctgaaatactacgacgcggaaaccgttcgctacttcctgatgtccggccactatcgtagccagctcaactacagcgaagagaacctcaagcaggcgcgctctgccctggagcgtctgtacaccgcgctgcgcggaacggacaaaaccgttgcgcctgcgggcggcgaagcgtttgaagcgcgttttgtggaggcgatgaacgacgatttcaacaccccggaagcctactctgtgctgtttgatatggcgcgtgaggtgaaccgtctgaagagtgaggatatggctgccgcgaatgcgatggcgtcacatttgcgtaaaatttccggcgtgctggggctgctggagcaggagccggaagcgttcctgcaaagcggagcgcaggcggatgacggcgaagtggctgaaatcgaagcgttaattcaacagcgtctggatgcgcgtaaagccaaagactgggcggcggcggatgcggcgcgtgaccgtctgaatgagatgggcatcgtgctggaagatggtccgcaagggacaacctggcgccgtaaataa

SEQ ID NO: 71507 - DNA, 495 bp, Citrobacter koseri
atggttactttccacactaatcacggcgatatcgtaatcaaaacgtttgatgacaaagcgcctgaaacagttaaaaacttcctggactactgccgcgaaggtttttacaacaacaccattttccaccgtgttattaacggtttcatgattcagggcggcggttttgaacctggcatgaagcagaaagcgaccaaagaagcgatcaaaaacgaagccaacaacggtctgaaaaacacccgtggcacgctggcaatggcgcgtactcaggctccacactccgcaacggcgcagttcttcatcaacgtggccgacaacgacttcctgaacttctctggcgaaagcatgcagggctggggctactgcgtattcgctgaagtcgtggaaggcatggacgtggttgataaaatcaaaggcgtatcaacaggccgcagcggtatgcatcaggacgtgccgaaagaagacgttatcatcgaaaacgtgaccgtcagcgagtaa

SEQ ID NO: 71508 - DNA, 723 bp, Citrobacter koseri
gtggcaacactgtttattgcagatcttcacctctgcacggaagaaccggcgatcaccgccggttttctgcgttttttagctggtgacgcgcgccaggccgatgcactgtacattcttggcgaccttttcgaagcctggataggcgacgacgatcccaacccactgcaccgcgaaatggccgcagccattaaagccgttgtagattccggcgttccctgcttctttattcacggcaaccgtgattttttgatcggcaaacgctttgcccgtgaaagcggaatgacgctattgccgcaggaaaaggtgctcgacctctatggtcgtcgcgtattgattatgcacggcgacacgctctgcaccgacgatgccggttaccaggcgtttcgcgccaaagttcacaaaccctggctacagacgctgttcctcgccctgccgctgtttatccgcaatcgtattgccgccagaatgcgcgcaggcagcaaagccgccaacagcagcaagtcactggagatcatggacgttaatccacaggccgtggtggtcgaaatggaaaaacaccatgtgcaatggctgattcatggtcatactcatcgcccggacgttcacgaactgagcgctaacggcaaacccgcgttccgcgttgttttaggcgcctggcatagcgaagggtcgatggtcaaagtcacgccggatgacgttgagcttctccatttcccgttttaa

SEQ ID NO: 71509 - DNA, 510 bp, Citrobacter koseri
atgtcttcccgcaataatccggcgcgtgtcgccatcgtgatggggtccaaaagcgactgggctaccatgcagtttgccgccgaaatcttcgatatcctgaacgttccacaccacgttgaagtggtttccgcacaccgcacccccgataagctgttcagcttcgccgaaagcgccgaagagaaggattatcaggtgattattgccggtgctggcggcgcggcgcatctgccgggaatgattgcggcaaaaacgctggtgccggtactgggcgtgccggtgcaaagcgctgcgctgagcggcgtggacagcctctactctatcgtccagatgccgcgcggcattccggttggcacgctggcgatcggcaaagcgggcgcggcaaacgcggcgctgctggcagcgcaaattctggcgacacacgataaagacctgcgccaacgtctggcggactggcgtaaagcccagaccgatgaggtgcttgagaatcccgacccacgaggtgcggcatga

SEQ ID NO: 71510 - DNA, 1068 bp, Citrobacter koseri
atgaagcaggtctgcgtactgggtaacggccagctaggacggatgctgcgtcaggcgggcgaaccgttgggcatcaccgtctggcctgtcgggctggacgcggaacctaccgccgtcccggttcaacaaagcgtgatcacagcggaaatcgaacgctggccggaaaccgcgctgacccgcgaactggcgcgccacccggctttcgtcaaccgcgacgttttcccgattattgccgaccgcctgacgcaaaagcagctttttgacaaactctcgctggcgacggcgccctggcagttgctggcaagccgggacgagtggcccgccgtatttgcgcgtctgggcgaactggctatcgtcaaacggcgcgttggcggttacgacggccgtgggcagtggcgtttacgcgcggatgaaaccgcccagttcccggacgacggttacggcgagtgcattgttgaacagggcattaacttctctggcgaagtgtcgttagtcggcgcacgcgcccatgacggcagcaccgtgttctacccgctgacgcacaacctgcaccaggacgggattctgcgcaccagcgtagcgttcccgcaggccaacgcgaaacagcaggaacaggcggaagccatgctctctgccatcatgcatgaactgggttatgtcggcgtcatggcgatggagtgttttatcacgccagaagggttgctcatcaacgaactggcgccgcgggtacacaacagcgggcactggacgcaaaacggcgccagcatcagccagtttgagctgcatctgcgcgcgattaccggcctgccgttaccgtcaccggtcgtggacagcccgtccgtgatggtgaacctgattggcagcgctctgaattatgactggctgaaactgccgctggtgcatctgcactggtacgacaaagaggttcgcgaggggcgtaaagtgggccacctgaacctgaccgacagcgataccgatcgcttaagcgcaacgctggaagccttagttcccttgctgccgccggaatacgccagcggcatcatctgggcgcaaagtaagcttaagtaa

SEQ ID NO: 71511 - DNA, 1083 bp, Citrobacter koseri
atgaacgatgggacggactatcgcgccattctggcggccgatacgcctttaatcgacgttcgcgcgccgatagaatttacgcagggcgccatgcccaccgcgattaacctgcccttaatgaatgatgaagaacgcgcggcagtcggcacctgttacaaacgccaggggccggaagcggcactggcgttgggccataagctcgttgccggcgacgagcgtcaacggcggctggaggcctggcgaaaagcctgtattcaacatccccggggttatctctgctgcgcgcgcggcggtcagcgttcgcatatcgtacaacaatggctacatgagtccggcgtggattatccgctgatccagggcggctacaaagcgctccgccaggcggccatgcacatcaccgacacgctggtacaaaaacccatgatcttaattggcggctgtaccggcagcggaaaaacacagctggttcgacagcagccgaacggcgtggatctggaaggactggcgcatcatcgcggttcgtcattcggccgcacgctgaagccgcagctgagtcaggccagttttgaaaaccagctcgccgtggagatgttgaaaaccgacgcccgtcaggagttgcagatgtgggtgctggaagacgaaggccggatgattggcgcaaatcatctgcccgaatgtctgcgcgaacgcatggcgcaggcacccattgcggttgtggacgatccgttcgagctgcgtctggagcggctgcgcgaagagtattttatccgcatgcttcgcgacttcacccatgcctgcggggaagaagacggctggcaggcgtacagcgactatctgcatcatgggctttccgccattcagcgccgccttggtttgcagcgttttaaagagctgacggtaaaattagacgctgcgctgaccatgcagcaggccagcggcagtaccgacgggcatctggcctggctggtgccgctcctaaacgaatactacgatccgatgtatcgctatcaactggaaaagaaagccgcgaaaatcgtctttcgcggcatatggcgggacgttgcacagtggcttcaaagctag

SEQ ID NO: 71512 - DNA, 660 bp, Citrobacter koseri
gtggatgatttactgccggatttaacgctggcgttcaatgaaacctttcaaatgctgagcatttcaacggtgctggcggttgtcggcgggctgccgctcggcttccttatctttgtcaccgaccggaatctgttctggcagaatcgcttcgtgtatctggtgagttcggttctggtgaacattatccgctcggtgccgttcgtgattttgctggtgctgctgttgccgctcacgcaatttttgctcggcaataccatcgggccgattgccgcctccgtccctctctctgttgcggcgatagcgttctatgcgcgtctggttgatagcgcgctgcgtgaggtggataaagggattatcgaagcggcagaagcgttcggcgccagcccgatgcgcattatctgcaccgtactgctgccagaggccagcgccggtctgctacgcgggctgaccatcacgctggtgagtctgattggctattccgcgatggccgggattgtcggcggcggcggggtcggcgacctggcgattcgctacggctattaccgttacgaaacccaggtgatgattgtcaccgtggtcgcgttgattattctggtgcaggttgtacagatgctcggcgactggctggcgaaacgcgccgataaacgcgacagacattag

SEQ ID NO: 71513 - DNA, 1017 bp, Citrobacter koseri
atgattgagattgaaaaggtctgcgtggattttacggcaggccgtggcgcatcgacccgcgcggtggatgatgtcagcctgcggatagcggcgggcgaaatttttggcattgtcggcaccagcggcgcgggaaaaagtacgctgctgcgtacccttaatgccttaacgcgcccgagtcagggaagcgtgaaagtgaacggtgtggcgatctctgcgctggaaggggcgaatctgcgtaaagcccgccagcgtattgggatgattttccagcactttaatctgatgcatacccgcacggtggcgcaaaacgtcgctttcagcctgaaatccgccggatgggagcgcagcaagatcgccccgcgcgtcgccgaaattctggcgctggtcgggctggcggataaggcgaaccgctttccggtacagcttagcggcggtcaaaagcagcgagtggggattgcccgcgcgatcgccaaccatccagatgtactgctctgcgacgaaccgacttccgcgctggatctggaaacgtcagcgaccattctggcgctgctcaaacagattaacgaacagctggggatcacgatcgtgctgatcacccacgagatgaatgtgatcaagtccatctgcgatcgcgtggcggtgatgtccggcggcaaagtggtggagtcgggcgacgtatttgatgttttcgctcatccgcagcacgccttcacacagcagctggtgtcgcacaccctcaatctgacgttaccggaacgtctgcgccagcatttgcccggtcagttactgaaaattctgtttatcggtgattcggcggagcagccggtgttgtctgatgtggcggtaaagttcggcgtagcggtgaacattctgcacggcaaaattgaatatatcggcgaacgcgcgctggggattttagtggtgcaactgactgcgccgcacaacccgtcagcggtggatgccgcggtagcgcatattcggcaacgtactgcgcaggtggaggtgattcgtggatga

SEQ ID NO: 71514 - DNA, 831 bp, Citrobacter koseri
atgggactgcgtcagagtttacgcgttgccgccggggcgcttttgctggcctgcggcctgcaatttgctcatgctaataacgatccacagactattgtattcggcgtcgcgccgggtccgtatggcgatatggtcaaacaggccatcgcgccaacgctgaaagagaaaggctacaaggtcgtggtgcgcgaatttagcgactatgttcagccaaacatggcgttatccaatggcagcattgacgctaacctgttccagcatacgctctattttgaaaaattcaccgccgataaagggctgaaactgacgaagctgatcgtcgtgccgacggccggaatggggttctattcccgtaaaatcaacagcctggacgagctgaagaaaggggacattatcaccctgtcgaatgacccgaccaatctggcgcgcggtctgcgtttcctgcaatcaatcggtcttatcaccattaaagacaatatcgacccgacgaaagcctctgagcgtgatatcgccagcaacccgaaagggctggtgtttaaaccgctggaagcggcacagctgccgcgcacgctggatggcgtgaccggcgcgctggttaacggtaatttcgccgttgcggcggggctggatctttccagcgcgctaaaacaagagcaactggatgaaaacctgaaaaatatcattgccgtacgcagtgaagatgccgacaagccgttcgcgaaagatattgtcgacgcggtgaaatctccggcctaccgtgcggttattgacgatccgaagaatatttacagcgccttccagaagccggaatggatgaccgcagacaaataa

SEQ ID NO: 71515 - DNA, 1143 bp, Citrobacter koseri
atgacaataaaaaaaacagcgctggcggcatcgatcggcgcggcagtggcattaacgtctttcgcatctcaggcggaaatcactgttctgaaacaagatccacaggcgggtaatccgctgagccgtcttaacttcaccgttggcggcagtattcgtcctcagttccagaatatggctggcgacgacggtaaaaatggttacaaacgtaatggcttcgatggcggcacccgtttccgtttcgcggctgattactatctgtttgatgacattagctgggtcagctactacgagctgggcgttaacttcccggcgatgttcaactgggataatcactacgcagacggcgcgaacgacaccactcgtcgtatgctgtacaccggtctgaaaagcgatacctggggtacgctgactttcggtcaacagaacagcgtttattatgatgtggttggcgtgaaaaccgatatctgggactatgacatgattggtcaggcgccaggcaacggtatcaacggcgactatgacggttcttaccgtacccgtaaatccctgaagtataagaaaacagtcggcgacgtcgatctctacgcgtcttatctgttcagcgatgattacaacccgaacaacggcctgcgctacaagcgtaaaggcggcggttctctgggtgcggattaccacatcacggacgatctgacctggggtacggcgtggaactatacgcgtgcggaaatgcgcccaggtaacggcggcgacggtaaagactacgatcaaaatatcgttggtactgcgcttagctggacgccggataactggactttcgcgctgggcggcggctggtatcagaacttcatgaccaccaaacgcgtagacgcgcatgactactttgcgggcgacgcatggggtattgaatactttgccggttataaattcccgatcaaccagtatgcggtgaaatctattcagccgtactttatgggtgaccgtattgaatatgtgaacggccgtaactaccagcgtattgataatggcgtcggtattagcttccagctggattatggtttccgcgtggattacgaacacgtattcacctccagcaccgacgatctgggcgatatgaacctggttcgtctgcgttacgacttctaa

SEQ ID NO: 71516 - DNA, 2415 bp, Citrobacter koseri
atgattgcacgctggttctggcgcgaatggcgctcaccttccttactgattgtctggctggcgctgagtctggcggtggcctgcgtgctggcgctgggcaatatcagcgatcgcatggaaaagggtttaagtcagcaaagccgtgattttatggccggagaccgggcgctgcgcagttcgcgcgaggtgccgctggcgtggatcgatgaggcgcgcaaacgcggtctgaaagtgggcgaacagatgactttcgccaccatgacctttgcagacgatacgccgcagctggccagcgtcaaagcggtggatgacgtttatccgatgtacggtgagctgcaaacgaatccgccggggttaaaaccgcagccgggttccgtgttgctggcgccaagactgatggcgctcctcaacctgaaaacgggtgacagcatcgacgtcggtgacgccacgctgcgtattgctggcgaggtggtacaggagccggattccgggtttaaccctttccagatggctccacgcctgatgatgcacattgcggatgttgaaaaaacgggcgcagtacagccgggaagtcgcgtgacgtggcgctataagtttggcggtacgccgcagcagctggacggctatgaaaagtggctattgccgcagcttaagcctgaacatcgctggtacggactggaacaagatgaaggcgcgctgggcaaatcgcttgaacgctcgcagcagttcctgctgctgtcggcgctgttaacgttgctgttagcagtcgcggcggtggcggtggcgatgagccactactgccgcagccgctacgatctgattgcgatcctcaaaacgctgggggcgggcagggcgcagctgcgcaagctgatcgtcgggcagtgggggatgctgctggctctttccgccgtgacgggaggcgccattgggttattgttcgagaacgtgctaatggtgcttcttaaaccggtgttacccgccgttctgccgccagccagcctctggccgtggctgtgggcgctgggaacgatgatcatcatttctttgctggttggactgcgtccgtatcgtttgctgctggcgacgcagccgttgcgtgtgctgcggcgtgatgtggttgcgcgtgtctggccgctgaaggtgtatcttccggtggtcacggttgtcgtcgtcgcgctgctcgcggggttgatgggcggcagcatgttgctgtgggcggtgctggccggcgtggtggtgctggcgctactttgcggtgtgctgggctggatgctgttgaacgtgctgcgtggtatgacgttgacatcgctgcctctgcgcctggccgtaagccgactgctgcgccagccgtggtccacgttaagccagctctcggctttttcgctctcttttatgctgctggcgcttctgctggtgctgcgcggcgatctgctggatcgctggcaacaacaactgccgccggaaagtccgaactatttcctcatcaatatcgcttctgaacaggtggtgccgctgaaagccttcctgtctgagcatcaggtgatcccggaggcattcttcccgattgtgcgggcgcgactgacggagattaatggtctgccgaccgaaggaaatcaggacgaagcgcttaaccgtgagctgaatctgacgtggcaggatacgcgcccggatcataacccgattaccgccggaagctggccgccaaaagcgggagaggtctcgatagaggaagggctggcgaagcggctgaatatacaactcggcgatcgcgtgacctttatgggcgatacccaggactttagcgcgacggtcagcagcctgcgcaaagtagactgggaaagtctgcggcctaacttcttctttatcttcccctccggcgcgctggacgggcagccgcagagctggcttaccagcttccgttgggaaaatggcaacggcatgctgacgcagcttaatcgcgagttcccgaccatcagcctgctggatatcggcgcgatcctgaaacaggtcggtcaggtgctggagcaggtcagtcgggcgctggaggtgatggtggtgctggtcacggcctgcggcatgctgttgttactggcgcaggttcaggtcggaatgcgtcaacgtcatcaggaactggtggtctggcgcaccttaggcgcgggcaaaaaactgctgcgcaccacgctctggtgtgaatttgccatgctgggtatggtctccgggctggtggcggcgatcggcgcggaaactgcgctggcggtgctgcaaagccaggtgttcgattttccgtgggaaccggactggcgcgtgtggattattttgcccgtctgcggcgcattattactttcattatgcggcggatggctcggtgcgcgtctgttaaaaggcaaagcgttatttcgccagtttaataattaa

SEQ ID NO: 71517 - DNA, 687 bp, Citrobacter koseri
atgccagcggaaaacattgttgaagttcatcgtcttaagaagtccgtcggtcagggtgagcatgagctttccatccttaccggagttgaactggttgtcaaacgcgccgagactattgcgctgatcggcgagtcgggatcggggaaatcgacgctgctggcgattctggccgggctggatgatggcagcagcggcgaggtgaatctggttgggcagtctctgcacacgatggatgaagaggcgcgggcgcagctgcgcgcgcagcatgtcggctttgttttccagtcttttatgttgattcccacgctgaatgccctggaaaacgttgaactgcccgccttgctgcggggagagaacagcgggaaaagccgcgatggcgcgaaagcgttgctggaacagttaggcctggggaaacgtcttgatcatcttccggcccagctttccggcggcgagcagcagcgtgtggcgctggcgagagcgttcaacgggcggccagacgtgctgtttgccgatgaaccgacgggaaaccttgaccggcagaccggggataaaatcgccgacctgctgttttcgcttaatcgcgaacatggcaccaccctgattctggtgacgcacgacccgcaactggcggcgcgttgcgaccgacgattacgcctggtggatgggcagttgcaggaggaggcatga

SEQ ID NO: 71518 - DNA, 501 bp, Citrobacter koseri
atgtccgccagcgcggcctggcctgcgctgcttaacgacaaatggcaggacaaaacgccggtcatcaatgccagcattagcggcgacacctcgcagcaaggcctggcgcgtctgcctgcgctgctgaagcagcatcagccccgctgggttctggtcgagcttggcggcaatgacggcctgcgcggttttcaacctcagcaaaccgagcaaaccctgcgtaaaattctgctggatgtgaaggccgcaaacgccgagccgttgctcatgcaaattcgtctgcccgcaaactatggtcgccgttataatgaaacctttagcgccatctacccacggcttgccaaagagtttgatattccgcttctgcccttttttatggaagaggtttatctgaaaccacaatggatgcaggacgacggtattcatcctaatcgcgacgcccagccgtttattgccgactggatggcgcaacaattaaccccattagttaaccacgactcgtaa

SEQ ID NO: 71519 - DNA, 771 bp, Citrobacter koseri
atgcaaaaatcggtcttaattacaggatgttccagcggaatcggtctggaaagcgctcttgaactgaaacgtcagggttttcaaattctggcaggttgccgtaaacccgatgacgtcacgcggatgaacagcatgggattcaccggcgtgctgatcgacctcgactcgccggaaagcgtagatcgcgccgcagacgacgtgatcgccctgaccgataatcgtttatatgggatctttaacaatgccggatacggcgtgtatggcccgcttaccactatcagccgcacgcagatggagcagcagttttccgctaatttctttggcgcgcaccagctcactatgcgcctgctccctgctatgctgccgtacggcgaagggcgcattgtgatgacctcatccgtgatggggctgatctccacgccagggcgcggcgcctatgccgccagcaaatatgcgctggaagcctggtctgatgcgctgcgcatggagctgcgccacacgggtattaaggtcagcctgatcgaacccggcccgattcgtacccggtttaccgataacgtcaaccagacccagagcgacaaaccggtagaaaatccggggattgccgcgcgttttacgctcgggccagaagccgttgtcgctaaagtccgccatgcttttgagagcgacaaaccgaaattacgctacccggttacgatggtaacgtgggcggtcacgctgctgaagcgcgtgctgccgggacgcgcgatggacaaaattttgcagggttga

SEQ ID NO: 71520 - DNA, 855 bp, Citrobacter koseri
atgtccgtacaaaatattgtcaatattaacgaatctaacctgcaacagaccctcgaacagtcgatgaccaccccggttctgttctatttttggtctgaacgcagccagcattgtctgcaactgacgccggtgctggaaagccttgccgcacagtacaacggccagtttatcctcgcgaagctcgactgcgacgccgagcagatgatcgcctcccagtttggcttgcgcgctattcctaccgtgtatctgttccagaacggtcagccggtcgacggcttccaggggccgcagccggaagaagcgattcgcgcgctgctcgacaaagtgctgccgcgtgaagaagagctgaaagcgcagcaggcgatgcaactgatgcaggagggcaactacattgaagcgctgccgctgctgaaagacgcctggcagctctctcatcagaacggcgagatcggcctgctgctggcggaaacccagattgccctcaaccgtacggaagacgccgaagccgtgctgaaaaccattccgttacaggatcaggacacccgctatcagggtctggtcgcgcagattgatttactgaaacaggcggccgacaccccggaaatccagcaactgcaacagcaggttgcggacaatccagaagatgcggcgctggcggcgcaactggcgctgcaactgcatcaggtcgggcgtaacgaagaggcgctggagttattgttcagccatttgaagaaagatctcgccgccgcagacggtcaggcacgaaaaacgttccaggagatcctcgccgcgttaggcaccggcgatgcgctggcgtcgaaattccgccgccagctgtacgcgctgttgtactaa

SEQ ID NO: 71521 - DNA, 780 bp, Citrobacter koseri
atgaacgagcataatataacgaatgagtcgctggcgttatcgatgatgctggtggttgtggctattctgattagccacaaagagaaactggcactggaaaaagatattctctggagcgttgcccgggcggtaatccagcttgttatcgtcggctatgttctgaaatacatttttggcgtcaatcacgccatcctgacattattgatggtgctgtttatctgttttaacgcggcgtataacgcgcaaaaacgcagtaaatatattgataaagcgtttacctcgtcgtttattgcgattacgaccggagcggggctgacgctggcggtactggtattgtcaggatctatcgagtttacgccgatgcaggtgatcccgatttccggcatgattgcgggtaacgcgatggtggcggtagggctgtgctacaacaatctgggccagcgattcagcagcgagcagcagcaaattcaggagaagctcagtctgggcgcaacgccgaaaacggcgtctgcggggcttattcgcgacagtattcgcgcgtcgctgatcccgaccattgattcggcaaaaacggttgggctggtgagcttaccggggatgatgtccgggttgatttttgccggtatcgatccggtaaaagcgattaagtatcagataatggtgacttttatgctgctatccacagcaagcctgtcaaccattatcgcctgctatttaacctaccggaaattctataattcgcgccaccaactggtggtgacgcatttaaagaagatgtga

SEQ ID NO: 71522 - DNA, 678 bp, Citrobacter koseri
atgaaagagagcagccctttgctccagctaagaaaggtgggataccaggctggcgccacgaaaattctcaataacatcagtttcatgctgaattccggggaatttaaactgattaccggcccatccgggtgcggtaaaagcacattgctaaagattgtggcgtcattaatcagcccggatacgggggatatcctgtttgaaggcgaagagattgccacgcttaagcccgaaacttaccgccagcaggtctcttattgtgcccagacgccagtgctgtttggcgatacggtgtatgacaacctgatttttccctggcagattcgcaacaaaacgccggaaccgaaggcttttctcgccgatctggcgcagtttgagctaccggaaaccattttacagaaaaacattacggcgctttccggcggggaaaaacaacgtatctcattgatccgtaatttacagtttatgccgcaggttctgctgctggatgagatcaccagtgcgctggatgagcgcaataaagagaatgtgaatgacattattcatcgctatgttcgcgataaaaatattgccgtgctgtgggtaactcacgataaagatgaaattaatcatgcggataatgtgattacgcttcagcctcatgccggagaaatgcaggaagctacctatgaacgagcataa

SEQ ID NO: 71523 - DNA, 918 bp, Citrobacter koseri
atgcttatttttatccctattctcattttcgtggcgttggtgatagtcggcgcaggcgtcaaaattgtcccacagggataccagtggaccgtggagcgttttggccgttacaccaaaaccctgcaaccaggcctgagcctggtggtaccgtttatggacagaattggtcgcaagatcaacatgatggaacaggtactcgatatcccgtctcaggaggttatctcaaaagataacgccaacgtcaccattgacgcggtgtgctttattcaggttatcgacgctccgcgcgcggcctatgaagtcagcaatcttgagctggccattatcaacctcaccatgaccaacatccgtaccgtactggggtcaatggagctggatgaaatgctttcccagcgcgacagcatcaacacgcgcctgctgcacattgtcgatgaggccaccaatccctggggcgtcaaggttacgcgtattgagatccgcgatgttcgtccaccggcggaattgatttcatccatgaacgcccagatgaaagcagaacgtaccaaacgcgcctacattctggaggcggaaggggtgcgccaggctgaaattctgaaagctgagggtgaaaaacagtcgcagatcctgaaagcggaaggcgaacgccagtctgccttcttacaggctgaagcgcgtgaacgttccgccgaagcggaagcccgcgccacccagatggtctctgaagcgatcgccgccggggatattcaggcggtgaactacttcgtggcgcagaaatacaccgaagcgttgcagcagattggttcgtcaggcaacagtaaggttgtcatgatgccgctggacgccagcagtctgatgggctccattgccgggatcaccgaacttatcaaggacagcaccagcgaacggaacaaatcatga

SEQ ID NO: 71524 - DNA, 453 bp, Citrobacter koseri
atgatagcgatgattctggttcacccgcatattttctggctgagtcttggtgggctactgctggccgccgagatgctgggagggaacggctacctgctgtggagcggtgtcgccgccgtgattactggcctggtggtctggctggtgccgctcggctgggagtggcaaggcgttatgttcgccgtattgacgctgctggcggcctggctgtggtggaagtggctggcacggcgcgtgcgtgagcaaaaaccggctgacagtcaccttaatcaacgcgggaaacagctggtaggccaccgctttattctggaaaccgcgctggtcaacggacgcggccacatgcgcgtcggcgacagctcctggcccgtcagcgccgacgcggatctgagcgccggaacgcaggtggaggtgattgccatcgaagggataacgttgcgcattaaggccgtgtga

SEQ ID NO: 71525 - DNA, 417 bp, Citrobacter koseri
gtgaatattagcgatgttgcgaaaaaaacaggcttaaccagcaaggctattcgattttatgaagagaaagggctggtgacgccgccgctgcgcagtgaaaacggataccgcacttacagccagcagcatttaaacgagttaacgctgttgcgtcaggcgcgtcaggtcggttttaacctggaagagtgcggtgaactggtgaatttgtttaacgatccggggcgccatagcgcagatgtgaaaaaacgcacgctggaaaaggtcgctgagattgaacgccacatcagcgaattgcaggctatgcgcacgcaattactgatcctggcggagtcatgcccgggtgatgacagcgccgattgcccgatcattgataatctttccggctgctgtcatcacaagggtaaagcccgccgttga

SEQ ID NO: 71526 - DNA, 2127 bp, Citrobacter koseri
atgttgccacggattagccaacggccatttattctttcggccctgacattatgcgtttcaggtgctgtttcagcagccacgacaactacagcacaacatcataaagtatcggatgacgacacgttaatcgtcaccgctaaccgctcagaaagtagcctttgggaaagcccggctacgattcaggttatcgaccgccaggccatacagaattccaccagcgtgtcgattgcggacgatctacaggacatccccggcgttgaggttactgataactctctggcaggacgcaaacagatccgcattcgcggcgaagcctcttcacgcgtattaattttgattgacggccaggtcgtcagctatcagcgcgccgggcaaaactacggcgccggcttgctcattgatgaatcgtcgcttgagcgtattgaaatcgttaaaggcccctactcggtgctctatggctcgcaggccattggcggcgtggtgaactttattacgaaaaaaggcggcgataagccgctcggcggaagcgtcaaagccgtttacaactccgcgaccgcaggctgggaggagtcggccgccgcctggggcagcatcggcaacttcgactaccgcattaacggcagttattccgatcagggcaaccgcgacacgcctgacggcagattgcccaacaccaatttccgcaacaacagccagggcgtctggcttggctacaatctcgatcgccataaatttggactatcactcgatcgctacaaaacgtctacccaaacctggattagcgatgcggataaccagtatgacgaattcagcgtccgtattccgaaactggaacgcgaaaaggtcggcgttttctatgactatgatgccgatggcgattacctgaaaaaaatccacctcgacgcttacagccagaccattgagcgtaaatttgagaatcgggtaaaaaccacccaggtcatcccaagcccgatgattcaggcgctgacagtcagcaatcagaccaacaccaatgataaacagtacacgcagggtgtgacgttacagagcaacttctcactgccagcgaacaacgagctggttatcgggacgcagtatcagcacgacaaagtgaagcaggacaccaatagcagcacgcgtcagacagcggcaaccggcgtcttcgatatccagaccaataccctgtcacatattgaggctgaacaaggtaacgcctcaatatttgcgcaaaacgactggcgttttgccgatgactggacctggaccgtcggcgcacgtcagtactggctctcttctaaactgaaccgtagcgacagtctgagcggcacaacctggcagtcatccggtggaaagtcagcgcatgacgatgagttagtcacctcaaccagcctgcgttactccggttttgataatcttgagctacgcgcagcctatgctcagggatatgtcttcccgacgctggttcagttgtttatgcaaacgtctgcgggcggcagaatcacctatggcaatcctgacctgaaggctgagcactccaataactatgaactgggtgcgcgttacaaaggcaatatgtggctgattgacggggcgatttactactccgaagccaaagactatatcgccagtctcgcctgttcagggcaagcaatttgtaatggcagcagcacctcatcctactactacgacaacatcgaccgcgccaaaacctgggggatggagctgacggcggaatacaacgcctgggccgtatcgccttatctgagcggcaacctgattcgtcgtcagtatgaaggcgacgtgcagaaaacctgggataccggcgaaccgatgctgacaggccgcgcaggtctgaaacacacgctgctgctcaatgccgcgaatatcacttccgatctcttcatccgtgcggcatccagcgccaaagacaacacgggagagactgaaattcgctatccgggctgggcgacgcttaacctcgcctttaatactgagtttggtccgcaggatcagtatcaggtcaatctggcgctgaacaacctgaccgataaacgttaccagaccgctcatgaatccattccagcggcgggctttaacgcggcgattggttttgcgtggaatttctga

SEQ ID NO: 71527 - DNA, 825 bp, Citrobacter koseri
atgaagagacttgtcattggcttactggcgctggttagcgccttcagcgtgcaggcggccgaacgactggtggtggcgggcggttctctcagcgagcttatttttgcaatgggcatcggcgatcgcgttgtcggggtggatgaaaccacctcttatccccccgaaaccgctgcactgccgcatattggctactggaagcaactgaacagtgaaggcattttatcgctgcgcccggacagctttattacctggcaggacgcgggcccgcatattgtgctggagcagttgcgcacccaaaaagtcaacgttgtcaccctgccgcgcgttccggccaccgttgaccagatgtatgccaatattcatgccctggcgaacacactccaggttcctgagcagggcgacgcgctggttaaccgcattcgccagcggctggatcgtgtgcaggacagcgtgaaggcgaaaggcgcgccggttaaggcgatgtttattctttctgcggggggcagcgccccgcagatcgccggtaagggcagcgtcgctgacgcgattctgaccctcgcaggcgcgcagaatgtcgcccagcatgcgcaatataaaagttacagcgcggaatcgctgattgcggcaaacccgcaggtgattgttgtgacatcacagatggtcgagggcgacatcaatcgcctgcgcgccattgccggtatcacccatacctccgcctggaaaaatcagcggatcgtcgccattgatcaggcgttgattctggggatgggtccccgcgtcgctgacgccgttgaaactctgcaccagcaactctggcctcattaa

SEQ ID NO: 71528 - DNA, 1338 bp, Citrobacter koseri
atgaatactcaacacacgctggatctcactccacatttcgcgctggaggggaaccagccctttaaggatcgtcgggccacgatgccgtggcgtggtgcgattcctgttgcaaaagagcaattgtcgcaaacctggcagaacgtcatcagccagaccgttccaccgcgcaaaagactggtgtatttacatatccctttttgcgcaacccactgtactttctgcggtttttatcagaaccgctttgaagaggatcactgcgcacgctataccgacgctctgctacgtgaaatagagatggaagccgacagcacgctgcaccagtcagcgcccattcatgcggtgtatttcggcggcggaacgccgtctgcgctgtcggccagggatctggccaggatcatcaccacgctgcgtgaaaaactgccgctggcgccggattgcgaaatcactatcgaaggtcgggtgctcaactttgatgatgcccgcgttgatgcctgtcttgatgcgggcgccaatcggttttctatcggcattcagtctttcaacagcaagatccgcaagaaaatggcgcgcacctcggacggcccaaccgccatcgcctttatgaacggcctggtgcggcgggatcgcgccgccgtggtgtgcgatctgctgttcggcctgcccggtcaggatgccaccctgtggggcgaagatctggcgatagcccgcgatatcgggctggatgggatcgatctgtatgcgctgaatttgcttcccaatacgccgctcggtaaagcggttgaaagtggccggacgaccgttccttccccctcagcgcgtcgcgacctctaccttcagggctgcgattttatggatagcgcgggctggcgctgcatcagcaacagccactgggcgcgtaccacccgagaacgcaacctgtacaacctgctgatcaagcaaggcgctgactgcctcgccttcggctctggcgcaggcggttcggtcaacggctactcctggatggtggagagaaacctttccacctggcatgaaactatcgccgccgggaaaaagccgttaatgatgatgatgcgtaccgccgaacgcggctttcagtggcgccatacgttacaggcggggattgaaacagcgcgcgtaccgcttgatgagctgacgcctcacgcggagcaactgattccgttactgacccaatggcacaacgcggggctgacccgcgatgcgtcaacctgcctgcgtctgaccaacgaaggacgcttctgggcaagcaatattttgcagtctcttgacgagctgattcaggaacttaacgcaccgcgcatcgcggtagataaaccataa

SEQ ID NO: 71529 - DNA, 495 bp, Citrobacter koseri
atgagccatgtctctttacaggattttttgcgcactgagccagacggaacgctggaagcgatcgccgcacagtacaacaccacgcttttagacgtggtcaaaaacctgccctctcatactctggtcagcggcgataaattcgataccgtctgggacaccgtcagcgaatggggcaaagtcacaaccctggtgcacaccgccgatgtcattctcgaatttaccggtgaactgccctccggcttccatcgtcacggttatttcaatctgcgcggtaaaaaaggcatgaccggccatatcaaagcggaaaactgcacgcacatcgccttagtggaacgcaagtttatgggcatggacaccgcgtctattctgttcctcaaccaggcgggcagcgccatgtttaaagtcttcctcggtcgcgacgagcatcgtcagctactgggcgaacaggttgacgccttccgcacactggcctcctctctgaaggaaaacgcctga

SEQ ID NO: 71530 - DNA, 624 bp, Citrobacter koseri
atgacgccgtggttacttttcggtgccggcggtacaggcgtgggtgccagaacgcttgaactcgcgctggcgcaacagcgcccggtcgttgccgtgattcgtcacccggaaaccgcggcccttttgcaaagcaaaggcgttcaggtatttattggcgatgcctgcgacgcaagcgtcgtatcctgcgcctgccatgccgcagggccggaggcgcttgtcatttcatcaatggggggaaaccaggattatctggcgcacagaaccgttattgatgaagccgaaaaagtgggcatcaaacgcatgattctggtgacgtcgctgggatgcggcgacagttgggcatttttatcccctcgcgcaaaagccgcattcggccaggccgtgcgggaaaaaacgctggcggaaagttggctgcaaaccagtcagctggattatgccatcctgcggcctggcggtttactgaatggcgatgcgacaggtaaagcgcagcgctaccagggacaggagtgccacgggtttgtgatgcgtgcggatgtcgccgcccatattcatgaactggcctgcgcgcctgcgcttaacaatcagatctacagtctggttgagcctgaactaaagccggtgtga

SEQ ID NO: 71531 - DNA, 993 bp, Citrobacter koseri
gtgttcaaggattcactctcttccctcagtgtattgacggggctttcactcttgctgatcgcactggtgctgttcggcgccagccagggggcgctgaacatcagcttcagcgcgctgtttaaccaagagtaccgggatatctggctgaacatccgtttgccccgcgttctgttggccgtgctggttggcggcgcgctggcgacggcgggcgtgatcatgcagggactttttcgcaacccgatggccgatccggggttgctcggcgtcagcagcggctctgcgttaatggtcggcgtcgcgatcgttttccctctttcgttgcccgtcgttctggcgctctatgaacagatgatctttgccgtcgccggcagcgtggtggtctgcgcggttatttttctgatcagcctgcgccacgctcacggcggcatgatgcaactgctgctggccgggattgcgattaatgcgctgtgcggggcggctatcggcatactgagctatgttggcgacgaacagcaattacgtcagttgacactatggatgatgggcagcctcggccaggcgcagtggccgacgctactggtggccagttcgttcgcactgcccgccatcgccgccaccgcctgtctttccgggacgctgaacctgctgcaattaggggatgaagaggcgcactatctgggggtaaacgtaaagcgtaaacgtcagcagctgttgttgctcagctccctgctggtgggcgctgccgtttcggtaagcggcgtgattggctttatcggtctggtggttccccatttaattcgcatgatcatcggcgcagaccatcgctggctcattccctgctctacacttgcaggggcatgtttgctcctggttgccgacacgctggcacgcacgctggtacagcctgcggagatgccggtcggccttctgaccagcctgattggcggcccctggttcctgtggctcattctgaacagccggagggtggtatga

SEQ ID NO: 71532 - DNA, 771 bp, Citrobacter koseri
atgattgatgcccaaaatctggtttacagcattcatggacgccgtttaacggacaatgtttcgctgactctgcctggtggtgaaatcgtcgctattctagggccgaatggcgccgggaaatccacgctgctgcgccagcttaccgggtatctgaagcccgactctggtcgctgtacgcttctgggcaagccgctgaccgaatggccgctgacggaactggcgaagacccgcgcggtaatgcgccagaacagccacatggcgtttccgttcagcgttcgggaagtcattcgcatgggcaggcatcctcatcggacgcataatccacgcgatgaaaccgagcacatcatggcgttgtgcgattgcagccagctggcctcgcgtgattaccggcagttgtcgggcggcgaacagcagcgggtacagctggcgcgcctgctggttcagctctgggaacccgagccctcgcccaaatggctgtttctggatgaacccacctccgcgctggatattcaccaccagcagcatcttttccgtctgctgcgccaactggtgcgtgaacggcagttcaacgtctgctgcgtgctgcacgatctcaatcttgccgcacgctatgccgaccgggtggtgctgatggcaaacggccgccttattgataacggcagaccgcaggaggtgctgaaacaacaggcgctgaaaacgctttacggcgcggatatcacggttttaaacgatccatcaaatctctcaccgctgatcgtcctcgatcggtaa

SEQ ID NO: 71533 - DNA, 1395 bp, Citrobacter koseri
atgaacacgcattcatcctctgttcccctgacggacggccaacaggcagctcaggaacgactggaaacccccgaggggcgccgcgaattctggcgagcgacattttcctgctggttaggcacgacaatggaatatgccgattttgcgctgtatggcctcgccgcaggcattatctttggcgacgtcttttttcctgaagccacaccagttatggcgctactttccagcttcgccgcctattccgtcgggtttatagcacgccccatcggcgcgctgttgttcggctggataggcgaccgtcatggacggaagactgtcatggttatcactatcgggttaatgggcatgtcgaccatgttgatcggtttaattcccagctacgcccagattggcgtttgggcgccggtatgcctggtcatcttacgattttcccaggggctgggcgccggggcagagctttcaggcggcaccgtcatgctcggtgaatatgccccagttaagcatcgcggactggtctcctcgattatcgctctgggctcaaatagcggaacattgctggcttctttagtctggctcatcgtactgcaaatggataaagacgccttgctaagctggggatggcgcatcccttttctttgcagcttcctcatcgccgccgcagcactgtttattcgccgccatatgcgtgaaacgcccgtctttgagcgtcaaaaagcactcctgcaagccgagcgagagaacgcgcttcgccaaggtcaggagatgcaacagtatgacacccgtagcttctggcaacgcaccagagcattctggaccatggtcggattacgcatcggcgaaaatggcccctcctatctggcccagggattcatcattggctatgttgccaaagtgctgatggttgataaatctgtccccactgttgcggtatttatcgcctctattctgggatttgccattattccgctggcgggttggctttctgaccggtttggcagacgtatcacttaccgttggttctgtctgctactgattctgtacgcatttccggcattcatgctgctggattctcgtgaaccgtggattgttatcccgacgatcattaccggaatggggctagcttcgctgggcattttcggtgttcaggctgcatggggcgttgagcttttcggtgtgaccaaccgttatactaagatggctttcgcaaaagagctggggtccattatgtctggcggtacggcgccacttgtcgcctcggcgctgctctcattttacggacactggtggcctatcgccgtctatttcaccctgatggccgcaattgggctggtgacgactttcttcgcgccagagactcgtgggcgggatctcaacttgcccgaggatgcaatttga

SEQ ID NO: 71534 - DNA, 1032 bp, Citrobacter koseri
gtgacccaatcacattcacaacgcgtaacacgttctgatgttgcaaaagaagcgggaacatctgtcgctgttgtcagttacgttattaataacggtccgcgccccgtcgccgaagcgacccgacagcgcgtattgcaggccataaaaaaaaccggttatcgacctaatggtatagcgcgcgccctggcttcaggcagcacgcaaacctatggactcattgcgccagacatctctaacccgtttatcgcctcaatggcacatgccctgcaacgtgaagcattttctgatgggaaagtgctcctgctgggcgatgcgggcgacaacagcggacgtgagcgtgaactgattaacaatatgctacaccgtcaggtcgacgggcttatctataccagtgttgaccggcatccctatattgagctgattcaggagagcggaaccccctgcgtcatgctggatcgcgtggaccctgggttgaatgtcagtgttattcaggtagatgaacaactggcggcctggcaggtgacgaagcatctgattgatcacggttaccgcgatattggcattatttgtggtccgcgtgaaatgttgaacacccaggatcgtatccggggatggcagctagcgctggaagagtcatcgctaattatcaacccctcctggatcttttcgactaactatacccgcgccggaggttacgaggcgacaaaacgcatgttgcaaggtaaaccaccgcgcgcgctgttcgcaaccaatgaacagcaggcgcttggctgtttacgcgctctggcagaacaaggattacgcgttccacaggatgtggcgctggtctgctttaacgcaacacaagaatcggcttacaacgtaccttccctgaccgccgtccgacagcctgtcgacaaaatggctcgtgcggcaattgatatgttgaaaaactgggatggagaagttcgccgcgttgaatttgagttttttttacgagtgggagagtcgtgtggctgccagggacatgaaatacaacctgaaaccagataa

SEQ ID NO: 71535 - DNA, 1035 bp, Citrobacter koseri
gtggctgccagggacatgaaatacaacctgaaaccagataaaaataaatctatgcgcgtgattatcgactgcgatccgggtaatggcattcccggcgccaatatcgatgacggcctcgcgctggcactcgccattgccgcgccgcaaatctctctggagatgatcacaacggtggctggtaatacaccggtagaaatcggatatgcagtagccaaagatttcgttcaacaattaggtgtacccgtttctgtctaccgtggcgccgcacgcgcgctcagagaagatccgcagccctggcgggaaaagcttgatcatggtgtagaccaatatggcttacgccaactctgggctgacgtccccgttccgcaggcataccagaccacgaagcctcttgcgcctgaggcgataggtgagctgatatgcaacaaccccggtgagataacgctggttgcaacaggcccactcaccaacgtcgccattgctctacagctctatccgcagctcgttcatgcggtgaagaatatcgtgatcatgggcggagtattcaatgttcctggctatctgaaagacactaattttggccttgatccagaagcagctcatgccgtactcaccagcggtgcgccggtcacattggttccgatggatgtcacgacaaaaacccaaatgcttcataccgatttggatcgtctggctgcggcagaaaacgttcttggtctctatctggaaaaaaccattcgcccgtggatcacctactctatgcagacccgcaatctgcctggctgctggatccacgatgttctgacgatcgcctggttgcttgatccctcgctcgccgcaacgacagaagactttctggacgtctcgcttgaaggccttactcgtggtatgacctgtcgttatggacgtgacacattacgcctggacgtgggaatacccgagcccaaaggcgcgatgataaaaattctacagactatcgataaccatcaacttctttcgctgattgaacactacatccatcgctacggcgcatag

SEQ ID NO: 71536 - DNA, 714 bp, Citrobacter koseri
atgaatacgttagcactcatcctctctggtgaaggagaaccaattttaattacattatgcaaaatttgcgtcgcttttttcctgggaggaatcatcgggcttgaaagagaatcaaagggaaagcctgtcgggtttaaaacatgtgtgattatttcagtagccagttgtgccctgaccattgtttcgattcaatcagcggagtattacgctgagatttcaatgaatatccgtagcgatcctatgcgcctggccgcacaaatcatcagtggcgtgggttttctcggtgccggggttatcctccatcgccatgatgatgcgatatccgggctaacaaccgcagccatcgtctgggcttctgctggcataggaattaccagcggagccggtttttatcttcatgccctgcttgccacagggttatttctgctggctataaagctcagttattttgtgatctttttacaaacaaaaaaccagctccccggcaaagtaaaaatccgcattattcttgacgaaaaatcagggctacaaacgctggtagaaagtattaatcagcaaaaaagcattattgagaccattactatccgcgatgtaaaaaagggaaaaatagaggtcaaccttaaggttgtgatcagaaaaaaaataaccttgcccgaactgtacagcaacctttctacgctcgaacacgtctgcgctatcgcgctggaacactga

SEQ ID NO: 71537 - DNA, 2502 bp, Citrobacter koseri
atgtctcaaactatcgacctgaccctggacggtctgtcctgtggccactgcgtcaaacgcgtgaaagaaagtcttgaacaacgtcctgacgttgaacaggcggacgtcacggtaaccgaagcgcacgttaccggcagcgccagcgccgaagcgcttattgaaaccattaaacaagccggttacggcgcggagttaagccacccaaaggctaaaccgctggcggagtcatcaatcccgtcggaagcactgacagcggttccccctgagcttccggcagcgacggccgatgatgaaagccaacagctgctgttaagcggcatgagctgcgccagctgtgtttcccgggtgcaaaacgcgttgcaaagcgtaccgggcgtcacacaggcacgggtaaacctggcggaacgcactgcgctggtaatgggcagcgcgtccgccgcagatttagtgcaggcggtagagaaagcaggctacggcgcagaagcgatcgaagatgacgttaaacgccgcgaacgccagcaggaaaccgcactcgctaccatgaaacgcttccgctggcaggcgattgtcgcgctgctggtcggcgtgccggtgatggtctgggggatgctcggcgacaacatgatggtcaccgccgataaccgcagcctgtggctggcaatcggcctggcgacccttgccgtgatggtttttgcgggcggacacttctaccgcagcgcatggaaaagcctgatgaacggcaccgccacgatggatacgctggtggcgctcggcaccggggtggcctggctgtactcgatgagcgtcaacctgtggccgcagtggttcccgatggaagcgcgccatctctattatgaagccagtgcgatgatcatcggtctgatcaacctcggacacatgctggaagcccgcgcgcgtcagcgctcttctaaagcgctggaaaaattgctcgacttaactccgccgacggcgcgcgtggtcactgatgacggtgaaaaaagcgtacctctggcggatgtacagccgggcatgttgctgcgtctgaccaccggcgaccgtgtgccggtagacggtgaaatcactcagggcgaagcctggctggatgaagcgatgctcaccggcgaacccatcccgcagcagaaaggcgaaggcgacagcgttcatgccggaaccgtggtgcaggacggcagcgtgctgtttcgcgcaagcgcagtcggcagccataccaccctgtcgcgcattattcgcatggtgcgccaggcacagagcagcaaaccggaaatcggtcagcttgccgataaaatctcctcggtgttcgtgccagtcgtggtggtaattgccctggtgagcgcaggtatctggtatgtctttgggccggcgccgcaaattgtttacacgctggtgatcgccaccaccgtcctgattatcgcctgtccgtgtgcgctgggtctggcgacaccgatgtcgattatctcgggcgtggggcgagcagctgaatttggcgtcctggtacgcgacgccgacgcgctgcaacgcgccagcacgctggacaccgtgatatttgataaaaccggtacgctgacggaaggtaaaccgcaggtcgtcgccatcaggacatttggcgataccgatgaggcgagcgccttacgtctggcggccgcgctggaacaaggctccagccacccgctggcgcacgctatcctggaaaaagccgccgacgccgccctgcctcaggtgaataactttcggacgttacgtggcttaggcgttagcggcgaagcggacggacatacgttgctgttaggcaatcaggcgctgctgaatgaacaacaggttgtcacgaccgcaatggacgctgaaatttcagcacaggcttctcagggggcaacgcccgtattgctggcgattgacggaaaagccgcggcgctgctggcgatccgcgatccgctgcgtaacgacagcgtcgcagcgcttcagcgcctgcaccgtgccgggtatcgtctggttatgttaaccggggataacccgaccaccgccaacgccattgccaaagaagccgggattgatgaggtgatcgcgggcgtgctgccggacggtaaagccgatgcgattaagcgtctgcaaagtcagggacgtcaggtcgcaatggtcggtgatggcatcaacgacgcaccggcgctggcgcaggcggatgtcggcatcgcgatgggcggcggcagcgacgtggcgattgaaactgcggcgataaccctgatgcgccatagcctgatgggcgtagctgacgcgctggccatctcacgggcgaccctgcgaaacatgaagcagaacctgctcggcgcgtttatctataacagcatcggcatccccgttgccgccgggattctgtggccgttcaccggcacgctgcttaacccggttgtggcaggcgcggcaatggcgctttcctcaattaccgtggtgagcaacgccaaccggttgttgcgctttaaaccaaaagagtaa

SEQ ID NO: 71538 - DNA, 795 bp, Citrobacter koseri
atggatctgttataccgggtaaaagcgttatgggctgcactgcgcggcaaccattatacctggcctgccatcgacatcatgttacccggcgatcgctgttttcatcttgtgggcagtattcacatgggaacgcgcgatatggccccccttccggcaaaactgcttaaaaagctcaggcaggcggacgcgctgattgttgaagccgatgtttcaggcaacgattcgccttttaccgacctgcctgcctttgccgacctggatcagcgaattagcgacgagttacgtcagcgcctgcataaaatcacccatgaactgggcatttccccttctctcttttcgacccagccgttatggcaaatcgccatgatattgcaggcgactcaggcgcaacaactggggctgcgaccggaatacggtattgattaccagttgctgaaaacggcaaaacaggcgcaaaaaccgatcatcgaactggaaggcgcttccagccagatcgatctgctgtgccagctccctgataacggactggcgctactggatgataccctgacgcactggcataccaacgccagactgctgcaacagatgatgagctggtggctgaaatcgcccccgcagaataatgctatttcgttgccgaatactttcagtcagtcgctgtatgatgtgctgatgcatcagcgaaatgtcgcctggcgggaacgtctgcatgccatgccgccgggtcggtacgtcgtggcggtcggcgcgcttcatctttacggggaaggcaatttgcctgcgctaatgcgttaa

SEQ ID NO: 71539 - DNA, 480 bp, Citrobacter koseri
atgacacccgccgtaaaattactcgaaaaaaacaacattacttttcagatccacgcctatgatcacgatccgtcagaaaccaattttggcgatgaagtggtgcgcaaattaggcctgaatcctgatcaggtttacaagacgctgctggttgccgtaaacggcgatatgaagcacctggcggtcgcggtaacgccagttgccggacagctggatctgaaaaaagtagcgaaagcgctgggagctaaaaaggtcgatatggccgatccgatggtcgcccaacggacgacaggttatctggtcggcggcatcagcccgctggggcagaaaaaacggctgccgacgctgattgacgcaccggcccaaacgttcgccaccatttatgtttccggcggcaaacgcgggctggacatcgagctggcggcgggcgatttagccaaaattctggatgcgaaattcgccgatatcgctcgccgggattaa

SEQ ID NO: 71540 - DNA, 1653 bp, Citrobacter koseri
atgaaatttttgaaacggggtgtggcgctggcattgtttgccgcgtttacgctggcaagccagcctgttcaggcttatgaaaaagataaaacctataaaatcaccattctgcatactaacgatcaccacggccatttctggcgcagcgaatacggcgagtacggtttatcggcgcaaaaaacgctggtggacggcattcgcaaagaggttgcggctgaaggcggcagcgtgctgctgctttccggcggcgacattaacactggcgtaccggagtccgacttgcaggacgcggaacctgactttcgtggtatgaacctgattggctacgatgcgatggccgtcggtaatcatgagtttgataatccgctcagcgtgctgcgtcagcaggaaaagtgggccaaattccccttcctctccgccaatatctaccaaaagagtaccggagaacgcctgttcaagccctgggctatttttaaacgccaggatctgaaaatcgccgtcctcggattgacgacggacgacacggcgaagatcggtaacccggaattcttcaccgatatcgagttccgtaaaccggccgaagaggcgaaggtggtgattcaggaactgcaagtgaatgaaaagccggacatcattatcgctactacccacatggggcactatgacaacggcgatcacggttcgaacgcgccgggcgatgttgaaatggcgcgtagtctgccaaaaggctcgctggcgatgattgtgggtggtcactcacaggacccggtgtgcatggcgtccgaaaacaaaaagcaggttgattatgtgccgggtacgccttgcgcgccggataagcagaacggcatctggattgtgcaggcgcatgagtgggggaaatacgttggccgcgcggactttgagttccgtaacggcgagatgaaaatggtcaactatcagctcattccggtaaacctgaagaagaaagtcacctgggataacgggaaaagtgagcgcgtactttacaccccggaaatttcagaaaatcagcaaatgctctcgcttctgacgccattccagaacaaaggtaaagcgcagctggacgtgaagattggcagcgtcaatggtcgtcttgaaggggatcgcaacaaagttcgctttgtgcagactaatatgggccatctgattctggccgcgcaaatcgcgcgcaccagcgccgatttcggcgtgatgagcggtggggggattcgcgactcgattgaaggcggcaacattacttataaaagcgtgctcaaggtgcagccgtttggcaacgtagtggtctatgtcgacatgagcggtaaagaggtaattgattacctgaccgccgtcgcgcagatgaagccggattccggggcgtatccgcagtttgcgaacgtcagttttgtggcgaaagacggcaaacttcatgacctgaaaattaaagacgagcctgttgacccggcgaaaacctaccggatggcgacgctgagcttcaatgcgacgggcggcgacgggtatccgcaaattgataataaaccgggatacgtgaataccggttttattgatgcggaagtgctgaaagagtacgtgcagaagaactcaccgctggatgccagcgcgtatgagccgaagggcgaagtaagctggcagtaa

SEQ ID NO: 71541 - DNA, 1221 bp, Citrobacter koseri
atggcaatgagtgaaccaacccagccgttagcgggcgcctctgctgcggcgactaaagcacgcacctcgtttggcatcttaggcgcgatcagcctgtctcatttgttgaacgatatgatccagtcgctaattttagcgatttacccgctgctgcaatcagagttttccctgacctttatgcagatagggatgattaccctgaccttccagctcgcctcctccctgctccagccggtcgtcggatactggacggataaatatcccatgccgtggtcgctccccattgggatgtgctttacgctgagcggtctggtactgctggcgctggcgggcagttttggcgccgtgctgctggcggcggcgctggtcggcaccggttcttcggtatttcatccagaatcttcccgcgtggcgcgtatggcctccggcggacgccacgggctggcgcaatccatcttccaggttggcggcaacttcggcagttcgctggggccgctactggctgctgtcatcatcgcgccatatggcaaaggtaatgtggcctggtttgtattggccgcgttgctggccattattgtgctggcgcagatcagccgctggtatgccgcgcaacaccggataagtaaaggaaaaccgaaggcgaccatcgtcaatccgctgccgcgcaataaagtgatactcgccgtcagcgtgctgttagtcctgattttctccaaatacttctatatggcgagcatcagcagctattacaccttttatctgatgcaaaaattcggattatcggtacaaaacgcacagtttcatctgtttgccttcctgtttgccgttgcggctggaacggtaatcggcgggcctctgggtgataaaataggccgaaaatatgttatttggggctcaattctgggtgtagcgccgtttactctcgttttaccctatgcaaccctgcactggacggggattttaaccgtgataattggttttatcctcgcatcggccttttctgccatcctggtgtatgcgcaggaactgcttccggggcgtatcggtatggtttctgggctctttttcggtttcgcgttcggtatgggaggccttggcgctgcggtattaggcctgctcgccgaccacaccagtattgatttggtctacaaaatatgtgctttcctgccacttctggggatactgaccatattcttgcctgacaaccgacataaagcctga

SEQ ID NO: 71542 - DNA, 1677 bp, Citrobacter koseri
atgcatcacgccaccccgcttattaccaccattgttggcggcctcgtgctcgcttttatactcggcatgcttgccaataaactgcgtatttctcctctggtgggatatctgttagcgggcgttcttgcggggccatttactccgggttttgtcgcggataccaaacttgcgcctgaactggcggagcttggcgtaatcctgctgatgttcggcgtcgggttgcacttttcattgaaggatctgatggcggtaaaggccatcgccattcccggcgcggtcgcccagatagccgtggcgacgttgctgggtatggcgctttcagcggtgttgggttggtcgctcatgaccggtatcgtcttcgggttatgtctttcaaccgccagtaccgtggtgctgctgcgcgcgcttgaagagagacagcttattgacagtcagcgcgggcaaatcgccatcggctggctgattgtggaagatctggtgatggttctgacgctggttcttctgcccgccgtggcgggaatgctggaaaaaggcgatgtcggcttcgcgtcgctggcagttgatatgggcatcaccatcggtaaagtggtggcgtttatcgccattatgatgctggttgggcgccgtctggtgccgtggattatggcgcgcagcgccgctaccggctcccgtgaactgtttaccctttccgtactggcgctggcgctgggcatcgcctttggcgccgtcgagctgtttgatgtctcctttgcgctgggcgctttctttgccgggatggtgttaaacgaatcagaattgagccaccgcgccgcgcacgatacgctgccgcttcgcgacgcctttgcagtcctgttctttgtctccgtcgggatgctgtttgacccgttaatcctgattcaacagccgatggcggtactggctacgctggccattattatcttcggtaaatcggttgccgctttcttcctggttcgcctgttcgggcactcgccgcgcaccgcgctgaccatcgccgccagcctggcgcagattggtgaatttgcctttattctggcaggtctgggcatggcgttggatctgctgccgcaggcagggcagaacctggtgctggcgggcgcgattctgtcgattatgctcaacccggtgctgtttgcgctgttagagaaatacctcgccaaaacggaaacgctggaagagcagacgctggaggaagcgatcgaagaagagaagcagattccggtggatatctgcaaccacgcgctgctggtcggttttggccgcgtcggtagtctgctgggcgaaaaactgatggcggcaggcattccgctggtggtcattgaaacttcacgtacccgcgtggatgagctgcgtgagcgcggtattcgcgccgtactggggaatgccgctaacgaagagatcatgaacctggcgcatctggactgcgctcgctggctgttgctgaccattccaaacggttacgaagccggtgaaatcgtggcctccgcccgcgagaaatgcccacacattgagattatcgcacgcgcgcattatgacgatgaggtggaatacatcaccgagcgcggggcaaatcaggtggtaatgggcgagcgtgaaattgcccgcaccatgctggagctactggaaaccccgcccgcaggcgaagtggtgacgggttaa

SEQ ID NO: 71543 - DNA, 1350 bp, Citrobacter koseri
atgtgctaccatgcaccgctcagttatccacctgtaaacacaatcatgaaatttcccggtaaacgtaaatccaaacactatttccccgttaatgcccgtgacccgctgttgcaacaaattcaggctgaaaatgaaaccagcgcgtcatgggtggtcggtatcgatcagacgctggtggatattgaagcgaaagttgatgatgactttgtgacacgttatggattgagcgccgggcattctctggtgattgaggatgatgtcgcagaagcgttgtatcaggagctggtgcgtgaaaacctgatcacccaccagtttgccggtggcaccattggtaacaccatgcacaactactcggtgctggcggacgatcgctccgttctgctgggcgtgatgtgcagcaacattgagattggcagctacgcctatcgctatttatgtaacacatcgagccgtaccgacctcaaccacctgcaaggggttgatggccccattggccgctgctttacgctgattggcgaatccggcgagcgtactttcgccatcagtcccggccacatgaaccagcttcgggcggagagcatcccggaatcggtgattgcgggcgcatctgcgctggtgctgacctcctatctggtgcgctgtaaaccgggcgagccgatgccggaagcgaccatgaaagccattgagtacgcgaaaaagcataatgtgccggtggtgctgaccctggggacgaagtttgttatcgccgataatccgcagtggtggcaggcgttcctcaaagagcatgtctccattctggcgatgaatgaagaagaggcggaagcgttaaccggcgagaacgatccgctgctggcgtctgataaggcgctggactgggtggatctggtgctgtgtaccgccgggccgattgggttgtatatggcgggctttaccgaagatgaagcgaaacgcaaaacccagcacccgctgctgccgggggcgattgccgagtttaatcagtatgagttcagccgtgcgatgcggcataaagattgtctccatccgctgcgggtctactcgcacatcgccccgtacatgggcgggccggaaaaaatcatgaacaccaatggcgcgggagacggcgcgctggcggcgctgttacatgatattaccgccaataattatcaccgcaccaatgtgcctaactccagcaagcataaattcacctggctgacctattcgtctttggcgcaggtgtgtaagtatgcgaaccgtgtgagttatcaggtattgaaccagcattccccgcggttgacgcgcggtctgccggaacgggaagacagcctcgaagagtcttactgggatcgctga

SEQ ID NO: 71544 - DNA, 960 bp, Citrobacter koseri
atgaagccggaaaacaaaattcccgttctcgatcttatttctgcgcagatgagggccgtcatcaacgttcatcaggcggagctgccgccatggcctgcggatgacattgcggcgcagcgccagcactacacccgcgagcgccggttctggaacgccggggcgccgcagatggcaacgcggacggcggctgttcccacaccctacggcgaggtcgccacgcgtctgtattatccacagcacaacagcagggcaacgctgttttatctgcacggcggcggatttattctcggcaatctggatactcatgaccgcattatgcggctgctggcgagctatacgcggtgtacggtcgtcggcatcgactatacgctctctcccgaggcgcgtttcccacaggcgattgaggagaccgtcgcggcatgtcggttctttcatcaacgcgccgatgaatacgcattgaacatggcgcaaatcggttttgccggggattccgcaggcgctatgctggcgctcgccagcgcactgtggctgcgcgataagcagattgtatgcgggagcgtggtcgccacgctgctgtggtatggtctctacgggttacaggattcgcccagccgccgtttatttggcggagaatgggacggcttaacccgtcaggatctggagagatatgaaaacgcctatctgcgtgacgagcaggatcgcgaatccccctggtattgcctgttcaataacgatctgacccgcaatgtgccgccctgttttattaccggcgcggagttcgatccgttacttgatgacagccgtctgctgcaccagacgctccaggcgcataatcagcccagtgagtaccggatgtaccccggcacgctgcacgccttcctgcactattcacgcatgatgaaaaccgctgacgatgcgctacaggatggcgcgcgtttctttatggcgcagttaaaatag

SEQ ID NO: 71545 - DNA, 963 bp, Citrobacter koseri
atgcgtcagacgaaaaccggtatcctgctggctaacctcggcactcccgatgccccaactcctgaagcggttaaacgctatctgaagcaatttttaagcgatgagcgcgtggtggatacttctcgcctgctgtggtggccgcttttgcgtggtgtgattttgccgctgcgcgcgccgcgtgtcgcaaaactgtaccagtctatctggcaggaaggcggatcgccgttgctggtttacagcagggagcaacagcaggcgctggcagagcgtctcccggatacgcccgttgcgctggggatgagctacggttcgccgtcgctggaaagcgcggtcgatgaactgctggcgaatcacgtcgatcacatcgtggtgctaccgctctacccacaatactcctgttcgacggtggcggccgtctgggacgaactggcgcgtattctggcgcgtaaacgcagtattccaggcgtctcgtttattcgtgactacgctgatgacaatagctatatcaccgccctggcaaatagcgcccgtgcctcgtttgcccaacatggcgagccggacttgctgctgctctcgtatcacggcatcccgcagcgttacgctgacgaaggcgacgactacccgcaacgctgtcgcgatactacccgtgaactggtctccgcgcttggtctggcgccagaaaaagtgatgatgaccttccagtcgcgctttggccgcgagccgtggctgacgccgtatactgacgaaacgctgaaaatgctgggcgaaaaaggcaccgggcatattcaggtgatgtgtccgggttttgcggcggattgtctggaaacgctggaggagatcgcgttgcaaaaccgggaaatcttccttgaggcgggcggtaaaaaatacgaatacattccggcgctcaatgccgcgccggaacacatcgatatgatgctgaagctgaccgcaccgtacctctga

SEQ ID NO: 71546 - DNA, 645 bp, Citrobacter koseri
atgcgtatcattctgcttggcgctccgggcgcgggtaaaggaactcaggctcagttcatcatggagaaatatggtattgtgcaaatctccactggcgacatgctgcgtgccgccgtgaaatctggctccgagctgggtaaacaagcgaaagacatcatggacgccggcaagctggtgaccgatgagctggtgattgcgctggtaaaagagcgtatcgcgcaggacgattgccgcaacggtttcctgctggacggcttcccgcgtacaatcccgcaggctgacgccatgaaagaagcgggcattgcggttgactatgttctcgaattcgacgtaccggacgagctgatcgttgaccgcatcgtgggccgtcgcgtgcacgcggcgtctggccgtgtttatcacatcaaattcaatccgccgaaagtggaaggcaaggacgatgtgaccggcgaagagctgaccacccgtaaagacgatcaggaagagaccgttcgtaagcgtctggtggaataccatcagatgactgcgccgctgattggttactaccagaaagaagcggaagcgggtaacactaaatacgcgaaagtggacggtactcaggccgttgccgatgtgcgtgccgaccttgaaaaaatcctcggttaa

SEQ ID NO: 71547 - DNA, 1875 bp, Citrobacter koseri
atgaaaggacaagaaactcgtggttttcagtcagaagtaaaacagcttctgcacctgatgatccattctctgtactccaataaagaaattttcctgcgtgagcttatctctaacgcctcagatgcggcggacaagctgcgttttcgcgcgctgtcgaacccggatctgtatgaaggcgacggcgagctgcgcgtacgtgtctccttcgataaagataagcgtacgctgaccatcgccgataatggcgtggggatgaaccgtgatgacgttatcgatcatctgggaactattgcgaaatccggcactaaatctttcctcgaatccatgggttccgatcaggcgaaagacagccagttgatcggccagttcggggtcggcttctactctgcgtttatcgtcgcggataaagtgaccgtgcgtacccgcgcggcgggcgataagccggaaaatggcgtgttctgggaatcggcgggcgaaggtgagtacaccgtcgcggatatcactaaagacgatcgcggtacggaaatcaccctgcacctgcgtgaaggcgaagacgagttccttgatgactggcgcgtacgctccatcatcagcaaatattccgaccatatcgcactgccggtagagattgaaaaacaggaagaaaaagacggtgaaacgatcgtctcctgggagaaaatcaacaaggcgcaggcgttgtggacgcgtaacaagtcagaaatcaaagacgacgagtataacgagttctacaagcacattgctcacgacttcaccgacccgctgacctggagccacaaccgcgtggaaggtaagcaggagtacaccagcctgctgtacatcccgtctcaggcgccgtgggatatgtggaaccgcgatcacaaacatgggctgaaactgtacgtacagcgcgtctttatcatggacgacgccgagcagtttatgccgaactatctgcgcttcgtgcgtggtctgattgattccaacgatctgccgctgaacgtttcccgcgaaatccttcaggacagcaccgttacccgcaacctgcgcagcgcgttgaccaaacgtgttctgcaaatgctggaaaaactggcgaaagacgatgcggaaaaataccagaccttctggaaacagtttggtctggtgctgaaagaaggcccggcggaagatcatgccaaccaggaagccatcgcgaaactgatgcgctttgcctcaacgcatacggactcttccgcacaaaccgtctctctggaagattatatctcccgcatgaaagaagggcaggagaagatctactacatcacggcagacagctacgcggcggcgaagagcagcccgcacctggagctgctgcgtaagaaaggcatcgaagtgctgctgctttccgatcgcattgatgagtggatgatgaattacctgaccgagttcgacggtaaggcgttccagtccgtgtctaaagttgacgaatcgctggaaaaactggcggatgaagtcgatgaaagcgcaaaagaagcggaaaaagcgctgacgccgttcgttgagcgcgtgaaaaccctgctgggcgatcgtgtgaaagaggtgcgtctgacgcatcgtctgaccgatactccggccattgtcaccaccgacgctgatgagatgagtacccagatggcgaagctgtttgccgctgccggtcaggccgtgccggaagtgaaatacatctttgaactcaacccggatcacgtactggtgaaacgcacggcggatacccaggacgaagcgcagtttaacgagtgggtagagctgctgttggatcaggcgctgtttgccgaacgcggtacgctggaagatccgaaccagtttatccgtcgtatgaaccagttgctggtgtcttaa

SEQ ID NO: 71548 - DNA, 606 bp, Citrobacter koseri
atgcaaaccagcccgctgttaactcagcttatggaagcactgcgctgtctgccgggcgttggcccgaagtcagcgcagcgcatggcgtttacgctgcttcagcgtgaccgcagcggcgggatgcgtctggcgcaagcgctcacccgggcgatgtcggaaatcggccactgtgccgattgccgcaccttcactgagcaggacgtgtgcaatatctgttcgaatccgcgtcgtcaggaaaacggtcaaatctgcgtggtggagagtccggcggacatctacgccatcgaacagaccgggcaattctctggccgctacttcgtgctgatggggcatctgtcgccgctcgacggcatcgggccggacgatatcggtctcgatcgtctggagcagcgtctggcgtcagaacagctcagcgaagtgatcctcgcgaccaacccgacggtcgaaggggaggctactgcgaactatattgccgaactttgtgcgcaatatggcgttgaagccagccgtatcgcccacggcgtaccggtgggcggcgaactggaaatggtcgacggcaccacgctgtcccactcgcttgccgggcgtcataagattcgtttttaa

SEQ ID NO: 71549 - DNA, 330 bp, Citrobacter koseri
atgtttggaaaaggcggtctgggcaacctgatgaagcaagcccagcagatgcaagaaaaaatgcagcagatgcaggaagaaatcgccaaactggaagtcaccggcgagtctggcgcaggtctggtgaaagtgaccattaacggtgcgcacaactgccgtcgcgtggaaatcgacccaagcctgctggaagacgacaaagagatgctggaagatctggtcgctgcggcgttcaacgatgcggcgcgtcgcattgaagagacccagaaagagaagatggcgtctgtctcctccggtatgcaactgccgcctggctttaagatgccgttctga

SEQ ID NO: 71550 - DNA, 1926 bp, Citrobacter koseri
atgagttatcaggtcttagcccgaaaatggcgcccacaaacctttgctgacgtcgtcggccaggaacatgtgctgaccgcactggcgaacggcttgtcgttagggcgtattcatcacgcatatcttttttccggcacccgtggcgtcggtaaaacctccatcgcccgtctgctggcgaagggactgaactgtgaaaccggtatcaccgccacgccgtgcggcgtatgtgacaactgccgggaaatcgagcaggggcgttttgtcgatctgattgagatcgacgccgcgtcgcgcaccaaagtggaagatacccgcgacctgctggacaacgtccagtacgcgcccgcgcgcggccgctttaaggtctatctgatcgacgaagtgcatatgctctcgcggcacagcttcaacgcgttgcttaaaacgctcgaagaaccgcccgcgcacgttaagtttctgctggcgaccaccgatccgcagaagctgccggtgacgattttgtcgcgctgcctgcaattccatctcaaggcgctggatgtcgaacaaattcgccatcagcttgagcatatccttaacgaagaacatatcgcgcatgagccgcgcgcgctgcaactgctctcccgcgcagcggacggcagcctgcgcgatgcgctaagcctgaccgaccaggcgatcgccagcggtgacgggcaggtctccaccctggcggtgagtgcgatgctcggtacgctggatgatgaccaggcgctttcgctggtcgaggcggtggttgccgccaatggcgagcgcgtgatgtcgctggtgaacgatgccgccgcgcgcggtattgagtgggaagcgctgctggtcgaaatgctggggctgttgcaccgcattgcgatggcgcagctgtcgcctgccgcgctgggtaacgatatggcggtgattgagcagcgcatgcgtgaactggcgcgaactgtgccgccagcggacatacagctttattaccagacgctgttgattggccgcaaagagctgccttacgcgccggacagacggatgggcgttgaaatgacgctattacgcgcgctggcattccacccacgtatgccgctgccggaaccggaaagaccgcatcaatcttttgcgccggtcgcgccaacggcggtgatgacgccgacgcaggtgccttcgcaacaatccgctccggtacgccaggaggtgccgttgccagatgccaccagccaggtgctggcggcgcgcaaccagcttcagcgtgctcagggagcaaccaaaacaaaaaagagtgaaccggcagccgcttcccgcgcgcggccggtaaataacgctgcgctggaaagattagcctctgtctctgaacgcgttcaggcgcgtccggcgccgtctgcgctggaacagacgccgacgaagaaagaagcctaccgctggaaggcgaccaatccggtggtggaagtaaaagaggttgtggccacgccgaaagcgctgaaaaaggcgctggagcatgaaaaaacaccggaactggcgaccaaactggccacggaagcgactgaacgcgatccgtgggcggcacaaattagccagctctccctgccgaagctggtggaacaggtggcgttaaacgcctggaaagaggagaacggcaataccatttgcctgcatctgcgctccacgcagcgacaccttaactccactggcgcgcagcaaaagctggcggaagcattgagcgccctgacgggaacgacggttgaactgaccatcgttgaagatgataatccggcggtgcgaacgccgctggagtggcgtcaggcgatttatgaagagaaacttgcgcaggcgcgtgagtcgattattgcggataacaacattcagacgctgcgtcgattctttgacgcggatctggatgaagagagtattcgccccatttga

SEQ ID NO: 71551 - DNA, 552 bp, Citrobacter koseri
atgaccgcgactgcacagcagcttgagtttctcaaaaatagcattaaaagcattcacgattacccgaaaccgggcattcttttccgtgatgtcaccagcttgctggaagacccgaaagcctatgcgctcagcattgaattgctggttgaacgatacaaaaatgcaggcatcaccaaagttgtcggcaccgaagcgcgtggcttcctgtttggcgcgccggtcgcgctgggcctgggcgtcgggtttgttccggtgcgtaaaccgcgcaaactgccgcgtgaaacgatcgctgaaagctatgagctggagtacggcaccgatcagctggaaatccacgttgatgccatcaaaccgggcgataaagtgctggtggtggacgatctcctggcgaccggcggcacaattgaagcgactgtgaagctgatccgtcgtctgggtggggaagtgaccgatgccgctttcatcattaatctgttcgatctgggtggtgagcagcgtctggcaaaacaggggattacctgttatagcctggttcccttcccggggcactga

SEQ ID NO: 71552 - DNA, 396 bp, Citrobacter koseri
gtgctacgtactgtcattatgaaacgtactattttaatcatcattggctggctggcggtagtgttagggacgctgggcgtcgtgttgccgctattgcctactacgccatttattttactggcggcctggtgttttgcccgttcgtcgccgcgctttcatgactggctgctttaccgctcctggtttggcggctatttgcgtcactggcaaaagcatcgcgcgatgccgccgggggcgaaaccacgcgctattgcattgatattgattacattcggtatctcgctttggctggtgcatatgatgtgggtacgaatactgctgctggcgatcctggcctgcctgttgatttttatgtggcggataccggtgattgatgaaaagcaacaaaagcactga

SEQ ID NO: 71553 - DNA, 528 bp, Citrobacter koseri
ttgaaaaccgccatgctgttacacaggctggaaagccagctcgccagtctgcgccagcagagcgcgccgctggcacagcatgcgacgctcagcgcacgctttgacaggcatctttttcgcacccgcagcacgctattgaaggcgtatctggatgaagccggaaccaaccttgacgcgttgcgccatgcagttgaacaacagacgttgccgcagattgcctggctggcggagcgcctggtttcacagattgaggcgataacacgggaaaccgcgacctggtcgctcagggagtgggacagcgcctccccggggctggcgcgctggcaacgtaaacgcgtaaagcatcaggagtttgagcgtcgtctgctggaaatgaccgaggagcgtaaagcccgtctggcgcaggtcaccggcttcaccgagcagcaggcgctgcaccgggaaatcgaggcgtttgaaggccgtctggcgcgctgtcgtcatgcgctggaaaaaatagagcgcgtactggcgcgcctgacccgttaa

SEQ ID NO: 71554 - DNA, 168 bp, Citrobacter koseri
atgtcgcttgagaatgccccggacgacgtcaaactggccgtcgatctgatcgtcctgcttgaagagaatcaactgcccgcgcaaaccgtgctacgcgcgctggaaattgtgaagcgtgattatgaaaacaaactaaaaaacgcggaagacgcctcgcaaagcgattaa

SEQ ID NO: 71555 - DNA, 948 bp, Citrobacter koseri
atggaacgactttcaaccacgccgcatgatgcggtatttcggcaactgctgacgcaaaaagcgatcgcgcaggattttttacagatccatttacctgacacctttcttcgcatctgcaatctggattccctgacgctggagtcaggaagttttgtcgaagacaacttacgggccagctattcagacatcctctattccctgcaaactacgcatggaccaggctacgtttatgcgctgattgagcatcaaagcaaacccgataaattcatggcgtttcgcctgatgcgttatgccatcgccgccatgcagcggcatcttgatgccgggcacgacacgctgccgttagtggttcccttactgttctaccacggatcaattagtccgtggccctacagcctgaactggcagaatatgttttgtgagcccgcgcttgccaatagcctttacagtaatgaatttgcgctggtggacctgaccgtaatgccggataatcagatcatgcggcatcggcgaatggcgatgctggagctactgcaaaagcatatacgccgacgcgatctggccgaattacaggatcaattaatcacgctattaacgcaggaacacctgacccgtagccaaatcagcgtgctgatacactatatgttgcaggttgggaataccacggaccccggcgcgttgatccgcaaactggccagctgcgccccccagtataaggagcaactgatgagcattgccgaatggctggaagagaaaggcagagcagacggactgcaaaaaggaatgcaacagggaatgcagcaaggacggcaaaagggcttagaagaaggtcgtcaggccgaagcgcgcagcatcgctctcaaaatgctcgacagcggtctggcccccgatctgatcacccacctaaccggactctcgccagaagagctgtctgcgctctcccattag

SEQ ID NO: 71556 - DNA, 3363 bp, Citrobacter koseri
atgactatgttgcagctctataaacgttcatcgcatcttgtttttatctcaatcattttctttgtgttattgctgtgcggtcagtcgtcggcgtttgcccgtgcgcaaacgaatggcgatctgccgtcgaaagcagacgtgcaaagccagctggatgcgctgggtaaacagaaagacctctcggcgctggataaactggtccagcaggatctcatcgatacgctcgccacgcttgataaaatcgatcgggtaaaagaggagaccacgcaattacgtcagaaagtcgcgcaggcgccggaaaaaatgcgtcaggcgacggacgcgctgaatgccctcagcgatgtggataatgacgacgaaacgcgaaaaacgttgagcacgctttcgctgcgccagctggaacttcgggttgcgcaggtgctggacgatttgcagaactcgcaaaacgatctggcgacttacaatagtcagctggtttcgctccagacgcagcctgagcgtgtacaaaacgcgatgtataccgcgtcgcagcaaatgcagcaaatccgtaatcgactggacggcaccagtgtcggggacggcgcattgcgcccgagtcaacaggctctgctacaggcgcaacaggcgttgcttaacgcgcaaatcgatcagcagcgcaaaagtctggaaggcaatacggttttgcaggataccctgcaaaagcaacgcgattacgtcacggcgaacaccaatcgactggaacaccagctccagcttttgcaggaagcggtcaacagcaaacgtctgacgctaaccgagaagacggcgcaggaggcgatctcgccggatgaaacggcgcgtattcaggctaaccctcttgtgaagcaggagctggatgtcaatcatcaactgagccagcgcctgatcacggcaaccgaaaacggcaacgcgctcatgcagcagaacatcaaagtcaaaaactggcttgatcgcgcgctgcaatcagagcgcaatatcaaagagcagattgcggtgctgagaggcagtttgctgttgtcgcgtatcttgtatcagcagcagcaaacgctgccgtcggcagatgaacttgtcgatatgaccaaccggattgcggatttgcgtctggagcagtttgaagttaaccagcagcgtgacgctttgttccagaacgatgcctttgtggccaaactggaagaagggcacactgacgaggttaatgacgaagtgcatgatgcgctgctgcaagtggttgatatgcgcagggaattactggatcagttgaataagcagctgggcaatcagctgatgatggccattaacctgcaaatcaatcaacagcagctgatgagcgtctcgaaaaaccttaaagagatcctgactcagcaaatcttttgggttaacagtaaccgcccgatggactgggactggattaaagccttcccgcaaacgctgaaagatcagttcaggtcgatgaaaattacggttaactgggaaaaggcctggcctgcggtattcatcgcattcctcgcggggctgcctttgctgctgatcgccggggtgattcgctggcgactgaaatggcttaaagcgtaccaggagaagctggcggccgctgtgggatcattgcgtaacgacagccagctcaatacgccgaaagcgattttcatcgatctgattcgcgccttgccggtttgtctgataatccttgcggtagggctgatcctcctcaccatgcagttgaatattagcgacctgttatgggcgttcagtaaaaagctggcgttgttctggctggtattcggtctgtgctggaaggtgctggagaaagaaggcgttgccattcgacacttcggtatgccggcgaaattgaccagccactggcgccgccagattgtgcgcatcagtctggcgctactgccgctgcatttctggtcggtggtcgctgaactttctccgctgcatctgatggatgatgtcctggggcaggtggtgattttcctcaaccttctgcttattactctgctggtgtggccaatgtgccgcgatagctggcgtgataaggagtcgcatggtttacgtctgatcacgattaccgtgctctccatcattcccgtcgcgttgatggtgttgaccgcgacgggctatttctataccacgctacgcctgtccgggcgctggattgaaaccgtctatctggtgattatctggaacctgctgtatcagaccgtgttacgcggcctgagcgtcgcggcgcgtcgtattgcctggcgccgtgcgctggcgcgtcgtcagaatctggtgaaagagggggcggaaggcgcggagccgcaggaagaaccgactattgcgctggaacaggttaaccagcaaacgctgcgcatcaccatgctgctgatgattgccctgttcggagtgatgttctgggcgatttggtccgatctgatcaccgtgttcagctatctcgacagcatcacgctctggcactacaacggcacggaagcgggcgctgcggtggttaaaaacgttacgatgggcagcctgctgtttgccattattgtgtcaatggtggcctgggcgctgatccgtaacttacctggcctactggaagttctggtactttccagactgaaaatgcgccagggggcttcgtatgcgatcaccacgatcctcaactacatcatcattgccgttggcgcgatgacggtattcggatcgcttggcgtatcgtgggacaaactacagtggctggcggcggcgttatcggttggtcttggtttcggcttgcaggagattttcggtaacttcgtctctggcattattatcctgtttgaacgcccggtacgcattggcgatacggtgactatcggcaccttctccgggacggtcagcaagatccgtattcgtgcgaccaccattaccgacttcgatcgtaaagaggtgatcattccgaacaaagccttcgtgaccgagcgattgatcaactggtcgctgtccgacaccaccacccggctggtgatccgccttggcgtcgcctatggctcggatctggacaaagtgaaaaaagtgttgttgcaggcggcgacggagcacccgaaagtgatgcgtgagccagaacctgcggtgttctttaccacgtttggcgccagtacgctcgatcatgaactgcgtctgtacgtgcgtgaactgcgcgatcgcagccatacggtggatgagctgaaccggaccatcgatcgtttgtgccgtgaaaataacatcgacatcgcttttaaccagcttgaagtgcatctgcgcaatgagaaaggtgacgaggtgacggaagttaaacgcgaaatcaaaggcgacgatccgacgccgtcggtgggctaa

SEQ ID NO: 71557 - DNA, 288 bp, Citrobacter koseri
atggcggtagtgcaacaggcgcagcgaagcatctgcgtggaaagctatgatcgcattgaacaaacgctaacacattgtattaaagcaaaaatgctcccgggaaacctgatgacgcgtcgtgcggcaatattaatgcgcggctatatttccggcatcatggaaaactggctctttgcgccgcaatcctttgatctgaaaaaagaagcgcgagattacgtcgccatcttgttggaaatgtatctgctttgcccgacgctgagggcggcgcctgccctcgaaagcccctga

SEQ ID NO: 71558 - DNA, 360 bp, Citrobacter koseri
atggcacgaaaaaccaaacaacaagcacaggaaactcggcaacacatcctggatgtagctctgcgtttgttctcgcgacaaggggtatcatccacttcgctcgcggagattgcaaaagccgctggcgtcacacgcggtgcaatctattggcacttcaaaaacaagtcggatttattcagtgaaatctgggagctatcagaatccaatattggtgagcttgagattgagtatcaggcaaaattccccgacgatccactatcagtattaagagaaattttagtccatcttcttgaagcaaccgtgacggaagagcgtcgacgtttattgatggaaattatattccacaaaattcgtgggtga

SEQ ID NO: 71559 - DNA, 1194 bp, Citrobacter koseri
atgaacaaaaacagagggtttacgcctctggcggtcgttctgatgctctcaggcagcttagcgctaacaggatgtgacgacaaacaggcccaacaaggtggtcagcagatgccagaagttggggttgtgacgctcaaaactgaacctctacagatcactactgaactcccgggtcgcaccaatgcataccgtattgcggaagttcgtcctcaggtaagcggaattatcctgaaacgtaactttacggaaggcggcgacattgaagcgggtgtgtctctctatcagattgatcctgcgacttaccaggcggcttacgaaagcgccaaaggcgatctcgctaaagcgcaggcggctgcaaatatcgctcagttaacggttaaacgttatcagaaactgttgggtacgaaatacatcagccaacaagactacgatagcgcgctggcagatgcgcaacaggcgaatgcgtccgttgtggcggcaaaagcggccgttgaaaccgcacgcattaatctggcgtataccaaagtgacctccccgattaacggccggatcggtaaatcatccgtaacggaaggcgcgctggtacaaaacggccaggctaccgccctcgcgacagtacagcaactcgacccgatctatgtggatgtaacgcagtcaagcaacgacttcctgcgcctgaagcaggagctggcgagcggcaaactgaagcaagagaacggcaaagcgaaagtcgagctggtcaccagcgacggcattacctatccgcaatccggtacgcttgagttttctgacgtcaccgtcgaccaaaccaccggttctattacgttacgcgcaatcttccctaacccggaccataccttactgcctggtatgtttgttcgcgcacgtctggaagaaggcaccaatcctgatgcattgctggttccccagcagggcgttacccgtacgccacgcggtgatgccagtgcgttggttgtcggcgccgatgacaaagtggaaacccgtcagatcgtcgcaaaccaggcgattggcgataagtggttagtcactgatggactcaaatcgggcgatcgcgtgattgttaccgggctgcaaaaagtgcgtcctggcgcgcaggttaaagcgcaggaagtcaccgctgataatcaacagcaagccgcaagcgctaacccgtctgaacagtctaagtcttaa

SEQ ID NO: 71560 - DNA, 3147 bp, Citrobacter koseri
atgcctaatttctttatcgatcgccctatatttgcgtgggtgatcgccattatcatcatgttggcagggggcctcgcgatcctcaaactgccggtagcgcaatatccaacgattgcgccgcccgcagtgacgatctccgcgacttaccctggcgctgatgcgaaaaccgtgcaggacacggtgacgcaggttatcgaacagaacatgaacggtatcgataacctgatgtacatgtcctcaaacagtgactccacgggtaccgtgcagatcaccctgaccttcgaatccggtacggatgcagatatcgcgcaggttcaggtgcagaacaaactgcaactggccatgccgctgcttcctcaggaggttcaacagcagggtgtgagcgttgagaaatcatccagcagcttcctgatggttgtgggcgtcattaacaccgacggcaccatgacccaggaggatatctctgactacgttgcggcgaacatgaaagacgccatcagccgtacgtcaggtgtgggtgacgtgcagctgtttggttcgcagtacgcgatgcgtatctggatggacccaacgaagctgaacaacttccagctcacgccagtggatgtgattaacgcgatcaaagcgcagaacgcccaggttgcggccggtcagcttggcggtacgccgccagtgaaaggccagcaactgaacgcctccatcatcgcgcaaacgcgtctgacctctacggaagagttcggtaaaattctgctgaaagtgaaccaggacggctcccaggttcgcctgcgcgatgtagcaagaattgaactgggcggtgagaactacgacatcattgcgaagttcaacggacagcctgcgtctggtctggggatcaagctggcgaccggtgcgaacgcgctggataccgcaaacgccatccgtgcagaactgaagaagatggaaccgttcttcccgtcagggatgaagatcgtttacccgtatgacaccaccccgttcgtgacgatctccattcacgaagtggtgaaaacgctggtagaagccatcatcctcgtgttcctggtcatgtacctgttcctgcaaaacttccgcgcgacgttgattccgacaatcgcggtgccggtggtgctgttggggacattcgccgtgctttcggcgttcggtttctcgataaacacgctaacgatgttcgggatggtgctcgccatcggcctgttggtggatgacgccatcgtggtggtagagaacgtcgagcgtgtaatgtccgaagaaggattgccgccgaaagaagccacgcgaaaatcaatgggccagattcagggcgcgctggtggggatcgcgatggtgctgtcagcggtatttatcccgatggccttcttcggcgggtctacaggggctatttatcgtcagttctccatcaccattgtgtccgcaatggcgctgtcagtgctggtagcattgatcctgacgccagccctgtgcgccaccatgcttaagccggttgccaaaggcagccacgggtcaaccaaaggtttctttggctggttcaacaacatgttcgagaagagcacgcaccactacaccgacagcgtaggcaacatcctgcgcagcaccggtcgttatctgctgctctatctgatcatcgtggtcggcatggcttacctgttcgttcgtctgccaagctccttcttgccggacgaggaccagggggtcttcctgagcatggcgcagttgccagcgggcgcaacccaggagcgtacgcagaaagttctcgatgagatgaccgactattatctcaccaaagagaaagataacgttgaatccgtctttgcggttaacggctttggttttgctggtcgtggtcagaacaccggtatcgcgttcgtctcgttgaaagactgggccgaccgtccgggggatgagaataaagtcgatgcgatcaccggtcgcgcgatgggcgcattctcccagattaaagatgcgatggtgttcgcctttaacctgccagcgattgtcgaactgggtacggcaacgggcttcgacttccagttgattgaccagggcggcctcggtcatgaaaaactgacgcaggcgcgtaaccagctatttggcgaagttgcaaaacacccggatctgctggtcggcgttcgtccgaacggtctggaagatacgccgcagttcaaggtcgatatcgatcaggaaaaagcgcaggcgttgggtgtttccattagcgatattaacacgacgctaggcgcagcatggggcggtagctatgtgaacgacttcatcgaccgtggtcgtgtgaagaaagtttacgtcatgtctgaagcgaaataccgtatgttgccggaagatatcggaaactggtatgtgcgcggtagcgatggtcagatggtgccgttctcagccttctcctcctcgcgctgggaatacggttcaccgcgtctggaacgctataacggtctgccttcaatggaaatcctcggccaggcggcaccaggtaagagtaccggtgaagcaatggcgatgatggaagagctggcaagcaaactgccatccggcatcggctatgactggaccgggatgtcttatcaggaacgactgtccggcaaccaggcgcctgccctgtacgccatttcactgatcgtggtcttcctgtgtctggcggcgctgtatgaaagctggtctattccgttctccgttatgctggtggtgccgctcggggttatcggcgcgctgttggcggcaaccttccgtggcctgaccaacgacgtttacttccaggtgggcttgctcacaaccattgggttgtcggcgaagaacgcgatacttatcgtcgaattcgccaaagacttgatggataaagaaggcaaaggtctgatagaagcaacgctggaagcggtacgtatgcgtttacgcccgatcctgatgacgtctctggcgtttatcctcggtgttatgccgctggttatcagctctggcgcaggttccggcgcgcagaacgctgtgggcaccggcgtaatgggcgggatggtcaccgcaacggttctggctatcttcttcgttccggtcttctttgtggtggtacgccgccgctttagccgcaagagcgaagacattgagcacagccattcggtagagcatcattga

SEQ ID NO: 71561 - DNA, 375 bp, Citrobacter koseri
atggatgagtactcacccaaaagacatgatatcgcacagcttaaatttctctgtgaaaccctgtatcatgactgtcttgcaaaccttgaagaaagcaaccacggttgggttaatgaccctacttcggcaatcaatcttcagctcaatgaactgatagagcatattgcaaccttcgcacttaattataaaattaagtataatgaggacaataagctgattgcacagatagatgaatatctggatgacacctttatgttgttcagcagttacggcattaatgcgcaggatctgcaaaaatggcgaaaatcaggaaaccgcctgtttcgctgcttcgtcaatgccaccagggcgaatcctgttagcttgtcatgttaa

SEQ ID NO: 71562 - DNA, 219 bp, Citrobacter koseri
atgtccgataaaccattaacgaaaacagattatttgatgcgtttacgacgctgccagacaatagacacgctggaacgtgtaatagagaaaaataaatatgaattgtctgacaatgaattggctgtattttactcagcagcagatcaccgtcttgcagaattgacgatgaataagctctacgacaagattcccacctccgtgtggaaattcattcgctaa

SEQ ID NO: 71563 - DNA, 552 bp, Citrobacter koseri
atgagcgaagaaaagcagaagatgattgccggtgagttatattgcccggccgatgagacattgcgcaacgaccgcctgcgggcgcgccagttgcttcatcgatacaaccactccgcaccggacgagaagaatgcgcgacaggctattatgagcgacctgctaggccagagcgacggtgcgtatattgaaccctccttccgctgtgattacggttacaatatttacctcggcaaagcattttacgctaacttcgactgtgtgatgctggatgtctgcccaattcatatcggcgacaattgtatgctcgcgcctggcgtgcatatctatacggcgacgcacccgctggatgccacagaacgcaacagcggtagggaactgggtaaacctgtaaccatcgggaataatgtctggatcggcggtcgcgccgtgattaaccctggcgtcaccattggcgataacgccgttatcgcatcaggcgccgtcgtgaccaaaagcgttccggccaacgttgtggtcggtggaaatcccgcgcgaatcattaaaacgctgtaa

SEQ ID NO: 71564 - DNA, 471 bp, Citrobacter koseri
atgacagaaatacagcgcctgctgacggaaacgattgacgatctcaatgctcgcgagaaacgcgacaacagaccgcgtttcagtattagttttattcgcaaacatccggggctgtttattggcatgtatatcgcctggtttgccacgctggccgtcatgctgcaatcagacacgctggtggattcagtgtggctgctggtcgtattattcgtcctgttgaatggttttttcttttttgatgtcgccccgcgttatcgctacgaggatatcgacgtgctggatttcagggtttgctataatggagaatggtataacacgcgcttcgttccccctgcgctgatccacgctattcttcagtcaccgcatgttggcagcgaccagaaagcacaattacagaagatgataacgcgtaaaggcgaactctctttctacgatgttttcacgctcactcgcacagaggcaagccgttag

SEQ ID NO: 71565 - DNA, 141 bp, Citrobacter koseri
atgcaggtactgaattcattgcgtagcgcaaagcagcggcacccggactgccagatagttaaacgcaaagggcgtttatatgtgatctgcaaatccaatccacgttttaaagcggtgcagggtcgtaaaaaaagacgttaa

SEQ ID NO: 71566 - DNA, 261 bp, Citrobacter koseri
atgaaaccgaatatccatcctgcctatcgcaccgtggtgttccacgataccagtgcgaatgaatactttaaggtggggtcaacgatcaaaaccgagcgtgagattgagcttgagggcgtgacctatccgtatgtcaccattgaggtgtcttctaaatcacacccttattacaccggaaaacaaaaaacctttgataacgaaggcagcgcagcacgtttccagaaacgtttcggaaattttattggcgctaagcgaggataa

SEQ ID NO: 71567 - DNA, 1434 bp, Citrobacter koseri
gtgacaacacgacatttggtcagcctggtcacaggggtgctcattctgtctgtccttgcccctgtgggattaagcctctggctcgctcatcgccaggttgaaaagaaatttattgaggaacttaacgtctattcatcacgcgtagccttacgcgctgacaaagttgcctcccagagcaaactggcgttagaccagctaaacgcctttcgcggtacgccttgtagtaatgcgcatttactgacaatgcgccgaatatcttacagtctgcgctacattcaggaagtgctatacctcgaccaaaatatgcctgtttgctcatcgctggagcaaaaaagcgcccccttcgttttccccaaaccggaaaagatcacccaggacggctaccgcatatggcttacctcgcaaaatgatttagggctcaagcgctttatggtcgctgtgggtaaaggacactatgtggtcatgatggaccccgcctccttcattgatgtgatcccatttagttcatggcatattgatgccgctattattggcgaagcaaataacatcgtggccgccagtagcaatcggctcgatcccgacattattcgacaattgcagcagtcgcccggtcaataccgggaagatcgcaacagtgtctacacgattcagcgctctcctgaaatgaacatcgccatcgtgacctgggcctccacgctaccgctacaaaagaactggtatcgccaggcttttatctggctaccgctggggatgatggcgagcctgctggcggcggcgtttattctgcgcattcttcgccgcttacaatcaccacaccaccgtttactggacgccatccataaccgtgatattaaggtgcattatcagccgattatttcgctgagtagcgggaagatagcaggcgcggaagcgctggctcgctggccgcaaaccgacggcagctacctttcgccagaaatatttattcccctcgcagaacaaacggggctttccgaaccgctcacccacctgattttagagaccgtttttgaggagatgggaacatggctgcgacaacaccctgagcagcacatttctatcaatattgaggcaacgacccttgcgtcggagaaacttccggtacatctcagccagttgcttaaccggagtcagatttcaccgtcgcaaatcgccctggagctgaccgagcgtgagtttgccgatcccaaaaccagcgcgccagtcattgccagataccgcaaagccggtcacgcgatttatcttgatgactttggcactggctattccagtctttgctacttacagaatctggacgtggatattctgaagatcgacaagtcctttgttgatgcgctggcctacaaaaatgtgacgccgcatattattgaatatggcgaaaacgctgaagctgaaaatggtggcggaaggtattga

SEQ ID NO: 71568 - DNA, 162 bp, Citrobacter koseri
atggcgaaaacgctgaagctgaaaatggtggcggaaggtattgaaacgacgcatcaggaggactggttacgccagcacggcgtgcagtatggtcagggatggctttacagcaaagcgctgcccgccgcagaatttattttgtgggcggaaaaacggatttag

SEQ ID NO: 71569 - DNA, 354 bp, Citrobacter koseri
atgaagtatgttgatggttttgtggttgccgtacctgctgaaaacaaggaggcgtatcgggaaatggcggcaaaagcggctcctctctttaaagagtttggggcgttacgcgtcgttgagtgttgggctgatgatgtgccggacggcaaattgactgactttcgcatggcggtgaaagcggaagatcacgaagaggtggtgtttagctggattgaatacccttcgaaagaggttcgcgacgcggcgaatcagaaaatgatgtcagacccacgaatgaaggagtttggcgatgccatgccttttgatggcaagcgcatgatttacggcggattctctcccattctggatgactga

SEQ ID NO: 71570 - DNA, 615 bp, Citrobacter koseri
atgctgcgtcgtctgattcaactgtataccggtctggctctttatggcgtatcgaccgcaatgtttgtgcgtgcggacttaggggccgatccgtggaacgttttccaccttggcgtggcgaatttactgtcaatgaacattggcatggtgattatcgccgttggcgtgctggtgttattactgtggattccgctgcgtcaacgcccgggccttggcaccatcagcaacgtgatcgttattggactggcggcggatgttgcgctggccgtattgcccgcttttgagtcgttgcttgtccgcagtgttctgttgatctccgctgtagtggtcaacgcgctggcgaccagcatgtatattggggccggtttcggcgcaggcccgcgagatggcctgatgaccgggattcacgcgcgcaccggttggtcgatacgcgccatccgtacggcgattgaagtttcggtattgctgagcggctggttgctgggggggacgctgggcgtcggtacggtattgtatgcgctggctatcgggccgctgattcagatctgcttgccgtggtttcgctatcaaccccgggcacgcattcgggttcgtcattcgcccacagcagagtaa

SEQ ID NO: 71571 - DNA, 1428 bp, Citrobacter koseri
atgtcatcacgccgctatggaagccagtctcttcagcgcctgcttgggcactggcaggagaccccctcacgtactcctgtctggcgtcagctggcggaggccctgcgtctgctgattcttgatggccgactggcgctcgatagccgactgcccggcgaacgcgaactggccgccgtattgaagatcagccgaaccaccgtcgccagcgcaatggcgcaacttcgggaagaaggctatctggaaagccgtcagggtagcggctcgcgggtgatcttaccggatgccatccaccctgtgcccacgcgcggcggagccaatatggcattggatctctctaccgccgcgctcagcgcaggccctgaaattcaccaggcttaccagcaggcgctttgcgcaatgccgcagcatctgctgagttccgggtatctgccgcaaggtctgctctctttacgtgaatctatcgcccggcactattgcgagcgcggcttaccaacccgccctgatgaaatcatggtggtcaatggcgccgtgagcgggctggcgctgctcctgcgactcctgacgggcccgggcgatcgcgtggtggtggatcacccgacctacccgctcgcaatcgccgcgattcagggagcctcctgtcgccccgttggcgtctcattgcccgaacagggttgggacaccgccggtctgatggcgaccattgcgcagaccgcgccgagaatggcttatctgatgccggatttccataatcccaccggacgctgtatggatgccgccacgcggcaagcggtcgcggatattgccgccagaacgcataccacgctggttgtggacgagacgatggttaatttgtggtacaacgccccgccgccgcccccactcgcgcattacaatgccgacgcgccgattattatgctgggatcggcaggaaaaagtttctggggcgggttgcgtctggggtgggttcgcgcctcatcacggacaatcgccgcgctggtacaaacccgggatacgtttgatttaggatcgccggtactggagcagctagcgaccagctggctgcttgataatgccgccagttttcttcctgacagacggcagttgctgtcccaacgacgcaacttgtgttgtgaactgatgcacgcgcattttcctgaatggcgcttcaggcagccgcagggcggactctctttttgggtggagttacccgacacgctggccactctctttgcaatgcgcgccgaaagcgaagggattcaactgggcaccggtacgcgttttggtctcgcgggtgcgtttgatcgtttcttacgtatgccgttcaccctgccggatgaaacactgcgatcggcttttcagacattacagccgatatgggacaacctgcgctcacaaaacagcgcagggaaaatacgcaaaattatctaa

SEQ ID NO: 71572 - DNA, 216 bp, Citrobacter koseri
atgaaacaacaactctcaatcgccagtaattatggcgaagcctgcgaattactgcgttccggctatgtgaagcatgttcgtcttaactggaatgttggtagcgatgaattctttcgtattgcctccgactggtgcgatgccggggcaaaaataaagaaagacggcgagaacttcattatttccctgaaaggtttccccgtcccacgccagcaataa

SEQ ID NO: 71573 - DNA, 252 bp, Citrobacter koseri
atggctactgctgtactaaatgtcaaaatcgatgaggcgttaaaagagaagcttcgccattatgccgaagcaaataatgagaacttaagtatcaccacagaaaaactgctgctgattgcatttgaggccgcagaagaggcgggagtctcggcgagtgatatcgacagtcagcatacggaagaatccgtggatgagccgcttactcctaaagaaatcaaagcattacgcagattactcaagaagaaaaaatga

SEQ ID NO: 71574 - DNA, 312 bp, Citrobacter koseri
atggacagacaagacactttcccccaacgcgtctggcaaatcgtggcctcaatccccgaagggtttgtcacgacttatggcgacgtcgcccgcctcgccggttcacctcgtgccgcgcgtcaggtcggcggcgtattaaaacgattgccggaaggcagcaccctcccctggcatcgggtcgtgaatcgtcatggcgccatctccctgaccgggccagacctgcaacgccaacgtcaggcgttactgtcagaaggcgtggtggtctcggggagtgggcaaatcgatatgcaacgatatcgctggatttattaa

SEQ ID NO: 71575 - DNA, 570 bp, Citrobacter koseri
atgaaactcgtgcacatggtaagtggtttagcggttgcggttgctctggcagcctgcgcagacagaagcgcagatatccagacgcctgcgcctgacccaaatacttctggcgtggctacacagtcaactattcagcaacctaatgtctccggtactgtctggatccgtcagaaagtggccctgccaccggatgccgtactgaccgtgacgctgtctgatgcctcactggcggatgcgccgtcgaaagtgctgtcgcagaaagcggtgcgcaccgaggggaaacagtcgccatttagctttgtactgccgtttaacccggctgacatccagccaaatgcgcggattctgttgagcgccgccgtgacgattaatgacaaactggtctttatcaccgataccgtacagccagttattaatcagggcggcacgaaagcggatctgacgctggtgccggttcagcaaacggcagtgcctgttcaggccagcggcggcgcagcgacaaccgtaccgtcaacgtcgccgacgcaggtgaacccgtcttccgccgtaccggcgccgacacagtactaa

SEQ ID NO: 71576 - DNA, 861 bp, Citrobacter koseri
atgagtcaggcactgaataatttgctgtcattgttagatctggaaaaaattgaagaaggactctttcggggccaaagtgaagacttaggattacgtcaggtttttggtggtcaggtggtcggtcaggcgctgtatgccgccaaagagaccgtacctgaacaacgtctggttcactcttttcacagctactttctgcgccccggcgacagcctgaagcccattatttacgatgtggaagttctgcgcgacggcaacagtttcagcgcgcgtcgcgtcgccgccatccagaacgggaagcctattttctatatgacagcctccttccaggcgccggaagagggatttgagcatcagaaaaccatgccggacgcccctgcgccggaaacgctgcaatcggagacggagatcgcccgttcattggcgcatctgctgccgcccgtgctgaaagagaaatttatcagcgaccgcccgctggagatccgcccggtagagttccacaacccgttaaaaggccacgttgcgaacccgacgcgtcaggtctggatccgcgccaacggtacgataccggatgatatccgcattcatcagtatctgctgggttatgcttccgatctgaatttcctgcccgtcgcgctgcaaccctacggcatcggcttcctggagaaaggtctgcaaattgccacgatcgaccattcaatgtggttccatcgtcctttcaacatgaacgaatggttgctgtacagcgtagagagcacctcggcttccagcgcccgtggttttgttcgtggagagttttacacgcgggatggcgtgatggtcgcatcaaccgttcaggaaggcgtgatgcgcaatcgcaattga

SEQ ID NO: 71577 - DNA, 1227 bp, Citrobacter koseri
atggcggctccggcggttgtggataaagccgacaatgcctttatgatgatttgcaccgcgctggtgctgttcatgaccattccgggcattgccctgttttatggcggattgatccgtggaaagaacgtgctgtcgatgttgacgcaggttgccgtcaccttcgcgctggtctgtattttatgggttgtttacggttattcgctggcctttggcgaggggaacaacttctttggcgacttcaactgggtgatgctgaaaaatattgagctcacggcagtgatgggcagtttctaccagtatattcacgttgctttccagggctctttcgcctgcattaccgtcgggctgatcgtgggggcgctggctgaacgtatccgcttctctgcggtactgattttcgtggtggtgtggctgacgctctcctatatcccgattgcgcatatggtctggggcggcggtttgctggcttctcacggcgcgctggattttgcgggcggtacggtcgtgcatatcaatgcggcgattgctggtctggtgggcgcttatctgattggcaaacgtgtcggctttggtaaagaggcgttcaaaccccataacctgccgatggttttcaccggcaccgcgatcctctatatcggctggtttggctttaacgccgggtcggcgggcatggcgaacgagattgctgcactggcctttgttaacaccgtggtggcaacggctgccgctattctggggtggattttcggcgagtgggcgctgcgcggtaaaccgtctctgctgggcgcctgctccggcgctatcgcgggactggtcggcataacgccagcctgtggttacattggcgtcggcggcgcgttgattctcggtgtcgttgcggggctggcgggtctgtggggcgtgacgatgcttaaacgtctgctgcgtgtggacgatccttgcgatgtgtttggcatccacggcgtttgcggcatcgttgggtgtatcctgaccgggatctttgcgtccaccacgctcggaggtgtagggtttgccgaaggcgtgacgatggggcatcagctgctggtgcagctggagagtatcgctatcaccatcgtctggtctggcgtagtggcgtttatcggctacaaactggcggatatcaccgttgggctgcgcgtaccggaagagcaggagcgcgaaggtctggacgtcaacagccacggcgagaatgcgtataacgcctga

SEQ ID NO: 71578 - DNA, 339 bp, Citrobacter koseri
atgaagctggttaccgtggtaatcaaaccgttcaaactggaagacgtccgtgaagcactgtcttcgattggtattcaagggctgacagtcaccgaagtgaaaggcttcgggcgtcagaaaggccatgccgagctgtaccgcggtgcggaatacagcgtcaacttcctgcccaaagtgaagattgatgtggcgattgccgacgaccagcttgatgaagtcattgaggtcatcagcaaggcggcctacaccggaaaaattggcgacggcaaaatttttgtcgctgagctgcaacgtgtcattcgtattcgtaccggcgaagccgacgaagcggcactgtaa

SEQ ID NO: 71579 - DNA, 1779 bp, Citrobacter koseri
atgcgtagttttggacagttatggccgaccctgaaaaggctgctggcgtatggttcgccgtggcgtaaaccgcttgccatcgccgtggtgatgctgtggatcgcggcggcggcggaagtcagcggcccgttacttatcagctactttatcgacagtatggtcgcgaagagccacctgccgctgggcatggtcgcggggctggtggcggcgtacattggcttacagtttctggcggcggggctgcattatgcgcagtcgctgttgtttaatcaggcggccgtcggcgtagtgcaacaactgcgtaccgatgtgatggatgccgctttgcgccagccactgagcgcctttgacacgcagccggtggggcaactgatctctcgcgtgaccaatgatacggaagtcatccgcgacctttacgttacggtcgtggcgacggtgctgcgtagcgcggcgttaattggcgcgatgctggtcgccatgttcagcctcgactggcggatggcgctggtcgcgatggcgattttcccggcggtgctggtggtgatggtgatttaccagcgctatagcacgccgattgtgcgccgcgtgcgggcatatctggcggacatcaatgatggcttcaatgaggtcattaacggcatgagcgtcattcagcagttccgccagcaggcgcggttcggcgagagaatgggggaggccagccgctcgcactatatggcgcggatgcagaccctgcgactggacggttttttattgcgcccgctgctcagccttttttccgcgctgatcctctgcggattactgatgctgtttagctttacctcgcgcggcaccattgaagtcggggtgttgtacgcctttatcagctatctggggcgtctgaacgagccattgattgaactgacgacccaacagtcgatgttgcaacaggctgcggtggcgggggagcgcgtattcgaactgatggacggcccacgccaggattatggtcgggatgagcgcccgttgcagtcgggcaggattgacgttgatgacgtctccttcgcctaccgtgacgacaatctggtgctgcaaaacattacgctctccgttccgtcgcgcagctttgtggcgctggtcgggcataccggcagcggcaagagtaccctcgccagcctgctgatggggtattacccgcttacacagggagacattcgccttgacggtcgttcgctgtcaacgctgagccacggggttttacgtcagggagtcgcgatggtgcagcaggacccggtggtgatggcggatacgttcctggcaaacgtcacgctggggcgcgatatttctgaggaacaggtctggcaggcgctggaaactgtgcaactggcggagctggcgcgtagtctgagcgagggtatccacacccggctgggcgagcagggcaataatctgtccgtcgggcagaaacagctgctggcgctggcgcgggtgctggttgatacgccgcaggttctgattctggatgaagccaccgccagcattgactccggtactgagcaggcgattcagcaagcgctggcggcagtgcgtgaacacaccacgttggtggtgattgcacatcgcctgtcaaccattgttgatgcggacaccattctggtgctgcatcgcgggcaggcggtcgagcgcggtacgcatcaacaactgcttgaagcgcaagggcgttactggcagatgtaccaactacagcttgccggtgaagagctggcggccagcgcgcgtgaggaatcgctcagcgcctga

SEQ ID NO: 71580 - DNA, 1773 bp, Citrobacter koseri
gtgcgattatttgctcaattaagctggtacttccgtcgggagtggcgtcgctatctcggcgccgtggccttgcttatcattatcgctgtccttcaactgatcccgcccaaagtggtcgggatcgttgtggatggcgtcactgcgcaacatttcactaccggtcaggtattgatgtgggtgggcacgatggccatgattgcggtaatcgtctatttgttgcgctatgtctggcgcgtgctgctgttcggcgcctcttatcaactggcggttgaactgcgtgaagattactaccgccagctcagtcgtcagcatcctgaattttatctgcgacatcgcaccggcgacttaatggcgcgcgcgactaacgacgtcgatcgtgtcgtctttgccgccggggaaggggtgctcacgctggtggattcgctggtgatgggctgcgccgtgctgatcgtgatgtcaacgcagctcagttggcaactgacgctgttcgcgctgctgcctatgccgattatggcgctgatgatcaagcgctacggcgaccgtttgcataaccgcttcaaactggcacaggcggcattttccagcctgaacgatcgtacccaggagagcctgaccagcattcgcatgatcaaagcttttggccttgaagatcgacagtcgtcgctgtttgcggcggacgcggaagataccgggaagaaaaacatgcgggtagcgcgtatcgacgcccgttttgatcccacgatttatattgccatcggcatggctaatctgctcgccatcggcggcggaagctggatggtagtgcacggtacgctgacgcttggggaactgaccagctttatgatgtacctcgggctgatgatctggcctatgttagcgctggcctggatgtttaacattgtggaacgcggtagcgcagcgtacagccgtatccgcgcgatgctggcggaagcgccggtcgtcaacgacggaatggagacggtgccggaaggtcggggagcgctgacggtctccattcgtgaattcagctacccgcaaaccgcgcatccggcgctggaaaatgtacaattccagcttgagccagggcagatgctggggatctgcgggccgacgggcgcggggaaaagcactcttctttcgcttattcagcgccatttcgatattacgcagggggatatccgttttcatgatattccgctgacgcgcttgcagcttgatagctggcgcagtcgcctggcggtcgtcagccagacgccattcctgttctccgacacggtcggcaataacatcgcgctggggcgcccaaacgcgacgcaggaagagattgaacaggtggcgcggctggccagcgtgcatgaggatattttgcgtctgcctcaaggatatgacaccgaagtgggcgaacgcggcgtcatgctgtccggcgggcaaaaacagcgcatttctattgcgcgcgcgttactgctcaatgcggaaatcctgattctggatgatgcgctgtcggcggtggatggccgtaccgaacaccagattctgcataatttacgccagtggggagaggggcgcaccgtgattattagcgcgcaccgcttatccgctctgacggaagccaacgagattatcgtgatgcagcatggccatatcgcccagcgtggcgatcacgatgaattagtgctgcaaacgggctggtatcgcgatatgtatcgctatcagcaactggaggcggcgctgactgacgctcctgaaatcaacgaggagacggcagatgcgtag

SEQ ID NO: 71581 - DNA, 459 bp, Citrobacter koseri
atgttagataaaattgaccgtaagctgctgcttttgttgcagcaggactgcaccctctctttgcaggcgctggccgatgccgttaatctgaccaccacaccctgctggaaacggctgaaacgtctggaagacgacggcattctcctcggtaaagtcgcgctgctggacccagagaaattgggtctggggttaacggcgttcgtactgatcaaaacccagcatcacagcagtgaatggtacagccgcttcgtgacggtggtcaccgaaatgccagaagtgttggggttctggcgtatggccggggaatacgactatctgatgcgggttcaggtagcagatatgaagcgttatgacgacttctacaaacgtctggtgaacagtgttccgggattgtcagacgtaacgtcgagctttgcgatggaacagattaagtacacaaccgctctgcctattgaataa

SEQ ID NO: 71582 - DNA, 1056 bp, Citrobacter koseri
atgatgaatagcacctgggttaaaaacgccattaatgaaattaacgctgactatcagcgttcagccgacacgcatctgatccggttgtcgctaccggcgtttccgggcatccagatctacctgaaggatgaaagcacccatccgaccggcagcctgaagcaccgtctggcgcgttcattgttcctgtatgggttgtgtaacggctggattaaagaaaacacgaccattattgaatcctcctccggttcaacggcggtttccgaagcctggttcgcccgactgctcggcctgccgtttatcgcggtaatgccttcctgcacggcaaaacgcaaaattgaacaaattgcgttttatggcggtcgctgccactttgtcgaaagcgcctgcgagatttacgccgcctctgagctgctggcgcgcgagctgaacggtcactatatggatcagttcacctatgccgaacgcgccaccgactggcgcggcaataataatatcgccgacagtattttccatcagatgcagcgtgaaccgaatccggtgccgaagcatatcgtgatgagcgcggggacaggcggcacgtcagcgacaattggccgctatattcgctgtcatgggtatgacacgcgcctgatggtggttgacccggaaaactcggtcttcctgccctactggcaggatcgcgacgctacattgcgcagcccggtgggcagcaaaattgaggggattggtcgcccgcgcgtggaaccctccttcatcccggatgtggtggacgaaatgctgcgcgtacccgacgccgccagcgtcgcgaccgcgcactggctggaaacgcagttgggccgtaaagtgggcgcctccaccggcactaatatgtggggaacgttgcagatcgcagccagaatgcgcgatgccggagagaccggttctctcgtcacgctgctgtgtgacagcggcgaacgctatctcgacacctattacaatccccagtgggttaacgatcacattggcgatttagcgccgtggcaggcggaaatagcccaactgctgaacgtccgttaa

SEQ ID NO: 71583 - DNA, 819 bp, Citrobacter koseri
atggctcgtctggctgcatttgatatggatggcacgcttttgatgccaaaccaccatctgggtcatgagacccttgcaacgctggcgcgcctgcgtgaacgcgatatcactttgacgtttgcgaccggtcggcatgtgctggaaatgcggcatattctgggggccatctcaatggatgcgtttttgataaccggcaacgggacgcgcattcattcgcaggaaggcgatatgctgcatcgccaggatctggaccccgccattgccgatcgcgtattgcaccaggcgtgggatacccgggccagtatgcacgtattcaacgataacggctggtttacggggagcgcgatccccgcgctattacaggcgcatgtctacagcgggttccactatcagatcgtggatgtcaaacgtatcccggctcaccaggtcactaagatctgtttctgtggcgatcacgatgatctgatccggctgcgtattcaactgaatgaggcgctgggcgagcgggcgaatctctgcttttccgctgtggattgtctggaagtgctgccgctcggctgtaataaaggttccgcgctggcggtattaagcgaccatttggggctgtcgctgacggaatgcatggcgtttggcgatgcgatgaacgatcgcgaaatgctggagagcgtgggacgtggtttgattatgggcaacgcgatgccgcaactgatcgctgaactgccgcatctttcagtgattggccattgtcgtaatcaggcggtctctcactttttaacgcattggctggataatccgcatctaccttattcccccgaatga

SEQ ID NO: 71584 - DNA, 1737 bp, Citrobacter koseri
atgagacttctcaaccgtttaaaacaatatcaacgtctctggcagccctcggccggagaacctcagtcggtcaccgttggggaactggcggagcgctgtttttgtagcgaacgccacgtccgtacgctactacgtcaggcgcaggaagccggctggttaacatgggaggcgcaatccgggcgaggtaagcgcggtaaactgcaatttctggtcacgccggagtcactgcgcaataccatgatggaacaagcgctggaaaaaggtcagcagcttaatgtgctggagctggcacagctggcgccaggcgaactgcgtaccatgctgcaaccgtttatgggcggtcagtggcaaaacgacacgccgaccctgcgtattccctactatcgtccgctggacccgttgcatccgggatttctgcccggtcgcgcagaacagcatcttgcgggacaaattttctccggcctcacccgctttgacaacaccagccagcgcccatgcggggatttagcacatcactgggatatctccgccgacggtatgcgctgggatttttatattcgctctaccctgcactggcataatggcgatacggtagaaactgcgcagctgcacgcgcgcctgctgatgctgcttgacctgccagccctcaataaattgtttatcagcgtcaagcgtattgaagtcacccatccgcaatgcctgacgttcattctccatcgccctgattactggctggcgcaccgtctggcaagctactgtagccacctggcgcacccgcatcagccgctgtcaggcaccggaccttttcggctgacgttatttacgccggagctggtacgcctagaaagccacgacaattaccacctttgccacccgctgctaaaggcgattgaatactggatcacgcctcagctttttgaccaggatttaggcaccagctgccgtcatccggtacagattgccattggcaatcctgaagaactggcctcacttagccaagtgagcagcggtattagcctgggattttgctacctgacgcttaaaaaaggctcgaaactcagcctgcaacaggcgcgtcgcctggtagacatcattcatcatacgtcgttattacagacgctgccggtagatgaaaatctgatcacgcccagcaacgcgctgctgccaggctgggtaatgccgcaatggaaggggctggaatccgttgaattaccgaaaaaactgacgctggtctaccaccttcccgttgagttgcacaccatggcggagcaactccagcaatatctggcaacgctcggctgtgaattaacgttgattttccacaacgcgaaaaactgggataactgcccttcgctggcaaaagcggatctcatgatgggcgacaggctgattggcgaagcgccggaatatacgcttgagcagtggctacgctgcgatcaactctggccgcatgtgctggatgcccctgctttcgcccatcttcaggccacgctggatgccttacaaacgcagcccggtgaaaacgaccgctatactgcgttacaacaggtattcacgagtctgatgaatgacgccacgcttacgccgctttttaactatcactaccgtattagcgcgccgccgggcgtcaatggcgttcaactcaatccacgcggctggtttgagtttgagaaagcatggctaccgccgccacgcggtgaagaagctggtcgcagccatccgcaggcgctaccatag

SEQ ID NO: 71585 - DNA, 696 bp, Citrobacter koseri
atgaaacgtgccgtcgttgtattcagtggaggccaggactccacaacctgtctggcgcaagcgctgcatcagtatgatgaagtgcactgcgtcacctttgattatggtcagcgccatcgcgctgagattgatgttgcacgtaatctggccttaaaactcggcgcgcgtgcgcataaggtgctggacgtaacgctgctgagcgaactggcggtcagtagcctgacgcgcgataacattcccgtaccggactataaaccggatgccgacggtattccgaatacgtttgtccctgggcgtaatattctgtttctgactctggcggcgatttacgcttatcaggtgaaagccgaagcggtgatcaccggcgtttgcgagacggatttctccggctacccggactgccgcgatgagtttgtcaaagcgctgaatcatgccgtcaccctgggtatggcgaaggatattcgctttgaaaccccgctgatgtggattgataaagccgaaacctgggcactcgctgattactggggcaagctggatctggtgcgcgaagagacgctgacctgttataacggcatcaaaggtgacggttgcgggcagtgcgccgcctgtaatctgcgcgccaacggcctgaaccattatctggcggataaaccggcagtgatggcggcaatgaagcagaaaacagggttaaagtga

SEQ ID NO: 71586 - DNA, 399 bp, Citrobacter koseri
atgcaaacacaaatcaaagtccgtggttatcaccttgatgtttatcagcacgttaataatgcccgctatcttgagtttcttgaagaagcacgctgggatgggctggaaaacagtgacagctttcaatggatgacggcccgcaacatcgcttttgtggtggtgaatattaatattaactaccgtcgccctgccgtgctgagcgatctgctgaccgtcaccagtcaggtgcagcagttaaacgggaagagcggcattttaagccaggtcattacgcttgagccggaagggcaggttgtggtggacgcgcagattacttttgtctgtattgatttgaaaacgcagaaagcattgccgctggaaggtgagttacgcgagaaactggagcagatggtgaagtaa

SEQ ID NO: 71587 - DNA, 375 bp, Citrobacter koseri
atgaaacatggaatcaacgcactgctggtcacgatgactctggcctgcgcaggcatgacgcacaacgcgctggctgccggaacggtagagaaaaatcaggcggtacaaacaaaggcggattcgtctgcgtccgcgcagactaaagcctccgtacctgcaaaggccagcgatgatgaaggcgcgagggtcagtatcaacacggcttcagcggaagatctggcgcgggtgatgaatggcgtcgggctgaaaaaagcgcaggcgatagtcaactatcgggaagagtatgggccgtttaaaacggtggatgatttaaagcaggttccggggatggggagttcgctggtggaacgcaatctggcggtgctgacgctgtaa

SEQ ID NO: 71588 - DNA, 1881 bp, Citrobacter koseri
atgatggacagcttacgcacggctgctaacagtctcgtgctcaagattattttcggtatcattatcgtgtcgttcattttgaccggcgtgagtggttacctgattggcggaagcaataactacgccgcaaaagtgaatgaccaggaaatcagccgctcgcagtttgagaatgcgtttaacagcgaacgtaatcgtatgcagcagcagctgggcgatcagtattctgaactggcggcgaatgaaggctacatgaaaacgctgcgtcagcaggtactgaatcgtcttatcgatgaagccttgctggatcaatacgcgcatgagcttaaactcagcatcagcgacgaacaggttaagcaggccatcttttcaacggcggctttccaggttgacggcaaatttgataacaaccgctacaacgcgattgtgaatcagatggggatgacagccgatcagtatgctcaggcattgcgtaaccagctcaccacccagcaactgattgctggcgttgccggtactgatttcatgctgaaaggtgaaacggacgagctggcggcgttagtcgcgcagcagcgtgtggtgcgtgaagcgacgattgacgtaaacgcactggctgcgaagcagcaggctaccgatcaggaagtgtccagctactacgagcagaacaagaaccgctttatgaccccggagcagttccgcgtgagctacatcaagctggatgcggctgccatgcaggaaacggtcaacgatacggatatccagtcttactatgaccagcatcaggatcagttcacccagccgcagcgtaaccgttacagcgtcattcagaccaaaacggaagatgaagcgaaagcggtgctggacgcgctgaacaaaggcggtgattttgccgcgctggcgaaagagaaatccgcagatattatctctgcgcgcaacggcggcgatatgggctggctggaagacgccaccacgccggacgaactgaaaaatgccggtctgaaagaaaaaggccagctgtctggcgtgattaaatcctctgttggcttcctggtcgcgcgtctggatgatgttcagcctgcgaaagtgaagccgctgagcgaagcgcgtgatgacattgccgcgaaagtgaagcaggaaaaagcgctggatgcctattacgcgctgcaacaaaaagtcagcgatgcggcgagcaacgataccgaatctctggcgggcgctgaacaggccgctggcgtgaaagcggttgaaaccggctggttcagccatgacaacctgccagaagagctgaattttaaaccggttgccgatgctatcttcaacggtggtctggttggcgagaacggtacgccgggcagcaactccgatatcatcaccgtggatggcgaccgcgcattcgtgctgcgcatcagcgagcataaacctgaagcggttaagcctctggctgacgtgaaagagcaggtggctgcgctcgttaagcacaacaaagcagagcagcaggcaaaactggatgctgacaaactgctggttgagctgaaagcgggtaaaggagcaaaaggagcagaagcgatgaaagcggccggtctgagctttggcgaagcgaaaacgctgagccgtaccgggcaggacccggtaagccaggctgcgtttgcgctgggtctgccagagaaagataagccgagctatggcgtcgctaacgatatgcagggcaacgttgtgctgctggcgctggacgacgtgaaagcgggctctatgccggaagagcagaaaaaagcgatggttcagggtattacccagaataacgcgcagattacctttgaagcgctgatgagtaacctgcgtaaagcggcgaaaatcaaagtcggcgatgcgctggaacagcagtaa

SEQ ID NO: 71589 - DNA, 273 bp, Citrobacter koseri
gtgaataaatctcaactgatcgacaaaattgctgcaggggctgatatctctaaggctgcggctggacgtgcgttagatgcaattattgcttctgtcactgaatcactgaaagaaggtgatgatgtagcgctggtaggttttggtacttttgctgttaaagagcgtgctgcccgtactggtcgcaacccgcaaacaggtaaagagatcaccatcgccgccgctaaagtgccgggtttccgtgcaggtaaagcgctgaaagacgcggtaaactaa

SEQ ID NO: 71590 - DNA, 2355 bp, Citrobacter koseri
atgaatcctgagcgttctgaacgcattgaaatccccgtattgccgttgcgcgatgtggtggtttatccgcacatggtcatacccttatttgtagggcgggaaaaatctatccgttgtctggaagcggctatggaccatgataaaaaaatcatgctggtcgcccagaaagaagcatcaacggatgagccgggtgtaaacgatcttttcaccgtcgggaccgtggcctcaattttgcaaatgctgaaactgcctgacggtactgtcaaagtgctggttgaggggttgcagcgcgcgcgtatttctgcgctgtcagataacggcgaacacttttccgctaaggcggaataccttgaatcgccagcgattgatgagcgcgagcaggaagtgctggtgcgcactgccatcagtcagttcgaaggctacatcaagctgaacaaaaaaatcccaccggaagtgctgacgtcgctcaatagcattgacgatcctgcgcgtctggcggacaccatcgcagcccatatgccgctgaaactggcggataagcagtccgtgctggagatgtccgacgttaacgaacgtctggaatatctgatggcgatgatggaatctgaaatcgatctgttgcaggttgagaagcgtattcgcaaccgcgttaaaaagcagatggagaaatctcagcgtgagtactatctgaatgagcaaatgaaagccattcagaaagaactgggcgagatggacgacgcgccggatgaaaacgaagcgctgaagcgtaaaatcgatgcggcaaaaatgccgaaagaggcaaaagagaaagcggaagcagaattgcagaagctgaaaatgatgtctccgatgtcggcggaagcgacggttgtacgcggctacatcgactggatggtgcaggtgccgtggaacgcgcgtagcaaggtcaaaaaagacctgcgtcaggcacaggaaattctcgacacagaccattacggtctggagcgtgtgaaagatcgcatccttgaatatctcgcggtacaaagccgtgtaaacaaaatcaaagggccgatcctgtgtctggttgggccgccgggggtaggtaaaacctctctgggccagtccatcgccaaagcgaccgggcgtaaatatatccgtatggcgctcggcggcgtgcgtgatgaagcagaaatccgcggccaccgccggacatatatcggctctatgccgggtaaactgatccagaaaatggccaaagtgggcgttaaaaacccgctgttcctgctcgatgagatcgacaaaatgtcttccgacatgcgtggcgatccggcctctgcgctgcttgaggtgctggaccctgagcagaacgtggcgttcagcgatcactacctggaagtggattacgatctcagcgacgtgatgttcgttgccacctccaactccatgaacattccggcgccactgctggatcgtatggaagtgattcgtctgtccggttataccgaagacgagaagctgaacattgctaaacagcacctgctgccgaaacagatcgagcgtaacgcgctgaagaaaggcgagctgacggttgaggatagcgccattatcggcattatccgttactacacccgtgaagcgggcgtgcgtagcctggagcgtgaaatctccaaactgtgtcgcaaagccgtgaaacagctgctgttggataagtcgctgaaacacattgtgatcgatggcgataacctgcatgactacctcggcgtacagcgctttgactatggccgcgcggacaacgaaaaccgtgttggccaggtaacgggtctggcatggacggaagtgggcggcgacctgctgaccatcgaaaccgcctgtgtgccgggtaaaggcaaactgacttacaccggttctctcggtgaggttatgcaggaatctattcaggctgcgctgaccgtggtgcgtgcgcgtgcggaaaaactgggtattaatccagacttttacgaaaaacgcgacatccacgttcacgtaccggaaggggcgacgccgaaagacggcccgagcgccggtattgcgatgtgtaccgcgctggtctcctgcctgacgggtaatcctgttcgcgctgatgtggcgatgaccggggaaattaccctgcgaggccaggtactgcctatcggcggcctgaaagagaaactgctggcggcgcaccgtggcgggatcaaaaccgtgttaattccgtttgagaataaacgcgatctggaagagattccagacaacgttattgccgatctggacattcatccggtgaaacgcattgaggaagttctgactcttgcgttgcaaaatgagccgtccggcatacaggttgtcaccgcaaaatag

SEQ ID NO: 71591 - DNA, 1275 bp, Citrobacter koseri
atgacagataaacgcaaagatggctcgggcaaattgttgtactgctctttttgcggcaaaagccagcatgaagtgcgcaagctgattgccggtccatccgtgtatatctgcgacgaatgtgttgatctatgtaacgacatcattcgcgaagagattaaggaagtggcaccgcaccgtgaacgcagtgcgctgccgacgccacatgaaattcgcaaccatctggacgattatgttatcggccaggagcaggcgaaaaaagtgctggcggtcgcggtatacaaccactacaaacgtctgcgcaacggcgacaccagcaatggcgttgagttgggcaaaagtaacattctgctgatcgggccgaccggttccggtaaaacgctgctggccgaaacgctggcgcgtctgctggacgtaccgttcaccatggcggatgccaccaccctgaccgaagccggttatgtgggcgaagatgttgagaacatcattcagaagctgttgcaaaaatgcgattacgatgtgcagaaagcgcagcgcggtattgtctacatcgatgaaatcgacaagatttcccgtaagtctgacaacccgtccattacccgtgacgtttccggtgaaggcgtacagcaggcgctgttgaaactgatcgaagggacggttgccgccgttccgccgcagggaggacgcaagcatccgcagcaggagttcttgcaggttgatacctctaagatcctgtttatctgcggcggcgcgttcgccggtctggataaagtgattgctaaccgtgttgaaaccggttccggcattggttttggcgcaacggtcaaagcgaaatccgacaaggccagcgaaggcgaactgctggcgcaggttgagccggaagatctgatcaaatttggtctgattcctgagtttattggtcgtctgccggttgtggcgacgctgaatgagctgagtgaagaagcgctgatccagatcctgaaagagccgaaaaacgccctgaccaaacagtatcaggcgctgtttaacctggaaggcgtcgatctggaatttcgtgacgaagcgctggatgctatcgcgaagaaagcgatggcgcgtaaaaccggcgcccgtggtctgcgttccatcgttgaagcggcgctgcttgataccatgtacgatctgccttctatggaagacgtcgaaaaagtggttatcgacgagtccgtcatcggcggtcagagcaagccgttgctgatttacggcaagccggaagcgcagcaggcatatggtgaataa

SEQ ID NO: 71592 - DNA, 624 bp, Citrobacter koseri
atgtcatacagcggcgaacgagataactttgcaccccatatggcgctggtgccgatggtcattgaacagacctcacgtggtgagcgctcttttgatatctattctcgtctacttaaggaacgtgtcatttttctgactggccaggtcgaagaccatatggctaacctgattgtggcgcagatgctgttcctggaagcggaaaacccggaaaaagatatctacctgtacattaactccccaggcggggttatcaccgcagggatgtctatctacgacaccatgcagtttattaagccggacgttagcacgatttgtatgggccaggcggcttctatgggcgcgttcctgctgactgctggcgcaaaaggcaaacgtttctgcctgcctaactctcgcgtcatgattcaccagcctctcggcggttatcagggccaggcgacagatattgaaattcatgcccgtgaaatcctgaaggtgaaagggcgcatgaatgaacttatggcgcaccatacgggtcagtctcttgagcagattgaacgtgataccgagcgcgaccgcttcctctccgcgtctgaagcggtggagtacggtctggtcgactcgattttgacccatcgtaattga

SEQ ID NO: 71593 - DNA, 1299 bp, Citrobacter koseri
atgcaagtttcagttgaaaccactcaaggccttggccgccgtgtaacgattactatcgctgctgacagcatcgagaccgctgtgaaaagcgagctggtcaacgtagcgaagaaagtgcgtattgacggcttccgcaagggcaaagtaccgatgaatgttgttgctcagcgttatggcgcttctgttcgccaggacgttctgggtgacctgatgagccgtaacttcgttgacgcgatcatcaaagaaaaaatcaacccggctggcgcaccgaactatgttccgggcgaatacaaactgggcgaagacttcacctacgctgtagaatttgaagtctacccggaagttgaactgaccggtctggaatccatcgaagttgaaaaaccggttgttgaagtgaccgacgccgatgttgacgtgatgctggacaccctgcgtaaacagcaggcaacctggaaagacaaagacggcgctgctgatgcagaagaccgtgtaaccatcgacttcaccggttctgttgacggtgaagagttcgaaggcggcaaagcgtctgacttcgtactggcgatgggccagggtcgtatgatcccgggctttgaagacggtatcaaaggtcacaaagcaggcgaagagttcactatcgacgtgaccttcccggaagaatatcacgctgaaaacctgaaaggtaaagccgctaaattcgctatcaacctgaagaaagttgaagagcgcgagctgccggaactgaccgaagaattcatcaagcgtttcggcgttgaagatggttctgttgccggtctgcgtactgaagtgcgtaaaaacatggaacgcgagctgaaaggcgctgtgcgtaatcgcgtgaagtctcaggcgattgaaggcctggtgaaagcgaacgacatcgacgttccatctgcgctgatcgacagcgaagttgacgttctgcgtcgtcaggctgcacagcgtttcggcggcaacgagaaacaagcgctggaactgccgcgtgaactgttcgaagaacaggctaagcgtcgcgttgttgtcggcctgctgctgggcgaagtgattcgcactcaggagctgaaagctgacgaagagcgcgttaaaggtctgatcgaagagatggcttctgcgtacgaagatccgaaagaagttatcgagttctacagcaaaaacaaagagctgatggacaacatgcgtaacgtcgctctggaagagcaggccgttgaagccgttctggcgaaagcgaaagtgactgaaaaagccacttccttcaacgaactgatgaaccagcaggcgtaa

SEQ ID NO: 71594 - DNA, 315 bp, Citrobacter koseri
atgatacgtgagcaaatagaagaaaaattaagggcagcgttcgaacccgtgttcctcgaagttgtggatgaaagctatcgtcacaatgttccggcaggctctgagagccactttaaggttgtgctggtcagcgatcgcttcactggcgaacgttttcttaatcgccaccggatgatttacggtacgttaacggcagaactctccacaaccgtacatgcgctggccctgcatacctataccattaaggagtgggaaggattgcaggatacgatcttcgcatcgcctccttgccgtggcgcaggaagcatcgcgtag

SEQ ID NO: 71595 - DNA, 579 bp, Citrobacter koseri
atgttaaagaaaatcctctttccattaattgctctggttatgctggcagggtgcgcaacaccgccgacaaccattgacgtatcgccgaaaatcacactgccgcaacaagatccaagcctgatgggcgttactgtgagcatcaacggcgccgaccagcgtcaggatcaggcgctggcgaaagttacgcgtaataaccaactggttactctgaccgcctcccgcgatctgcgcttcctgctgcaagaagtgctggaaaaacagatgaccgcacgcggttatatggtggggccgaacggcgctgtgaacctgcaaatcatcgtaaatcagctgtatgccgatgtatctcagggtaacgttcgctacaacatcgccaccaaagcggatatcgccatcatcgcgacggcggcaaacggcaacaagatgacgaaaaactaccgtgcgagctactctgttgaaggcgcattccaggcgtccaaccagaatatcgccaacgcggttaacagcgtcctgaccgacaccatcgctgatatgtctcaggacaccagcattcacgaattcattaagcagaacgcacgttaa

SEQ ID NO: 71596 - DNA, 1476 bp, Citrobacter koseri
atgcccaaccaatatttacgtatttttcagcaaccgcgttcagctatcctgttgattctggggtttgcatcaggtttacccctcgcgctcacctccggcacgctacaggcctggatgaccgttgagaatatcgatctcaaaaccattggtttcttctctctggtgggccaggcctacgtctttaaattcctctggtctccggtcatggatcgttacacgccgccttttttaggtcgtcgtcgcggctggctgattaccacgcagattctgctgctgctcgccattgcggcgatgggttttctggaacccggcacacaattacgctggatggcggcgctggcggttatcatcgccttctgttccgcatctcaggacattgtctttgacgcgtggaaaacggatgttctgcctgcggaagaacgcggcaccggggcggcgattagcgtactgggctatcggctagggatgctggtctccggtgggctggcgctgtggctggcggatcgctggctcggctggcaggggatgtactggctgatggcggcgctgcttgtgccctgtattatcgccacgctcctggcccctgaacctgaagattccattccagtgcctaaaacgctggaacaggcggtcgccgctccgctgcgcgacttttttggccgcaacaacgcctggctgatcttgttgttaatcgtgctgtataagctgggcgatgcgttcgccatgagtctgaccaccacctttttgattcgcggcgttggttttgatgccggtgaagtcggcgtggtcaataaaacgctgggactgctggcgacgattgtcggcgcgctgtacggcggcatcctgatgcagcgcctttcccttttccgcgcgctgctgattttcggcattctgcaaggcgtttccaacgccggttactggctgctttccgtgacggacaagcatatgttcagcatggccgcagcggtcttcttcgagaacctgtgcggcgggatgggaacggcggcctttgtcgcattgttaatgacgctgtgcaacaaatcgttttccgccacccagtttgccctgctctccgcgctctctgcggtgggacgcgtgtatgtcggccccgttgccggatggtttgtcgaagcgcatggctggcccacgttttatctcttctccgtcgcagcggctgtgcctggccttctgcttctgctggtttgtcgtcaaacccttgaacacagttgggaaagcgaaagcttcatcccccgtacggaatttcgcggggcgtatggtctggcgctgctgacgctaatgatcggttgcggcctgctggcggtatggctgttgctgctgacgatgaacgccgtggactacactcgcttctccttcctgcccgaactgcttgaggcgggggtcatggtggcgatatgcggcattttgttcggcggggtgctggattatctggcgctacgcaaaacacgtcttgtgtaa

SEQ ID NO: 71597 - DNA, 948 bp, Citrobacter koseri
atgagactcaggaaatacaataaaagtttgggatggttgtcattaattgcaggcactgcattactcagtggctgtaattctgcacttcttgaccccaaaggacagattggactggaacaacgttcactgatactgacggcttttggcctgatgttgattgtcgtgattcccgccatcttgatggctgttggtttcgcctggaagtaccgtgcgagcaataaagatgcgaagtacagcccgaactggtcacactccaataaagtggaagctgtggtctggacggtgccgattctgatcatcattttccttgctgtacttacctggaaaaccactcacgctcttgagccaagcaagccgctggcgcatgacgagaagcccattaccatcgaagtggtttccatggactggaaatggttcttcatctacccggaacagggcattgcaaccgtgaatgaaatcgccttcccggcgaacactccggtttatttcaaagtgacctccaactccgtgatgaactccttctttatcccgcgtctgggtagccagatttatgccatggccggtatgcagactcgactgcatctgatcgccaacgaagccggtacctatgatggtatttccgcaagctatagcggccctggtttctccggtatgaagttcaaagctatcgccacgccggaccgcgccacattcgaccagtgggttgctaaagctaaacagtcaccgaacaccatgagcgacatggctgcgttcgagaaagtggctgcgccaagcgaatacaaccaggtggaatatttctccaacgtgaaaccggatttgtttaaagacgtcattaacaaatttatggctcacggtaagagcatggacatgacccaaccggaaggtgagcacagctcgcatgaaggcatggaaggcatggacatgagccacgcggaatccgctcactaa

SEQ ID NO: 71598 - DNA, 1992 bp, Citrobacter koseri
atgttcggaaaattgacactggatgcagtcccgttccatgaacctatcgtcatggttacgatcgctgccattatcgtcgggggtctggcgcttttagccttgatcacttacttcggtaagtggacctacctatggaaagagtggcttacttcggttgaccacaagcgtcttggcatcatgtatgtcatcgtcgcaattgttatgttgatacgcggctttgccgacgccatcatgatgcgtagccagcaggcgctggcttctgcgggtgaagcgggcttcctgccgccgcatcactacgatcagatcttcaccgctcacggcgtgatcatgatcttcttcgtggcaatgccattcgttatcggtctgatgaacctggtggttccgttgcagatcggcgcgcgtgacgttgcgttcccgttcctgaacaacctgagcttctggttcaccgttgtcggcgttatcctggttaacctgtctctgggcgttggtgagttcgcacagaccggctggctggcttatccgccgctctcgggaatagagtacagtccgagtgtcggggtcgattactggatctggagtctccagctatccggtatcggtacgacgctgaccggtatcaacttcttcgtgacgattctgaagatgcgtgcgccgggcatgaccatgttcaagatgccggtatttacctgggcatcgctgtgcgcgaacatcctgattatcgcctccttcccaattctgactgtcaccgtcgcgctgctgaccctggatcgctatctgggcacccatttctttaccaacgatatgggcggcaacatgatgatgtacatcaacctgatttgggcctggggccacccggaagtgtacatcctggttctgccggtcttcggggtgttctccgaaatcgccgcaaccttctcgcgtaaacgcctgtttggttacacctcgctggtttgggcgaccgtgtgtatcaccgttctgtcgttcatcgtttggctgcaccacttcttcaccatgggtgcgggtgcgaacgtaaacgccttcttcggtattaccacgatgattatcgcgatcccgaccggggttaagatcttcaactggctgttcaccatgtaccaggggcgtatcgtcttccactcagcgatgctgtggacgatcggctttatcgtgaccttctcggtcggcggtatgactggcgttctgctggcggttccgggcgcggacttcgttctgcacaacagcctgttcctgattgcgcacttccataacgttatcatcggcggtgtggtcttcgggtgcttcgccggtatgacctactggtggccaaaagcattcggcttcacgctgaacgagacctggggtaaacgcgcattctggttctggatcatcggcttcttcgtggcgtttatgccgctgtacgtgctgggcttcatggggatgacccgtcgtctcagccagcagattgacccgcagttccatccaatgctgctgattgccgcctgtggcgccgcgctgattgcactgggcatcctgtgccagctgattcagatcttcgtttctattcgcgaccgcgagcagaaccgcgacctgaccggcgacccgtggggcgcgcgtacgctggagtgggcaacctcttctccgcctccgttctataactttgccgttgtgccgcacgttcacgagcgtgatgccttctgggaaatgaaagaaaaaggcgaagcgtacaaacagcctgcgcattatgaagaaattcatatgccgaaaaacagcggtgcgggcatcgttatcgccgccttctccactatttttggtttcgccatgatctggcatatctggtggctggcgattgcaagcttcgcaggcatgatcatcagctggattgttaagagctttgacgaggacgtggactactacgtaccagtcccggaagtcgaaaaactggaaaaccagcatttcgatgagatttctaaggcagggctgaaaaatggcaactga

SEQ ID NO: 71599 - DNA, 621 bp, Citrobacter koseri
atggcaactgatactttagcgcaaacgcacgcgactgcccacgcgcacgaacacgggcaccacgatgcaggccagaccaaaatcttcggattttggatctacctgatgagcgactgcattctgttctctattctgttcgcaacctatgccgttctggtgaacggcaccgcaggcggcccgacaggtaaggacatttttgaactgccgttcgttctggttgaaactttcctgctgttgttcagctccatcacctacggcatggcggctatcgccatgcacaaggataacaagagccaggttgtctcctggctggcgttgaccttcttgttcggtgccggatttatcgggatggaaatctacgaattccatcacctgattgttgaaggcatgggcccggatcgcagcggcttcctgtctgcgttcttcgcgctggtcggtacgcacggtctgcacgtcacctccggtcttatctggatggcggtgctgatggtgcagatcgcccgtcgcggcctgaccagcactaaccgtacccgcatcatgtgcctgagcctgttctggcacttcctggatgtggtgtggatctgtgtgttcactgttgtttatctgatgggggcgatgtaa

SEQ ID NO: 71600 - DNA, 330 bp, Citrobacter koseri
atgagtcattctaccgatcacagcggcgcgtcccacggcagcgtaaaaacctacatgacaggttttattctgtcgatcatcctaacggtcattccgttctggatggtgatgacgggtacaggttccccggccgtgattctggggactatcctggcgatggcagtggtgcagattctggtgcatctggtgtgcttcctgcacatgaatacgaaatctgacgaaggctggaacatgacggcctttgtctttaccgtgctgatcattgccattctggtggtgggctccatctggattatgtggaacctgaactacaatatgatgatgcactaa

SEQ ID NO: 71601 - DNA, 891 bp, Citrobacter koseri
atgatgtttaagcaatacctgcaagtaacgaaaccaggcatcatctttggcaacctgatctcggtgattgggggattcctgctggcttctaaaggcagcatcgactatcccctgtttatctatacgctggtcggggtgtcactggttgtggcgtcgggttgtgtatttaacaactacatcgacagggatatcgacaggaagatggaaaggaccaagaatcgggtgctggtcaaaggcctgatttctcctgctgtctcgctggtgtacgccaccttgctgggtattgctggctttatgctgctgtggtttggcgcgaatcctctggcctgctggctgggggtgatgggcttcgtggtgtatgtcggcatttatagtctgtacatgaaacgccactccgtttacggcacgctgattggttctctctccggcgctgcgccgccggtgattggctactgcgccgtaacgggcgagttcgacagcggcgcgctgattctgctggcgatctttagcctgtggcagatgccgcactcttacgccatcgcgattttccgcttcaaggattatcaggctgccaacattccggttctgccggtggtgaaaggcatctcggtggcgaagaaccatatcacgctgtacatcatcgccttcgccgttgcgacgctgatgctctccctgggcggctatgccggatacaaatatctggtggtcgcggcagccgtgagcgtctggtggctcggtatggccctgcgcggttacaaagtggaagatgacaaagtctgggcgcgtaagctgttcggcttttccatcattgccatcactgcgttaagcgtgatgatgtccgtcgactttatggtgccggactcacacagcctgctggcttcggtctggtaa

SEQ ID NO: 71602 - DNA, 1365 bp, Citrobacter koseri
atgaacgattacaaaatgacgccgggtgagttgcgcgccacctggggtttagggactgtattttctttgcgcatgcttggcatgtttatggtcctgccggttctaaccacctatggtatggcgcttcagggcgccagcgaagccttgatcggcattgctatcggtatttacggcctggcgcaagccgttttccagatcccctttgggttactctcagaccgcgtcgggcgtaagccgttaattatcggcggtctggccgtgttcgtgctgggtagcgtgatcgccgcgctgtctgactccatctgggggattattcttggccgcgcgctgcaaggctccggcgcaatcgccgccgccgtcatggcgctgctgtctgacttaacccgcgagcaaaaccgaaccaaagcgatggcgtttatcggcgtcagttttggtattaccttcgctattgcgatggtgcttgggccgatcgtcacccacaaactggggctgaacgccctgttctggatgattgccgcactcgccgcgctcggcattgccctgaccgtttgggttgtccccaacagcacaacccacgtattgaaccgtgaatccggcatggtgaaaggcagtttcagcaaagtgctggccgaacctaagctgttgaagcttaacttcggcatcatgtgtctgcatattctgctgatgtcgaccttcgtcgccctccccggccagcttgccgctgccggtttccccgccgccgaacactggaagatttatctggtcacaatgctgatctcatttggctccgtagtcccgttcattatctacgccgaagtcaaacgccggatgaagcgggtctttctgctgtgcgtcgcgttgatattgattgccgaagtcgtgctgtggggcgcaggcgtgcacttctggggattaattgccggggtacagctgttcttcctcgcttttaacctgatggaagccctcctcccctcgctgatcagcaaagagtctcctgctggttataagggcaccgcgatgggcgtttactccaccagccagttcctcggcgtcgcgattggcggctcgctgggcggctgggtgaatggtctgttcgacggtcaggcggtatttctggctggcgcattgctgaccgtcgtctggctggcggtagcaagtacgatgaaagaaccgccgtatgtcagcagcttacgcgtggaaattccgccggagattgccgccgatgacgcgctgaaacagcgtttgctggcgactgaaggtgtgagtgaggtactgatcgcagagaaagagcattccgcctatgtgaagatcgacagcaaagtgaccaaccgttttgaggttgagcaggcgatcaggctggcgtga

SEQ ID NO: 71603 - DNA, 492 bp, Citrobacter koseri
atgccatctttcgatattgtctctgaagtcgatcttcaggaagcgcgtaacgcagtagataatgcgactcgcgaagttgaatcacgctttgattttcgtggcgttgaggccacgtttgaattaaacgacgcgaacaaaaccatcaaagtactgagcgaatcggatttccaggtgaatcagctactggatattctgcgcgcgaagctgctcaagcgcggcattgaaggcagttcgctggatgtgccggaagcgttcgtccacagcggtaaaacctggtttgtggaagcgaagctgaagcagggcattgaaagcgcggttcagaagaagatcgtgaagctgattaaagacagcaagctgaaagtgcaggcgcaaattcagggggaagagatccgtgtgaccggaaaatcccgtgacgatctgcaatccgtcatggcgctggtgcgcggcggggatttgggacagccgttccagttcaaaaacttccgcgattaa

SEQ ID NO: 71604 - DNA, 912 bp, Citrobacter koseri
atgaaaattaccgtactgggatgcggagccttagggcaactttggcttacagcgctgtgcaaacatggacatgaagtacagggttggctgcgcgtaccgcaaccctattgcagcgtgaatctgatagagacggacggttcaatatttaacgaatccctgacggcgaacgatcctgattttctggccaacagcgatctgctgctggtcacgctgaaagcctggcaggtctacgatgccgtaagaggtctggtcgccactctgcctgaaaccacgccgatcctgctgattcacaacgggatgggcacaatcgaagagttgcaaaacatcccgcagccgttactgatgggcaccacgacgcatgccgccagacgcgacgggaatgtcatcattcatgtcgccaacggcactacccatattggcccggcgcgtgagcaggacggggactacagctatctggccgatattttgcagggcgtgctgcctgacgtcgcctggcacaacaacattcgcgcagagatgtggcgcaaactggcggtaaactgtgtgattaatccccttaccgcgctatgggactgccccaacggcgaattacgccaccacccggaagcggtaatggcgatatgtcaggaggtcgctgcggttatcgagcgcgaaggacaccatacgtcggcggacgatttacgttattatgttgatcaagtgattgagagtacggcagaaaatatctcgtctatgttgcaggacatgcgtgccctgcgtcataccgagatcgactatattacgggttatttgttaaaacgcgcccgcgcgcatggcatcgccgtcccggaaaatgcccgtctgtttgaaatggtaaagcgaaaggagagtgagtatgagcgcatcggcactggtatgcctcgcccctggtag

SEQ ID NO: 71605 - DNA, 591 bp, Citrobacter koseri
atgagcgcatcggcactggtatgcctcgcccctggtagtgaagagaccgaagcggtcaccactatcgatctgctggttcgtggcggtattcaggtcacgaccgcgagcgtcgccagcgacggaaatctcaccatagtctgttcgcgtggcgtaaaactgctggcggatgcgccgctggtcgaggtggccgacggcgattacgacatcattgtattgcctggcggcattaagggcgcggagtgttttcgcgacagcccgttgctggtcgaaaccgttaagcagttccaccgttccgggcgtattgtcgccgcgatttgcgcagcggccgccacggttctcgttccgaacgatatctttcccatcggcaacatgaccggcttcccggcgttgaaagacaacattcccgccgaacagtggcaggataaacgtgtggtgtgggacccgcgcgtgaagctgctgaccagccaggcgccaggaacgtcgattgactttggactgaaaattatcgatctgctggttggccgtgaaaaagcccatgaagtggcgtcacagctggtgatggcggcaggaatttataattactacgaatag

SEQ ID NO: 71606 - DNA, 1449 bp, Citrobacter koseri
atgaagtttatcattaaattgttcccggaaatcactatcaaaagccaatctgtgcgtttgcgctttataaaaattctgaccgggaacatccgtaacgtgttaaagcactacgatgagaccctcgccgttgttcgccactgggataacattgaagttcgcgccaaagatgaaaatcaacgcctggcgattcgcgacgcgctgacccgtattccgggcatccaccatattctcgaagtcgaagatgtgccgttcactgatatgcacgatatctttgagaaagcgctggtgcagtatcgcgatcggcttgagggcaaaaccttctgtgtgcgcgttaaacgtcgtggtaagcatgagtttagctccattgaggtggaacgttacgtcggcggcggtttaaatcagcatattgaatcggcgcgcgtgaagctgaccaacccggatgtgacggtacatctggaagtggaagacgatcgtctgctgctgattaaaggccgttacgaaggtatcggcggtttcccgatcggcacccaggaagatgtcctgtcgctgatctccggcggtttcgactccggcgtttccagctatatgctgatgcgtcgcggctgccgcgtacactactgcttctttaaccttggcggcgcggcgcatgaaatcggcgttcgccaggtggcgcattacctgtggaaccgctttggcagttcgcatcgcgtgcgttttgtcgccatcaactttgaaccggtggtcggcgagatcctcgaaaaagtcgatgacggtcagatgggcgtggtgctgaagcgcatgatggtgcgcgcggcgtcgaaagtggcggagcgctacggcgtccaggcactggtgacgggtgaagcgctggggcaggtttccagccagacgctgactaacctgcgtcttatcgacaacgtttccgatacgctgattctgcgcccgctgatctcttacgacaaagagcacatcatcaacctggcgcgccagattggtacggaagattttgcccgcacgatgccggaatactgcggcgttatctcgaaaagcccgacggtgaaagcgatcaaggcgaagattgaagcggaagaagagcacttcgactttagcattctcgataaagtggttgaggaagcgagcaatgtcgatattcgcgaaatcgcccagcagaccgggcaggacgtggtggaagtggaaaccgtcagcggctttggcccgaacgacgtgattctggatattcgctccgttgatgagcaggatgacaaaccgctgaaaatcgaaggcgtggatgtggtttctctgccgttctacaagctgagcacgaagtttggcgatctcgaccagagcaaaacctggctgctgtggtgtgagcgcggcgtgatgagccgtttgcaggcgctctatctgcgtgagcagggcttccagaatgtgaaggtgtatcgtccgtaa

SEQ ID NO: 71607 - DNA, 243 bp, Citrobacter koseri
atgccgaagaaaaatgaggcgcccgccagctttgaaacagcgctgagcgagctggaacagattgttacccgtctggaaagcggcgacctgccgctggaagaggcgctgaacgaatttgaacgtggcgtgcagctggcgcgtcaggggcaggcaaagttgcaacaggccgaacagcgtgtgcagattctgctgtctgacaatgaagatgcatctcctgagccttttacaccggataatgagtaa

SEQ ID NO: 71608 - DNA, 900 bp, Citrobacter koseri
atggatttttcgcagcagctacaggcctgcgtcgagcaggccaaccaggcgctgagccgttttatcgcaccactgccctttcagaacactcccgtggtcgaaaccatgcagtatggcgcattattaggcggtaaacgtctgcgcccgtttctggtttacgcaacgggcaggatgtttggcgtaagcctgcccacgctggatgccccggcagccgccgttgagtgcattcatgcttattcgttgattcatgacgatttacccgcgatggacgacgacgacctgcgtcgcggtctgccgacctgccacgtcaaatttggcgaagcgaatgccattctggccggagatgccctgcaaacgctggcgttttctatcatcagcgatgccccgatgccggaagtggccgaccgcgaccgcattgctatgatttctgaactggcgaacgccagcggcatcgccggaatgtgcggtggccaggcgttggatcttgatgccgaagggaaacaggtgccgctggaggctctggagcgtatccatcgtcataaaacgggcgccctgattcgcgctgcggttcgtcttggcgcgctaagtgccggagaaatcggacgaaacgccttgccgatactcgataagtacgcagaaagtatcggccttgccttccaggtccaggatgacattctggatgtggtgggcgatactgcaacgttgggtaaacgtcagggtgctgaccagcaacttggcaaaagtacctaccctgcacttctgggccttgagcaagcccggaataaagcccgggatctgatcgaagacgcccgccagtcgttaacgcagctggcagacctctcactcgatacctcggcactggaagcgctagcggactacataatccagcgtgataaataa

SEQ ID NO: 71609 - DNA, 1863 bp, Citrobacter koseri
atgagttttgatatagccaaatacccgaccctggcactggtcgactccacttcggagttacgcctgctaccaaaagagagtctgccgaaactctgcgacgaactgcgccgctatttactcgacagcgtcagtcgttccagcggacatttcgcctccgggctgggcacggtggagctcaccgtggcgctgcactatgtctataacactccgtttgaccagttaatctgggacgtggggcatcaggcttatccgcacaaaattctcaccgggcgtcgggataaaataggcaccattcgccagaaaggcggtttgcaccccttcccgtggcgcggtgaaagcgaatacgacgtactgagcgtcggccactcctctacctccattagcgcaggcattggcattgcggtcgccgcagaaaaagaaggcaaagaccgccgcaccgtttgcgtcattggcgacggggcgatcaccgccgggatggcgttcgaagcgatgaaccacgcgggcgatatcaagccggacatgctggtcattctcaacgacaacgaaatgtcgatctcggaaaacgtcggcgcgctgaacaaccacctggcgcagctgctttccggcaagctctactcgtccctgcgtgaaggcgggaagaaagtgttctccggcgtgccgcctatcaaagagctgctcaaacgcaccgaagaacatatcaaaggcatggtcgtgccaggcacgctgtttgaagagctgggctttaactatatcggcccggtcgatggtcacgacgtgctggggctgattaccacgctgaagaacatgcgcgatctgaaaggcccgcagttcctgcatatcatgaccaaaaaaggtcgtggctatgaaccggcggaaaaagatccgatcaccttccacgcggtgccaaaattcgatccgtccagcggctgcctgccaaaaagcagcggcggcctgccgagctattcaaagatcttcggcgactggctgtgcgaaaccgccgccaaagacagcaagctgatggcaatcaccccggcaatgcgcgaaggttccggcatggtggagttttcacgtaaattccccgaccgctactttgacgtggcgattgccgagcagcatgcagtgacctttgccgccggtctggcgatcggtggttataagccgatcgtggcgatctactccaccttcctgcaacgcgcctacgatcaggtgctgcatgacgtcgcgatccaaaaactgccggtaatgtttgctatcgaccgcgccggtatcgtcggcgctgacgggcagacgcaccagggcgcgttcgatctctcttacctgcgctgcatcccggaaatggtcattatgacgccgagcgatgaaaacgagtgccgccagatgctgtacaccggctatcactataacgatggcccaacggcagtgcgttatccgcgtggcaacgccgttggcgtggaactgacgccgctggaaaaactgccgatcggcaaaggactcgtcaaacgtcagggtgaaaaactggcgattctgaactttggtacgctactgccggaagcggcaaaagtcgccgaatccctgaacgcgaccttagtcgatatgcgctttgtgaagccgctggatgaaacgttgattctggagatggctgagcgtcacgaagcgctgatcacgcttgaagagaacgccattatgggcggcgcaggcagcggcgttaacgaagtgctgatggcgcatcgtaaagtcgttccggtactgaatatcggcctgccggacttctttatcccgcagggtacacaggacgaggcccgcgcggaactcggtctggatgccgccggaattgaggccaaaatcaaggactggctggcataa

SEQ ID NO: 71610 - DNA, 975 bp, Citrobacter koseri
atgcaatacaacaccttaggaaaaacagatctacgggtttctcgcctttgtctgggctgcatgacgttcggtgaaccggatcgcggcaatcacgcctggacgctaccggaagaaagcagccgccccatcattaagcgcgcgcttgaaggcggtattaacttttttgataccgccaatagctattccgcaggcagcagcgaagagattgtgggtcgcgcgctgcgtgatttcgcccgccgcgaagaggtggtggtcgccaccaaagtttttcatcgcgtcggcgacctgccagaaggattatcccgcgcgcaaatcctgcgttccattgatgacagtctgaaacgtctgggtatggactatgtggatatcctgcaaattcatcgctgggattacaatacgccgatagaagagacgctggaagcgctgaatgatgtggtgaaggccggtaaggcgcgctatatcggcgcctcctccatgcacgccgcacagtttgcccaggcgctggcgctgcaaaaacagcacggctgggcgcagtttgtcagtatgcaggatcattacaatctcatctatcgcgaagaagagcgcgagatgctgccgctgtgctatcacgaagggatcgcggtgattccgtggagcccgctggcacgaggacgactgacgcgcccgtggggagaagccaccgcacgttcggtatccgatgagttcggcaagacgctgtacagcgagagcgatgagaatgacgcacggattgcagagcgtctgacgggcgtcagtgaggatcttggcgcaacgcgtgcgcaggtggcgctggcatggctattgagtaaaccaggcatcgctgcgccgattatcggtacatcgcgggaagaacagctggatgagttgctcggcgcggtggatttgacgttgaagccagagcagattgccgagctggaaacgccatataaacagcatccggtggtcgggtttaaataa

SEQ ID NO: 71611 - DNA, 516 bp, Citrobacter koseri
atgaccattttgccacgccataaagatgttgccaaaagtcggctgagcctgcgtaacccgtggcacttgctggctaccgggtttggcagcggcctcagcccgattattccgggaacaatggggtcgttagcggcgatcccattctggtatctgatgacatttctgccctggcagctctactcgctggtggtgatgttggggatctgtattggcgtttatctttgccaccgaacggcgaaggatatgggcgttcacgatcacggtagcattgtctgggatgagtttatcgggatgtggatcaccctgatggcgctccctacgatggactggcagtgggttgccgccggatttgtgattttccgtattctggatatgtggaaaccctggccgattcgctggttcgaccgtaacgtacacggcggaatgggaataatggttgacgatatcgtcgcaggggttatttccgccggtctgctttatttcattgggcaccattggcccatcgggttgttttaa

SEQ ID NO: 71612 - DNA, 978 bp, Citrobacter koseri
atggcatgcggcgagttctccctgattgcccgttattttgaccgtgttagaagctctcgtctcgacgtcgaaaccggtatcggtgacgattgcgctctcctgaatattcctgaaaaacagacgctggcgatcagtaccgatacgctggtggcgggcaaccatttcctgactgatatcgatcctgccgatctggcctggaaagcgctggcggttaacttaagcgatctggcggcgatgggggccgatccggcctggctgacgctggccctgacgttgccggacgttgacgaagcgtggctggaagcgtttagcgacagcctgtttgacctgctgaattactacgatatgcagctgattggcggcgacaccacgcgtgggccgctgtcgatgacgctgggtattcatggctatgtgcccgtgggacgcgcgctcaagcgttccggggcaaaacctggcgacaggatttacatcaccggcacgccgggggacagcgccgctgggctggcgattttacaacatcgcttacaggtggcggatgcgaaagacgcagactacttgattaagcggcacctgcgcccgacgccgcgtattttgcagggacaagccctgcgcgacctggcgaatgcggcgatcgatctttccgatggcctgatttctgatttgcggcatatcgttaacgccagcggctgtggcgcgcgggtggatgtggatgcgctgcggtattctgaggcggttacccgtcatgttgatcccgggcaggcgctgcgctgggcgctttccggcggtgaagattatgaattatgcttcactgtaccggagttgaaccgtggcgcgctggatgtggcgctggggaatcttggcgtaccgtttacctgcatcggacaaatgagtgcggatgtggaaggcatcagcttcatgcgtgacggaaagcctgtcacttttgactggaaaggatatgaccattttgccacgccataa

SEQ ID NO: 71613 - DNA, 420 bp, Citrobacter koseri
gtgaaacctgctgctcgtcgccgcgctcgtgagtgtgccgttcaggcgctctactcctggcagttgtcccagaacgacatcgctgatgttgaataccagttcctggcggaacaggacgtaaaagatgtcgacgttctgtatttccgtgaactgctgtccggggtggcgactaacagcgcgtacctggacggattgatgaaaccgtacctgtctcgtctgctggaagagctgggtcaggtagaaaaagctgtgctgcgtattgcgctgtttgaactgtctaaacgtagcgatgtgccatataaagtggccatcaacgaagcgattgaactggcgaagaccttcggcgccgaagacagccacaagttcgtcaacggcgtactggacaaagcagcacctgtgattcgccccaacaaaaagtaa

SEQ ID NO: 71614 - DNA, 471 bp, Citrobacter koseri
atgaacattattgaagctaacgttgctaccccggacgctcgcgtcgccatcaccattgcgcgtttcaacaattttatcaatgacagtctgctggaaggcgcgattgacgccctgaagcgtattggtcaggtaaaagatgaaaatattaccgtggtttgggttcctggcgcgtatgaactgccgctggcggctggcgcattggcaaaaaccggtaaatatgacgcggtgattgcgctgggtacagtgattcgtggcggtaccgcgcactttgaatatgtggctggcggtgcaagcaacggcctggcgcacgtcgcccaggacagcgaaatcccggtagcctttggtgttctgaccactgaaagtattgaacaagccatcgaacgtgctggcactaaagctggcaacaaaggtgcggaagccgcactgaccgcgcttgaaatgattaatgtattgaaagccatcaaggcctga

SEQ ID NO: 71615 - DNA, 1104 bp, Citrobacter koseri
atgctggatgagttttacatggcgcgtgcgctgaagctggcgcagcgcgggcgtttcaccacgcacccgaacccgaatgtaggctgtgtgatcgtcaaagatggcgaaatcgttggcgaaggctaccatcatcgcgcgggtgaaccgcatgctgaagtccatgcgctgcgtatggcgggagacaaagccaaaggcgcgaccgcgtatgtcacgcttgaaccgtgcagccatcatggccgtacgccgccgtgctgcgatgcgttgattgccgctggcgtggcgcgggtcgttgcggcgatgcaggaccccaatccgcaggtcgcgggacgtgggctgtaccgtttgcagcaggcggggatcgacgtcagccacgggctgatgatgagcgaaacggaacagctgaacaaaggtttcctcaagcggatgcgcactggcttcccgtatgtgcagctcaagctcggcgcatcgctggatggccgcacggcgatggccagcggtgaaagccagtggattacctccccgcaggcgcggcgcgatgtgcagcgtttacgggcgcaaagccatgcgattctgaccagcagcgcgacggtgctggccgacgacccggcgttaacggttcggtggcctgaactggatgcctcaacccagactctctatccgcaggaaaacctgcgtcagccgattcgcattgtcctcgacagccaaaaccgcgtgacgccggagcaccgtattgtgcagcagccgggagaaacctggtttgcccgtacacaggacgattcccgcatctggcctgagacggttcgcagcctgcgggtgccggagcataacggtcatctggatctggtggtgctgatgatgctgttgggtaaacagcagattaacagcatctgggtggaggccgggccggtgcttgcgggcgcgctgttgcaggcgggcgtggtggacgagcttatcgtctatgttgcgcctaaactgttaggaagtgatgcgcgaggattatgtgtgctgccggggcttgagaaactgagcgaggcaccccattttaaattcaacgagatacgccatgtaggcccggatgtttgcctgcatttgattcccgcgtaa

SEQ ID NO: 71616 - DNA, 450 bp, Citrobacter koseri
atgcattgcccattctgtttcgccgtagacactaaggttattgactctcgtctcgtgggtgagggctcttccgtacgccgccgtcggcagtgtctggtctgtaatgaacgtttcactacctttgaagtggcagagcttgttatgccgcgcgtagtgaaaagtaacgatgtgcgtgaacctttcaacgaagagaagttgcgcagcggtatgctaagagcgctggaaaaacgccctgtcagctctgatgacgtcgaaatggcgttgaatcacatcaaatcacagctgcgagccaccggggaacgcgaagttcccagcaaaatgattggcaacctggtgatggagcaactgaaaaagctcgataaagtggcttacatccgctttgcctccgtctatcggagtttcgaagacatcaaagaattcggcgaagagattgctcgcctacaggattaa

SEQ ID NO: 71617 - DNA, 540 bp, Citrobacter koseri
atgacaagacgttacctaagaattctcctggtgggaagcctctttagcctgagcgcctgcgcgcagcagagcgaagttcgccagatgaaccaaagcgtcagcacgctgaatacggaaatggcgcagttaaaccaggaaaccgtgaagattactcagcaaaatatgttgaatgcgaaatccaccagcggggtctatctgctgccgggttcaaaaacgcctgcccgcctgaacagtcagatcggtacgctgcgtatgtccttggtgaatatcgcgcccaatgccgacggcacacgcgtgacgctgcgcattcagggtgagtccaacgatccgttaccggcgtttagcggtactgtcgaatacgggcagattcagggcaccacggataactatcaggaagtgaatgtccagaatcaactgattaacgccccggccagcatcctggcgccgagcgatgtggacatcccgttacaattaaacggattgacgcccgaccagttaggttttgtccgcgttcacgatatccagcctgttaatcaataa

SEQ ID NO: 71618 - DNA, 867 bp, Citrobacter koseri
gtggcatacaatatgaaaaaaacattacttgcagccggtgcagtgctggcgctctcatcgtcctttactgttaacgcagcagaaaatgacaaaccgcaatacctttcagactggtggcaccagagcgttaacgtcgtaggcagctaccatacccgtttcggaccgcagctccgtaacgatacctatctggaatatgaagcattcgcgaaaaaagactggttcgatttctacggctatatggatgcgccggtattcttcggcggtaacaccaacgcgaagggtatctggaaccacggttccccgctgttcatggaaattgaaccgcgtttctctatcgacaaactgaccggagccgacctgagctttggcccgttcaaagagtggtatttcgctaacaactacatctatgacatgggtcgtaacaagtctggccgtcagagcacctggtacatgggtctgggtactgacatcgaaaccggtctgccgatgagcctgtccctgaacgtctatgcgaagtaccagtggcagaactacctggctgataacgaaaacgagtgggacggctaccgtttcaaagtgaaatacttcgtgccactcaccgagctgtggggcggcaacctgagctacatcggtttcactaactttgactggggctccgatctgggcgactctcagtaccgtaccagcaactctatcgcatccagccacatcctggcgctgaactacgatcactggcactactctgtggtggctcgttacttccataacggcggacagtgggaaaacggcgctcagccggtatggcaatccgaaacggttaaagctaccggttggggtggctacctggttgtcggttacaacttctaa

SEQ ID NO: 71619 - DNA, 348 bp, Citrobacter koseri
atggcgattatccctaaaaactatacgcggctggaaaacggctatcgtgaaaaggcgctcaaattatttccgtgggtatgcgggcgatgctctcgcgaatttgtttactctaacctgcgcgaattaaccgtccatcatatcgatcacgaccacaccaataacccggaagacggcagtaactgggagttgctgtgtctgtactgtcacgatcatgagcattcgaaatataccgaagccgatcagtatggctcaaccgttattgccggggaggatgcgcagaaagatgtcggcgctgcgatgcataaccctttcgctaatctgaaagcgatgatggatcagaagaaataa

SEQ ID NO: 71620 - DNA, 972 bp, Citrobacter koseri
gtggcacaggaatatactgttgaacaattgaaccacggccgtaaagtctatgactttatgcgctgggactactgggctttcggcatctctggcttcctgctgattgcggccatcgtggtgatgggcgtgcgcggttttaactggggtctcgattttaccggtggtacggttatcgaaatcacgctggaaaaaccggccgaaatggacgtgatgcgcgatgcgctggaaaaagcgggctttgccgagccgctgttgcagaacttcggtagcagccacgacattatggtgcgtatgccgccgacggaaggtgaagacggcggtcaggtgctgggtagcaaggtgctgagtgtcattaacgaagccaccagccagaacgccgccgtgaagcgtattgagtttgtcgggccgagcgtgggcgccgatctggcgcaaaccggtgcgatggcgctgattgtcgcgctgatctctatcctcatttatgtcggtttccgctttgagtggcgactggcggcgggggtggttatcgcgctggcgcacgacgtgattatcaccttagggattctgtcgttgttccatattgagatcgacctgacgatcgttgcatcgttgatgtcggttatcggttactcgctgaacgacagtatcgtggtatctgaccgtattcgtgaaaacttccgcaaaattcgtcgcgggacgccttacgaaatctttaacgtgtcgttgacccagacgctgcaccgtacgttgatcacctccgggacgacgttagtggtgattctgatgctgtacctcttcggcgggccggtactggaaggcttctctctgaccatgctgatcggtgtttctatcggtacggcatcgtcgatctacgtggcctcggcgctggcgctgaagttgggcatgaagcgcgagcatatgttgcagcagaaagttgagaaagaaggggcggatcagccgtctattctgccttaa

SEQ ID NO: 71621 - DNA, 1815 bp, Citrobacter koseri
atgctggtcgtcgtgattgtcgtcggcctgctttacgcacttcccaacctgtatggtgaggatccggctgttcaaatcactggcgcgcgcggcgtcgccgccagtgagcaaacgctgatccaggtccagaaaacgttacaagaagaaaaaattaccgctaagtctgtggctctggaagagggcgctattcttgcgcgcttcgacaccaccgacatccagctgcgcgcccgtgaagcgctggttggcgtgctgggtgataaatacgtcgtggcgcttaaccttgctccggcaacgcctcgttggctggcggccattaaagccgagccgatgaaacttggccttgacctgcgtggcggcgttcatttcctgatggaagtggatatggacaccgcgttaggtaagcttcaggagcaaaatatcgatagcctgcgcagcgacctgcgtgaaaaaggcattccttataccactgttcgcaaagaagataactacggtctgagcatcacgttccgcgataacaaagcgcgtgatgaagcgatctcttatctgagcgggcgtcaccgcgatctggtgattaccagccagggcaatacggtgctgcgtgcggtcatgtctgatgcgcgtctgagcgaagcgcgtgaatatgccgttcagcagaacatcaacattctgcgtaaccgtgtaaaccaattgggcgtggctgagccggttgtccagcgtcagggtgcggatcgcatcgtcgttgagctgccgggtattcaggataccgcgcgtgcgaaagagattctgggcgctaccgcgaccctcgaattccgtctggtaaacaccaacgttgaccagtctgcggcggcatccgggcgcgtaccgggtgactcggaagtgaaacagatgcgcgaaggccagccggttgtgctgtacaaacgcgtgatcctgaccggtgaccatatcaccgactccacttccagccaggacgaatacaaccaaccgcaggttaacatctcgctggatagcgcaggtggcaacatcatgtctaacttcaccaaagacaatatcggcaagccgatggcgaccttgtttgtggagtacaaagacagcggtaaaaaagatgccaacggccgtgcggtactggtgaagcaggaagaggtgattaacatcgccaacatccagtctcgcctgggcaacagcttccgtattaccggtatcaacaacccgaacgaagcccgccagctctctctgctgctgcgcgccggtgcgctgattgcgccgattcagattgttgaagaacggactatcggcccgacgctgggtatgcagaacatcaaacagggcctggaagcgtgtctggccggtctggtggtttccattctgttcatgatcttcttctacaagaagttcggtctgattgcgacaagcgcgctggtggccaacctggtattgattgtcggtatcatgtcgctgctgccgggggccacgctgagtatgccggggattgccggtatcgtgctaacccttgcggtggcggtcgacgccaacgtactgatcaacgaacgtattaaagaagagttgagcaacgggcgtacggttcagcaggcgattgatgaaggttataaaggcgcgttcagttccatcttcgatgcgaacatcaccacgctgattaaagtcatcatcctgtacgcagtcggcaccggggcaattaaagggttcgcgattactaccggtatcggtgtggcgacgtcgatgtttaccgcgattgtcggtacgcgtgccatcgtaaacctgttgtatggcggcaaacgcatcaacaagctgtcaatctga

SEQ ID NO: 71622 - DNA, 333 bp, Citrobacter koseri
atgagcttttttatttctgatgcggtagcggcaacaggtgctccggcgcagggcagcccgatgtctctgattttgatgctggtggtgtttggtctgattttctacttcatgatcctgcgtccacagcagaagcgcaccaaagaacacaaaaacctgatgagctccatcgcaaaaggcgatgaagtgctgactaacggtggcctggtgggtcgtgtaacgaaagtagcggaatccggctacatcgttatcgcgctgaatgacaccactgaagtggttatcaaacgtgacttcgtagctgccgttctgccgaaaggcactatgaaggcgctgtaa

SEQ ID NO: 71623 - DNA, 1128 bp, Citrobacter koseri
atgaaattcgaactggatactaccgacggacgcgctcgccgtggccgcctggtgtttgatcgtggcgtagtggaaacgcctgcttttatgcctgtcggtacgtatggcaccgttaaaggcatgacgccggaagaagttgaagccaccggcgcacaaattattctcggcaacaccttccacctgtggctgcgcccgggtcaggaaatcatgaaactgcatggcgatctgcatgatttcatgcagtggaaaggcccgatcctgacggactccggcggtttccaggtgttcagcctcggcgatattcgcaagatcaccgagcagggcgtgcatttccgcaacccgatcaacggcgatccgattttcctcgatcctgaaaaatccatggagattcagtatgatctcggttccgatatcgtcatgattttcgacgaatgtacgccgtatccggcggactgggactatgctaaacgctctatggagatgtctttacgctgggcgaagcgcagccgcgaccgttttgatggtttgggcaacaaaaatgcgctttttggcatcattcagggcagcgtttacgaagatttacgcgatatctccgtcaaaggtctggtagagattggctttgatggctacgctgtcggcggtctggctgtgggtgagccgaaggaagacatgcaccgcattctggagcatgtctgcccgcaaatcccggcggacaaacctcgttacctgatgggcgtcggcaaaccggaagatctggtggaaggcgtgcgtcgcggtatcgatatgtttgactgcgttatgccaacacgcaatgcccgtaatggtcacctgttcgtgactgacggcgtggtgaaaattcgtaatgcgaagcataaaagcgacaccagcccgctcgatgccgagtgtgattgctacacctgtcgcaattattcgcgtgcctacttgcatcatctcgaccgttgcaacgaaatattgggcgcgcgactcaacacgattcataacctgcgttactaccagcgtttgatggcgggtttacgcaaggctattgaagagggtaaattagagagcttcgtgaccgatttttaccaacgtcagggtcgacctgttccacctttgaacgttgattaa

SEQ ID NO: 71624 - DNA, 1071 bp, Citrobacter koseri
atgcgcgttaccgatttttcctttgaattacccgaatccctgattgcccactatccgcagcctgagcgcagtcgttgccgcttgctgtcactggacgggccgacgggcgcgctgacgcacggtactttcaccgatctgctcgataagctcaaccctggcgatctgctggtctttaataatacccgcgtcatcccggcgcgtctgtttggccgtaaagccagcggcggcaagattgaagtactggttgagcggatgctggatgacaaacgcattctggcgcatattcgcgcttccaaagcgccgaaaccgggcgcggaactgctgttgggcgatgacgaaagcattaacgccaccatgaccgcacgtcatggcgcgctgtttgaagttgagttcaacgacgcgcgcccggttctggagattctcaacgcgatcggccatatgccgctgccgccatacatcgaccgcccggatgaagacgccgaccgtgagttgtatcagacggtctacagtgaaaaaccgggggccgttgccgcgccaaccgcaggtttgcactttgacgatccgctgctggccgcgctgcgcgaaaaaggcattgagatggcgtttgtgacgctgcacgtcggcgcggggacgttccagccggtgcgtgtggagaccattgaagatcacatcatgcactcggagtacgccgaagtcccgcaggaggtggttgatgcggtgctggcggcaaaagcgcggggcaatcggatcatcgcggtaggcaccacctcggtacgctcgctggagagtgcggcgcaggcggcgaaaaacgacctgatcgaaccgttcttcggcgatacgcaaatcttcatctacccaggttatcaatacaaagtgattgatgcgctggtgaccaatttccatctgccggaatcgacgctgattatgctggtgtccgcttttgcgggttatcagcacacgatgaatgcgtacaaggctgcggtagaacaaaattatcgcttttttagctacggggacgcgatgtttatcacgtacaatccgcaggctttgaatgagcgtgtcgggaagtag

SEQ ID NO: 71625 - DNA, 582 bp, Citrobacter koseri
atgaattttcttgcacacctgcacttagcgcatctcgccgacagctcgctttccggcaatttactggccgattttgttcggggaaacccggaggctaattttccccctgacgtggtggaagggatttatatgcatcgacggattgacgtcatgaccgataatctgccggaagtgcgtgaagcgcgggaatggtttcgcagcgaaacccgtcgtgtagcccccatcactctggatgtgatgtgggaccacttcctgtcgcgccactgggcgacaatatctcccgatttcccgttgcaggcgttcgtgggctatgcccatgcgcaagtcagcactattttgcccgactcgccgccgcgttttgtgaatctgaacgattatctgtggtcggaaaagtggctggagcgttatcgcgatatggattttatccagaatgtcctcaacgggatggcgaatcgccgcccacgcctcgatgccctgcgcgactcctggtacgatctggatgcgcactacgatgcgttagaagcgcgcttctggcgcttctacccgcgcatgatggcgcaggcgcgtcagaagtcgctttag

SEQ ID NO: 71626 - DNA, 603 bp, Citrobacter koseri
atggtactggttactcgtcaggccccggacttcacagcagccgccgtactgggtagcggtgagatcgttgaaaacttcaacttcaaacagcacaccaacggcaaagcaaccgttctgttcttctggccgatggacttcaccttcgtttgcccgtctgaactgattgctttcgacaaacgttatgaagagttccaggcgcgtggcgtagaagttgtcggcgtttcttttgactctgaattcgtccacaacgcatggcgtaacacccctgtcgataaaggcggcatcggtgcagtgaaatacgcaatggttgctgacgtgaagcgtgaaatccagaaagcctacggtatcgaacacccggaagcgggcgttgccctgcgcggttctttccttatcgacgccaacggcgtggttcgtcaccaggtggttaacgacctgccgctgggccgtaacatcgacgaaatgctgcgtatggttgacgcgttgcagttccacgaagagcacggcgaagtgtgcccggcacagtgggaaaaaggcaaagaagggatgaacgcctctccagacggcgtggcaaaatacctgactgaaaacgtcgccagcctgtaa

SEQ ID NO: 71627 - DNA, 1395 bp, Citrobacter koseri
atgaaatggatgaaagcggtagtctggagcgcgttgctgagtacggcgtggccggcgttcagccgtgacgaagccccggaaacgccgcaggattacgccaccggcatgatgctggaagcgacgggttcatcgccgtggtatcgcgtttcgctgccgctggcgctttaccaacaaagcgcctggccggatttacgcgatgtgcgggtttttaaccgccagggcgatacggtgccctttgcgctgacggcgcagaaaacgccgtctgtcacgccagagacggtggcgctgcggctttttcctctggatatgtcgccagtatcaccgcgggaaggggagcgccgaggaagcgaatcctttgtcttgcgttcaaagaccggcgtggaaattcatctggaaagcgatgacgttaacgcggttgggcagagctatttactgactctgccggaagagatgacggcggccttttcgctggcgcaactgcacctgaactggaacacgcctgcgggcaactggcaggggaaggcgtccgtttatgccagccgtgatttacgttactggcaacccgtgcaagaagacgcgccgctgatggatctgacgcgcgataacgatcggctgaaaatggacaccatcagcgccagcctgacgctctctgcggaaggccgtcgctacctgctggtgattctcgattcgcaaagtccgccgctgaccttaaacagcgtaagcgccattgcggacagcggagaaccggcgtcggagcgtattgcgctggaggcccacgcaaagaaagtgtcggaaacagaagccgtatggcgctggaatcagccgcagccgctgacgtcgctcagaattgcgctggaaaacgagggcgttttaccggttgagctggcatggcgcggcggggaaaaagaggcgtggcgtccactgacgaaaacgatcctgtaccgcctcgacgggaagcgttcggaggatattcttctttcaggtcaacaggttgaagctatccgtatgaccaccatcaacgcccgattgccggaaacgctgcctgcgctgagcggcgcgcgggacagttatcaactggtgttcaatacgcaggggaaaggcccgtatatgctggcctggggaaaccgggctgcggaaaaagccgatgttgagctggatatgctgatcccggcgtcgctgcgcaaaacgcaggatgttaacgacctgccctgggcgatgacgcagcagcgcgtaacgctgggcggtgaggcgcggctgacggcaacgtcggctgcggagcagcaaagccgctggaaaacgttactggtgtggggggcattgattgctggcgtcgcggtactgttggtgatggcgtggcggatctggcgcgaggtgaaaaaggacggcgcggcgtaa

SEQ ID NO: 71628 - DNA, 2631 bp, Citrobacter koseri
atggatgagcttttaatccttggctgcattgttttattcttcgcgctggtggtggttcccattctcgcgattgtcgcgctcaaccgcagcgcggcggttcgctttgagctggcggtgttgcgccgacgggttgagcaacttgaacagcagcgtgcgggagaagcgcctgcggtacaggtgacggcggaaccttcgctacctgcgaaagagcgtgtcgcgccatcgccgcctgatgccatcgaagcggccatacctgagccggaaaatccctgggctgcgcaggaaaccctcgcaaaaccgctcccggcgcctgcgaaaacggcgaaaccttccgcgttcggcggcgttttcacctcgctggcgcgctggtttatgcagggaaatccgctggcgaagctgggcattctgctcctctttttcggtttatccttcctgttgcgttatacggttgaacacgcgctgtttccgcttgaactgcgtcttgtcactgcggcgctgtgtgccgtagtgctgctcgcgacaggctggcgtttgcgacgcaaacagccggtctatgcgctgatcctgcaaggcggcgcgacaggcgtgctctatctgaccgtctttggcgcattccggctgtggcaaatgctgccgatgacgctggcgtttgcgctgctggtgctgatttgcgccgcaagcgtagggctggctattttgcaaaaagcgcttagcctggcgatgctggccagcctgggtggttatcttgcgccgctgctgctgtcgacgggcagcgggaactatgtggcgctgttctcgttctatctcctgctgtcggcaggcattcttgccataagcgtctggcagcactggcgtgagcttaatctgctggggttattattcactttcggggtcggcggcctgtggggtgtcagtgactaccggcctgaatactggctcaactgccagcttttcctgattgccaatatcattattttcggtgtgctgagcgtggcgctgtcgctgcgggcgcaggaaaaaggcaaacatattgttgatggcgtgctgttgtttgcgccgccgctggttgggtttggcatgcagtacgccattacccaacatatggattatggtccggcgctcagtgcgctgggctacggcgcgttctatatggcgctggcgtggctggcgctgcgccgctacccgtcgatgggaaggccgctggtgctggcggcgctcgcgttgggcggcgcgtttaccacccttgccatcccgctggcgctttcggcgcgctggacggcaatggcctgggcgctggaggggcttggcgtattgtggctgggtatgcagcaacagcagcggcggatgagctatagcggcactgcgctaatgctactggctgtgggcagcgcgctgtgggcgctggccgatgacgccgcgccgctgacggtgatgatgatcttcaccgtgctgagtttgtgctggctgggcggcgcgtggctgtggcgcagcgagaagaaggaggtcagttgggcgctgctggcgggcggcatcgccttctggatcgtcgcgctgacgggggcctcgcaactggcgctggcgcgttatgctgccgaatggtctggcgtgctggcgctactcgccgcgtccgcctggctctggcgttatctgagcgggcggctcgcctggcgggcgttaggttacagcccttggctgctgtggcctgcgatgctgctggcattgctgtaccagattgaagaacggcagattttcgccgcaggctggcaaaatctggcgtggtgcgtggcgctgccttgtgcggtgctcatgctttatcgtgatgatgcgcatctgccgccgggcatctcccgggcgctgcatttatccttgttctggatggtgcttttagcgctcgggatggagctgttctggtttgtgcagtcgttgccgtggggaatggacgcctggcgcagcgggttgatgatggcggcgggcggaatcgtcatactgctggtacacgccgcgctgcgccgcgatttgtggccgttcaaatgctggcctgcgttgtacggcgcgctggcgctggcgcccgtggcagcgatcctgctgttgcttctggtgctggcgaatttacaggatggcgtggttttccaacagcgctatctgccagtggtgaacccgcttgaggagggagccgctttcgccttgctgggattgttcctccttgcgcgtttctctcgtcgttttctgccgtcgccgttagcgaaatatcacgcatgggcgcctgtggtgctggcggcgctcgcattctggtggttgaacggagggctgatgcgggcgctggcgtggtatggcgaggtggcgtggagcatggagacattgtggcattcgcggttgatccagacctgtttcgccctgttctggatgctgacggcgttaattatgatgttgctcgcgacccgtcgccgttcgcggcgggaatggttatgcggcgcggtgcttttggggatcgtcattgttaagctgatgctggtggatagcgcgcgcggcggcgggttggcgcgcgccatcgcttttatcggcgtggcgatcctggtacttatcgtcgggtatttctcaccgttaccgcccaaagcaggagaagaaaaatga

SEQ ID NO: 71629 - DNA, 903 bp, Citrobacter koseri
atgcgaatcaatctggacgttctgctcattcttgatgctatcgacaaacacggctcgtttgccgctgcggccgggtcgctgtttaaaacccccgcggcgcttagctatatgattcagaaactggaaaacgatctcgatattgagcttctcgatcgctccggccaccgggcgaaatttaccgataccggacgaatgatgctggaaaaagggcgtctgctgctcaacgccgcaaaagacctggagaaacaagccgtgcagttaagctctggctgggaaaaagagctggcgatagcgctggatgattccttccctttcgagacgctgctgcccgttattgatgcgttttatgcgctgaataagcaaacgcgcctcaattttacacaccatacgctggcgggatcgtgggaagagctgacgcacaacggcgcggacatcattctcggcgcaattaacgagcctccgacctccgcagcctggtcatataaaatgctcggcaccctggacaacgtatttgtggtcgcgccttcgcacccgctggccgccgccacggacggcctgaccaatgagcaactctgtctgcaccgggcggtggtgatcagcgacagcgcccgcttctgccatcccctgcaatccaatttaatggatgagcagccgcaaattcgcgtggatgacttcgacagcaaagtgacgctgctgcgcgccggtttagggtgcggattcctcccccgccatattgtcagaccgtggcttgccaccggcgagctggtggaaaaatccgtcatctctttccggcagaaagatgtcgcctatatggcatggcgcaaccacagcgacggtctggcgcagcgctggtggcgagaagccctgctcgccagcccggaagtcgcgcagctctatcagtga

SEQ ID NO: 71630 - DNA, 1818 bp, Citrobacter koseri
atgttgaacgcctggcaccttccggttgccccatttgttaagcaaaacaaagaacaactgaccataacgttatggctgagcggggaaaacccgccccagcgtgtgacgctacgcgctgagaacgataatgaagaaatctcgctggcgatgcatcggctgcgcagtcaaccgcaaccgggcgtcacggcgtggcgggcggcgatcgatctcgccagcggacagccgcgccgtcgctacagctttaagctgctctggcacgatcgccagctgtggttcacgccgcagggatttagccgtttcccgcccgcgcggctggagcagtttgccgtcgatgtgccggataatggcccacaatgggtcgccgatcagattttctatcaaatcttcccggatcgctttgcccgcagccagccgcgcgaagcggaacaggataatgtctattaccatcatgccgccggtcaggatatcgtcttgcacgactgggacgatccggtgactgcgcaggccgggggatcgacgttctacggcggcgatctggacgggatcagcgagaaactgccgtacctgaaaaaactgggggtgacggcgctgtacctgaacccggtctttagcgcgccaagcgtccataaatacgatacggaagattatcgtcacgttgatccgcagtttggcggcgatcgggcgctgctgcgcctgcggcagcatacgcagcagcagggaatgcgcctggtgctggatggcgtctttaaccatagcggcgactcgcacgcctggtttgacaggcacaatcggggaagcggcggcgcatgccacaacccggattcgccctggcgtgactggtactctttctccccggagggcgtggcgctggactggctggggtatccgagtctgcccaagctggatttccagtcggaaagcctggtcaatgaaatctaccgcggtgaagacagcattgtgcgtcactggctgaaagcgccgtggcatatggacggctggcggcttgatgtggtgcatatgctgggcgaggccggaggcgcgcgcaataacctgcaacacgttgccggtattacgcaggcggcaaaagagacgcagcctgacgcctatatcgttggcgagcattttggcgatgcgcggcaatggctccaggcggatgcggaagacgccgccatgaactatcgcggcttcactttcccgctgtggggatttctcgccaataccgatatctcttacgatccgcagcacattgacgcgcaaacctgcatcgcctggatggataactaccgcgctggcctgtcgcatcagcagcagttacggatgtttaaccaactggacagccacgataccgcccgtttcaaatcgctgctgggcaaagacgtggcgcgtttgccgctggcggtcgtctggctgtttacctggcctggcgttccctgcatctattacggcgatgaagtggggctggacggcaataacgatccgttctgtcgtaagccgttcccgtggcaggttgaaaaacaggatgccacgctgttggcgctgtaccagcgtctggggaaacttcgccagcgcacgcaggcgctacgtcacggcggttgccaggtgatttatgccgaagaagatgtggtggtctttgtgcgagtctatcaccagcagcgcgtactggtggcgatcaaccggggcgaggcctgtgaggtcgtattgcctgcctcaccgttgcttaacgtcagcgaatggcgaggcaaagaggggaaaggccaactggctgagggtgttctcagcctgcccgccatttccgctacggtctgggtgaatcactga

SEQ ID NO: 71631 - DNA, 1374 bp, Citrobacter koseri
atggaaagcaataacaagctaaagcgtgggctgagcacccggcacattcgctttatggcattgggatcggcaattggcaccggattattttatggctcggcagacgccatcaaaatggccgggccaagcgtgttgctggcctacattatcggcggggtcgcggcgtacattattatgcgcgcgctgggcgaaatgtccgtgcataaccccgccgccagctcgttctcgcgctatgcgcaggaaaacctcggcccgctcgccggttacattaccggctggacttactgttttgaaattctgattgtcgccattgctgacgtgaccgccttcggtatctatatgggagtctggttccctgcggtgccgcactggatctgggtgctgagcgtggtgctacttatctgcgccatcaacctgatgagcgtgaaggtattcggcgaactggaattctggttctcgttctttaaagtcgccactatcatcatcatgattgtcgccggcttcggcatcattatctgggggattggcaacggcgggcagccgaccggggtccacaacctgtggagcaacggtgggttcttcagcaatggctggctggggatggtgatgtcgctgcaaatggtgatgttcgcttacggcgggattgaaattatcggcatcaccgccggagaagcgaaagacccggaaaaatctattccgcgcgccatcaattccgtgccgatgcgtattctggtgttctacgtgggcacgctgtttgtcatcatgtctatctacccgtggaaccaggttggcaccaacggcagcccgttcgtcctgaccttccagcatcttggcattacgtttgccgccagcatcctgaactttgtggtgctgaccgcttcgctgtcggcgattaactccgacgtgttcggcgtgggacgtatgctgcacggtatggcggagcagggcagtgcgccgaaagtgttcgctaaaacgtcgcgtcgcggtattccgtgggtgacggttatggtgatgaccattgcgctgctgttcgcggtttacctgaactacatcatgccggaaaacgtcttcctggtgattgcttcgctggcgacctttgccacggtatgggtatggattatgatcctgctgtcgcagattgcgttccgccgccgtctgccgccggatgaggtgaaggcgctgaaatttaaagtgccgggcggcgtggcgacaaccgttacgggcctgatcttcctggtctttattatcgcgcttatcggctaccatccagatacccgtatttcgctgtacgtcggtttcgcctggatcgcactgctgttggtcggctggatgtttaaacgccgccgcgaccgccaactggctgaagtggggtga

SEQ ID NO: 71632 - DNA, 1320 bp, Citrobacter koseri
atgacccatcagttaaaatcgcgcgatattatcgctctgggctttatgacatttgcgctgttcgttggcgcaggcaatattatctttccgccgatggtcggtttgcaggcaggcgaacacgtctggactgcggcgttcggctttctgattactgccgttggtcttccggtacttaccgttgtggcgctggcgaaagtcggcggcggcgttgatagcctgagcaccccgattggtaaagtggctggcgttctgctggcgaccgtctgttatctggcggtggggccgttattcgcaacgccgcgtacggcgaccgtctcctttgaagtcgggattgcgccgctgaccggcgattccgcactgccgctgtttatctacagcctggtgtatttcgccattgtgattctggtatcgctctatccgggcaaactgctggacacggtgggtaacttcctggcgccgctgaaaatcatcgcgctgattattctctccgttgcggcaatcatctggcctgccggcccgattagcgacgcgatggatgcctaccagaacgcggcgttctctaatggctttgtgaatggctatctgacgatggatacgctgggcgcaatggtgtttggtatcgttatcgtcaatgcggcgcgctcgcgcggcgttaaagaagcgcgtctgctgacccgttataccgtctgggcgggtctgatggcgggtgtgggtttgacgctgctgtaccttgcgctgttccgtctgggatcggatagcgcgacgctggtcgatcagtctgctaacggcgcggcaattctgcacgcttacgttcagcataccttcggcggcgcgggtagcctgctgctggcggcgctgattttcatcgcctgtctggtgacggcggttggcctgacctgcgcatgtgcggagttctttgcgcagtacgtcccactctcttatcgcacgctggtgtttattctgggcggcttctcaatggtggtatcgaatctgggtctgagccatctgattcagatttctattccggtgctgacagccatctatccgccgtgtatcgcactggttgtattaagctttacccgctcatggtggcataattcttcccgcgtcattgctccggcgatgtttatcagcctggtttttggtatccttgacgggattaaagcctctgcgattggtgacatcttaccggcctggacccagcgtttaccgctggcggaacaggggctggcgtggttgatgccaacagtggtgatggttgttctggcaattatctgggatcgcgcagcaggtcgacaagtgacctccagcgctcactaa

SEQ ID NO: 71633 - DNA, 1296 bp, Citrobacter koseri
gtgctggaacggctgtcatggaaaaggctggtgctggagctgatcctctgctgcatccccgcttttatcctcagtgctttttttggttatctgccctggtttttactggcgtcggtaacgggattgctgatctggcatttctggaatttattgcgcctctcctggtggctgtgggtcgatatgagtatgacgccgccgccgggacgcgggagctgggagccgctgctgtacggtctgcaccagatgcagttgcgtaataaaaagcggcgtcgcgaactgggaaacctgattaaacgctttcgcagcggggcggaatccctccccgacgcggtggtgctgacaaccgaagacggcgggattttctggtgtaacgggctggcgcaacaggtgcttgggctgcgctggccggacgacaacgggcaaaacattctgaacctgctgcgctacccggaatttacgcagtatctcaaaacacgcgattttatccggccgctcaacctggtgctcaacaccgggcggcatctggagatccgcgtgatgccctataccgatcagcaactgttgatggtcgcgcgcgacgtgacgcagatgcaccagcttgaaggcgcgcggcgcaatttcttcgcaaacgtcagccatgaactacgcacgccgctcaccgtcttgcagggctatctggagatgatgcaggagcagcctctggaaggcgcgacgcgggagaaggcgctgcatacgatgcgtgagcaaacgcaccggatggaagggctggtgaaacaactgctgacgctgtcgaaaattgaggcggcgcccgcgctgctgttgaacgaaagggtggacgtgccgatgatgctgcgcgttgttgagcgtgaggcgcaggcgctcagccagcagaaacacacctttacgtttgaagtggatgcccggctgagcgtattgggcaacgaagaacagttgcgcagcgcgatttcgaacctggtctataacgcggtaaatcatacgcctgcgggaacgcatattaccgtgcgctggcagcatgtgacccacggtgcggagttcagcgtggaagataacgggccggggattgcgcctgagcatattccgcgtctgacggagcgtttctaccgtgtggacaaagcgcggtcgcggcaaaccgggggaagcggattaggtctggcgattgtgaaacatgcgctgaatcatcacgagagtcgattgattatcgacagttcgccgggtaaagggacgcgcttcagctttgtgctgccggaacgattaattgccaaaaattgcgcttaa

SEQ ID NO: 71634 - DNA, 690 bp, Citrobacter koseri
atggcgagacgtattctggtcgtagaagatgaagctccaattcgtgaaatggtctgcttcgtgctcgagcaaaatggctttcagccagtagaagccgaagattatgacagtgctgtgaaccaactgaatgaaccctggccggatttaatcctccttgactggatgttgcccggcgggtcgggccttcagtttattaaacacctcaagcgtgaagcgatgacccgggatatccctgtggttatgctgacggcaagaggcgaagaggaagaccgcgtgcgcgggctggaaaccggggcggatgactatgtcaccaagccgttttcccctaaagagctggtggcgcgtatcaaagctgtgatgcgccgcatttcgccgatggcggtagaagaggtgattgagatgcaggggcttagcctcgatccaacctcgcaccgcgtgatgaccggggaaaatccgctcgatatggggccgaccgaatttaaattgttacacttctttatgacgcaccctgagcgcgtctacagtcgcgagcagctcctcaaccatgtctggggaacgaatgtgtatgttgaagaccgtacggtcgatgtgcatattcgtcgtttgcgtaaagcgctggagcacagcggtcacgatcgtatggtgcaaacggtacgcggaaccgggtatcgcttttcgacccgtttttaa

SEQ ID NO: 71635 - DNA, 1209 bp, Citrobacter koseri
atgcgcatccttcacacctctgactggcatctgggacaaaacttctacagcaaaagccgcgccgccgagcaccaggcgtttctcgactggctgctggaaaccgcgcaatctcaccaggtggatgcgattattgtcgcgggtgacatttttgatacaggatcgccgccaagctatgcccgcgagttgtataaccggtttgttgtcaatttacagcaaaccggctgtcatctggtggtgctggccggaaaccatgactccgtcgccacgctcaacgaatcccgcgatattctggcgtttctcaacaccaccgtggtcgccagcgcaggccacgcgccgcagtacctttaccgtcgcgatggtacgccgggcgccgtgctttgcccgattccgtttttacgcccgcgcgacatcatcaccagccaggcggggctttcgggcaatgaaaaacagcagcatctgctcggggcgatcacggattactaccaacaacagtatcaggaagcctgtaagctgcgcggcgacggcgatcaaactctgccggttatcgccaccgggcacctgaccaccgtcggcgccagtaaaagtgacgcggtacgtgacatctatatcggcacgctggacgccttcccggcgcaaaacttccctcctgccgattatatcgcgctgggacacattcaccgggcgcagatcattggcggcacggaacacatccgctactgcggctctccgatcgcgctgagctttgatgagtgcggcaaaagcaaatgcgtccatctggtcagttttgcaaacggcaaattacatcaagtagagaacctcaccgttcccgtcactcaaccgctggcggtgctgaaaggcgatctggcctccatcaccgaacaacttgagcaatggcgcgatgttcaccaggagcctcccgtctggctggatattgaaatcaccaccgacgaataccttcacgatatgcagcgcaaaattcaggcattaacggagtcgctgcccgttgaggttttactggtgcgccgcagtcgggaaaatcgcgaacgcattatggctaacgaacgacgtgaaaccctgagcgaactgcgcgtggaagacgtttttacccgccgtctggcgctggaagagctggatgaaccccagcgtgaacgtctgacgcagctttttaccaccaccctacattcgctgtccggggagcatgacgcatga

SEQ ID NO: 71636 - DNA, 3144 bp, Citrobacter koseri
atgaagattctcagcctgcgcctgaaaaacctcaactccctgaagggagaatggaaagtcgatttcacggcagaaccttttgccagcaacgggctgtttgccatcaccgggccgaccggcgcggggaaaaccacgctgctcgacgccatctgtcttgcgctctatcacgagacaccgcgcctgagcaccgtttcgcaatcgcaaaacgatctgatgacccgcgatacggccgaatgcctcgccgaagtggagttcgaggttaaaggcgactcttaccgcgctttctggagccagaaccgcgcccgcaatcagccggacggaaacctgcaagtgccgcgcgtggagctggcgcgctgcgccgacggaaaaatcctcgccgataaggtcaaagataagctggagatgacggcatcgctcaccgggctggattacggacgctttacccgctccatgctgctgtcgcaggggcagttcgctgcgtttctcaatgcgaagccgaaagaacgcgccgagcttctggaagagctgaccggaaccgaaatctacgggcagatctccgcgctggtgtttgaaaagcacaagaccgcccgcaccgacctggaaaagcttcaggcgcaggccagcggcgtctcgctgttagcgccggagcagcagcattccctcaatgaaagtttgcaggcgctcactgacgaagaaaaacagctgctcgcccgccagcagcttcaccagcaacatctgcactggctgacccgtcagaatgagttgcaggctgaaatgaatcgccgccagcaggcgctgcgggtcgcccaggaagaacaggaaaacgcgcagccgcagctggccgcgctgaagctggcgcatcctgcccggcagttacgcccacactgggaacgcattgaggaacaaaccgctgccgccgggcgcacacgccagcaaattcaggaagtaaatactcgcttacaaagcgtattacacctgcgcagccgcattcgacacagcgctcaacaacaatccgccaaactgcgcgccaccatgcagacgctgaccgggtggctcaccgaacatgaacgcttccgcttgtggagcagtgaactggcaggctggcgtgcgctgtttgctcaacagtccagcgataaagcgcagttgcttaaatggcagcagcagtgtgcaagcgatatccgcaagcgtgacgcgcttccaccgaatcctctgacgcttacgccagaagaggccacggcagcgctggcgcagcatacgcagcagcagccgctgcgtcagcggctcgccagcctgcatgggcagatagcgcctaagcaaaaacgacgggaacaactgcaaaccgcgatccagaatagtcagcaggagttggcccgacgcagtgcggcgctggaggataagcggcagaaatataaagaaaaaaatcagcagttcatggatgtaaaaacgatttgcgagcaggaggcgcgcatcaaagatctggaaagccagcgagcgctgctgcaatccggccagccatgcccgctctgcggatcgacctcgcatccggcgattgcatcctatcaggcactcgaacccggcgtgaatcaggcgcggcgcgatgcactggaaaaagaggtcaagacgctggcggaagaaggcgccgccttacgcgggcaactggaaacattaacgcagcagctacaccgcgacgaaagcgaagcgcaggcactggtaaaagaggagcaagcgctcactcaagaatggcagacgctgtgtgacgcgctgaaagttacgctgcaccctcaggacgatatttcaccgtggctgaccgcccggcaggactatgaacaacagctgtatcagctcagccagcgccatatgttgcaggcgcagatcgccgcccataccgggcaggttacgcaatttcagcagcaaatcgaccagcgtcaaaccacgctgctgtctgaactgcgccgctacgggttatccctgcccgccgacggagaagaagcgtcgtggttaaacgcccgcgcggatgacgcgcaaacatggcaacagcgccagacggaactgggcgagctacaaacgcgcatcgcgcagttggttcccctgctggagacactaccggaaacagatattctcccggagagcgatgagcgcgtggcgctggataactggcggcaggtacatgatgattgcgtttcgctacagagccagtggcagaccttgcagcagcaggaagcgcaggaaatgcagcgggtagcacaggcgcaggcgcactttgacgccgcgctcaaggccagcgtatttgacgatcgcgccgccttccttgccgcgctgctggacgatgagaccatcgcccgcctcgaacaacatcgccaggcgctggaaaaccagttacagcaggcgcaggccttagccgctcaggcgaaccaggcgctggcagaacatcaacaacatccgcccgaagggctggatctcacgctcacgcctgaacacattcagcaggccgtgacgcaattaaccggacaactgcgggacaatacgacgcgtcagggggagatccgccagcagctcaaacaggatgcgggtaaccgccaacagcagcagtctctgatgctggagattgaaaacgcctcgcagcaggtggaggactggggttatctgaacgcgttaatcggctctaaagagggcgataaattccgcaaatttgctcagggactgacgctggataacctggtctggctggcgaacaatcagctgactcgcctgcatggtcgttacctgctccagcgcaaggccagcgaagcgctggaactggaggtggtcgatacctggcaagcggatgccgttcgcgatacccgcacgctgtccggcggcgaaagtttcctggtcagtctggcgctggcgctggcgttgtccgatctggtcagccacaaaacgcgcatcgactccctgttccttgatgaagggttcggcacgctggacagcgagacgctggataccgcgctggatgccctggacgcgctgaatgccaccggtaagacgattggcgtaataagccatgtggaagcgatgaaagaacgcattcctgtgcaaattaaggtgaagaaaatcaacgggctgggttacagcaaactggataagatgtttgctgtggaatga

SEQ ID NO: 71637 - DNA, 909 bp, Citrobacter koseri
gtgcgtataggtatcgatttaggcggcacgaaaacggaagtaattgcgctcggcgatgcgggggaacagctgtttcgccatcgtctgcctacgccgcgggatgattatcgacaaacgatagagaccatcgcttcgctggtcgagatggcggaaaaggcgacgggccagacgggtacggtagggatgggtattcccggttcgatctcgccctataccggtatggtaaagaacgccaactcaacctggcttaacggtcagccgttcgataaagatttgagtgcgcgtttgcagcgggaagtgcgcctggcgaacgacgccaactgtctggcggtgtccgaagcggtggatggcgcggcggccggagcgcagaccgtttttgcggtgatcatcggcaccgggtgcggggctggcgtggcgctgaacggtcgggcgcataccggcggcaacggtacagcaggcgagtggggacacaatcccttgccgtggatggatgaagatgaactgcgctaccgtgaagaagtgccctgctactgtggcaaacaaggctgcattgaaacctttatctcaggaaccgggtttgccacggattaccatcgtctgagtggtcatccgctgaaagggaatgacattatccgtctggttaacgagcaggacgcgctggcggaacgggcgcttagccgttatgaactgcgcctggcgaaatcgttagcccatgtggtcaacatcctcgacccggacgttatcgtgttaggcggcgggatgagcaatgtcgatcggttgtacaacaccgtgccatcgttgattaaaccgtttgtttttggcggcgaatgcgaaacgccggttcgtaaggcgttacatggcgattccagcggcgttcgcggcgcggcatggttgtggccgcaggagtaa

SEQ ID NO: 71638 - DNA, 912 bp, Citrobacter koseri
atgctgtggttcaaaaatttaatggtttaccgtcttagccgcgatatttcgttgcgcgccgaggagatggaaaaacagctagcctcgatgacgtttaccccttgcggcagccaggatatggcaaaaatgggctgggttccgccaatgggctcgcacagcgatgcgttaacgcataccgccaatggccaaattattatctgcgcgcgcaaagaagagaaaattctgccgtcgccggtgatcaagcaagcgctggaagcgaaaatcgccaaactggaggctgaccaggggcgcaagctgaaaaaaacggaaaaagactcgctgaaagatgaagtgctgcactcactgttgccgcgcgcctttagccgttttagtcagacaatgatgtggatcgacaccgttaacggtctgatcatggtcgattgcgcaagcgctaaaaaagcggaagatacgctggcgctgctgcgtaaaagcctcggctcgctgccggtggttccgctggcgctggaaaatcctatcgagctgacgctcaccgaatgggtgcgttccggtacggtggcgcagggattccagttgctggacgaagcagagctgaaagcaatgctggaagacggcggcgtgatccgcgcgaagaaacaggatctggtcagcgacgagatcgccgtgcacattgaagcgggtaaagtggtcacgaaactggcgctcgactggcagcagcgcattcagtttttgatctgcgatgacggttcgatcaaacgcctgaagttcagcgatgaactgcgcgatcaaaacgaagatatcgatcgcgaagactacgctcagcgttttgatgccgatttcattctgatgacgggtgagttggcggcgttaattcaaagcctggttgaaggtctgggcggcgaagcgcaacgctaa

SEQ ID NO: 71639 - DNA, 285 bp, Citrobacter koseri
atgctacaaagtaacgaatacttttccggcaaagtgaaatcgatcggctttaccagcagcagtactggtcgcgccagtgtcggcgtgatggcggaaggcgaatatgcctttagcactgccgcgccggaggagatgacggtggtcagtggcgcgttgaacgtactgcttccgggggaaaccgagtggaaagtctacgcagcgggcgaggtgtttaacgtccccggccaaagtgagttccatttgcaggtggctgaaccgacgtcctatctttgccgctatttataa

SEQ ID NO: 71640 - DNA, 678 bp, Citrobacter koseri
atgagtgcgtcgttggctatcctcacgatcggcgttgtgccaatgagcgaagtgctgccgcttctgacggagtatatcgatgagcaacatattacccatcatagtctgttgggtgagatcagccgtgaagaggtgttggcggagtacgccgttgaggccggagacgatccgctattaacgttgctcagtgataaccaaatcgtccatgtttcgcgccagaaagtggagcgcgacctgcaaagtattatcgaagtgctggataaccagggctacgatgtcattttattgatgaataccgccgcgattaacagtatgaccgcgcgtaacacgatcctgctggagccgttgcgtattatcccgccgttagtggcgtcgattgttgatggccaccaggtgggcgtgattgtgccggttgaagagttactggatgtacaggcgagaaaatggcaggtcttacaacgtcctccggtcttttctttggcgaatcccgttcagggatcggaacaacaactgattgatgccggtaaagatttgctggaacagggcgcggatgtgatcatgctggattccattggatttaatcagcgtcatcgtgatttattgcaaagagcgctggatgttccggtcttgctctctaatgtattgattgcacggctggcttcggaattactcggttaa

SEQ ID NO: 71641 - DNA, 192 bp, Citrobacter koseri
atgccaacaaaaccgccttatccccgggaagcgtatatcgtcaccgttgagaaaggaacgccaggtcagacggtgacctggtatcagctccgcgccgactatcccgaacctaacgcactgatcagcgagcatccttccgcgcaggaagcgatggatgccaaaacgcgctatgaagatcccgataaaagctga

SEQ ID NO: 71642 - DNA, 546 bp, Citrobacter koseri
atgacgcaacctctctttcttgttggccctcgcggctgtggtaaaacaacaaccggtatggcgcttgcgcaggcagtggatttccagtttgtcgataccgatcggtggttgcaatcgcacgtccagatgacggttgcggagattgttgaccgggaagggtgggacagctttcgcgccagagaaacagcagcgctgaaggcagttaccgcgccgtcaacggtggttgcgacggggggagggagcatcctcaccgaatacaatcgtctctatatgcgcgaaaatggcattgtgatttatttaagcgcgccagtgtccacgctggtgaaccggctggaggctgcgccagaagagggactgcgcccgacgctaaccggcaagcccttaagtgaagaggtgcaggaagtgctcgaacagcgcgacgcgctgtatcgtgaagccgcgcattacatcatcgatgcgagccatgcccctgaccaggttgtttctgaaattcttgcggcgttgtcgcaggcggcgcaacgattgcagggcggcgtctataattaa

SEQ ID NO: 71643 - DNA, 459 bp, Citrobacter koseri
atgacaatatgggtggatgcggatgcgtgtccgaatgtgattaaagagattctgtaccgtgcgtctgaacgtatgcagatgccgcttattctggtggcaaaccagaatttacgcgtaccgccttcgcgttttatccgcacactgcgcgtacccgccggatttgatgtcgctgacaacgagattgtgcgtcagtgcgaagccggagatttggtcattacggcggatatcccgctggcctctgaagtgctggaaaaaggggcggcggcgctgaatccacgcggtgaacgctatacggagtcaacgatccgcgaacgcctgacaatgcgtgattttatggataccctgcgcgccagcgggattcagacgggcgggccggacagcctttctccgcgcgatcgccagcatttcgccgccgagctggataagtggtggctggaagtccagcgcagaacgcgctaa

SEQ ID NO: 71644 - DNA, 810 bp, Citrobacter koseri
atggagaagaaaatcggttttatcggttgcggtaatatgggaaaagccattctgggcggcctgattgccagcggtcaggttctccccgggcaaatctgggtctataccccgtccccggataacgtcgccgcgctgcacgatcggtacggcatcaatgcggcgcagagtgcgcaggacgtcgcgcaggttgcggatatcgttttcggcgccgtgaagccgggcatcatgattaaagtgctaagcgaaatcagctccagcctgaacaaggactcattagtcgtctctatcgctgcgggggtcacgctcgatcagttggcgcgcgcgttggggcacgatcgcaaaattgttcgcgcgatgccaaacacgccgtctttagtcaacgcgggcatgacctccataacgccaaatgcgctggtcacgccggaagataccgctgacgtgctgaacattttccgctgctttggcgaagcggaagtgattgccgagtcgatgatccaccccgtcgttggggtcagtggttccgctccggcttacgtcttcatgtttattgaggcgatggccgatgccgcagtgctgggtggaatgccgcgcgcgcaggcctataaattcgccgcgcaggccgtaatgggctccgccaaaatggtgctcgaaacgggtaaacatccgggtgaactgaaagatatggtgtgttcgcctggcgggacgaccattgaagccgttcgcgtgctggaggagcgagggttccgggcgtcgattatcgaagcgatggcgaagtgtatggaaaaatcagagaaactcagtaaatcctga

SEQ ID NO: 71645 - DNA, 1098 bp, Citrobacter koseri
atgaatgatgaaaacttttacaaaaaagcggtcgcacagagtgagccacctcactctcctcaaaatgaccatcaacgctccgggctgcgattcgccaggcgggtgagactgccgcgtgcggtaggactgggatggatgtttctcccgatcgccgccgtactggcttcacaaccgattgcaggaggatggtggttgtttctggtcggctggtctttcgtctggccgcacctggcgtggcaactggcgagtaaagccatcgatcccttaagccgggaaatatacaacttaaaggcggacgccattcttgctggcgtctgggttggggtgatgggcgtcaacgtgctgccctccacggctctgctgatgatgatgtgtatgaatttgatgggcgcgggagggctgcggctctttattgccggtatggtgttaatggttgtgtcatgtctggtgacgttacagctgaccggaattaccgtggcttttcgcagcgcgccgctggagtggtggttctccctgccggtgattgtgatttatcccttactgtttgcctgggtgagttaccagacggcgaccaaactggcggaacataaacgcaggctacaggtgatgagcatgcgggatggtatgaccggcgtctataaccggcgtcattgggaaatattgttgcgtaatgaatttgataactgtcgccgctaccaccgggacgccacgttgctcatcatcgatatcgatcactttaagagcataaacgatacctgggggcacgatgtcggagatgaggcgattattgccctgacgcgccagttacagatgacgctgcgcggcagcgatgtgataggacgttttggcggcgacgagtttgcggtgatcatgtgcggtacgccagcggataacgcgattgccgcgatgtcgcgggttcatgagcgattaaacgcgttacgcctgccgtgcgcgccacaggttattttgcgcatcagcgtgggcgttgcgccattgaccacgcaaatcggacactaccgggaatggctgaaatcggcggatatggcgctttataaagcaaagaacgccggacgtaaccgtaccgaagtggcggcctga

SEQ ID NO: 71646 - DNA, 321 bp, Citrobacter koseri
atgaaaataacattactggttaccctgctgtttgggctggtttttttaaccgccgtcggcgctgccgagaagacattaaccccgcaacaacagcgtatgacgagctgcaatcagcaggcgacggcgcaggcgttaaaaggggatgcgcgtaagacctacatgagcgattgcctgaaaaacagtaaatccgcccctggtgagaaaagcctgacgccgcagcaacagagaatgcgtgagtgcaaccagcaggcgacggaccagtcgctgaaaggcgacgatcgcagcaagtttatgagtgcctgtctgaaaaaatccgcatag

SEQ ID NO: 71647 - DNA, 1416 bp, Citrobacter koseri
gtgaaacaaagcgctattgctattgccctgttacctctgctgtttacccccattacgcatgccaggacgtccgcgatgacggtgctggataatcgtgccgcacagggagatattaccacgccaggcggggcgcgccgattagcgggcgatcaaacggcggcgctgcgagattcgctgagcgataaaccggccaaaaatattatcttgctgatcggcgatggtatgggtgattctgaaatcactgcggcgcgaaattatgcgcaaggggccggcggcttttttaaaggaattgatgctttaccgttgaccgggcaatacacccattacgcgctggataaagaaacgggtaaaccggattacgtcacagattccgccgcgtcggcaacggcgtggtcgacgggcgttaaaacctataacggcgcgttaggcgtcgatatccacgaaaaagatcacaccacgatcctggagatggccaaagcggcaggtctggcgacgggcaacgtctcgaccgcagaattacaggatgcgacacccgccgcgttagtctcccatgtaacctcacgcaaatgctacggccccagccttaccagcactctttgcccgacaaacgcgctggagaagggtggaaaagggtcgatcaccgagcaactgctgaatgcgcgggcggacgttacgcttggcggcggcgcggccacctttgctgaaatggcgacagcaggcgaatggcaggggaaaacgttgcgtgagcaggcgctggagcggggatatcagctggtgaacgatgccgcctcgctgaaggcggtaacggcggcaaatcaggataagccgctgctgggcttgttctccgacggcaacatgccggttcgctgggaaggcccgaaagcctcttatcacggcaaccttgcacaacctgcggtgacctgcaaggcaaacccgcagcgcgatgataccgtgcctacgctggcgcaaatgacggacaaagcgattgagctgttgagtaagaatgaaaaaggtttcttcttgcaggttgaaggcgcgtccatcgataaacaggatcacgccgccaacccatgcgggcagattggtgaaacggtcgatctggacgaagccgtacagcgtgcgttggcattcgctaaaaaagagggcaataccctggttgtggtgactgccgatcatgcgcattccagccagattatcgcgccggaaagcaaagcgccgggactgacgcaggcgttaaataccaaagatggcgcggtgatggtcatcagctacggcaactcggaagaggagtcgcaggaacataccggcagccagttgcgcattgccgcatacggcccgcatgcggcgaatgtcgtcggattaacggaccagaccgatctgttctacaccatgaaagcggcgttgggactgaagtaa

SEQ ID NO: 71648 - DNA, 261 bp, Citrobacter koseri
atgaaaaatctcatttcagagttgttgctgaggctcgcccaaaaagaagaagagtcgaaagaactggttgctcaggtagaagcgttagagattattgtcacggcgatgctgcgtaatatggcgcaaaatgagcagcagaagctcattcatcaggttgaggatgcgctcgacggcgtaaagccggatgccagcgttccagattacgatacggaattgctgcgccagtatgtaaaaaagttactgaggcatcctcgtagctga

SEQ ID NO: 71649 - DNA, 993 bp, Citrobacter koseri
atgaaaaacaatcggatgaccttgcaggatatcgccacgctggctgggctaaataagatgacggtaagccgttatcttcgcgatcccaatcaggtctcgcagcgtagccgcgagctgatttcgaagatcatggaggagaataattatattcccaatcgcgcccccgagattttgcttaatgcgcgcagtaaaacgatcggggtgctgattccctcctttcgcaaccagatttttgccgatgtcctggcggggattgagtcggtgacttccgctcaccaataccagacgctgatcgctaactatgaatatgacccggagcgggaagagcgcgaagtgcttaacctgctctcctacaacattgatgcgctgattctgaccggaaaacaacatactgaacgcatggtgcagtatgtgcgcgccagcggtatccccgtggcggagttaatggatatcaccgagcattgtctggatatgcaggttggtattgataacgaaaaagccgcgtgggatatgactcaggcgtttctggaggcgggaaaacgcgccgtggcgtttttcggctcaatggacgatccgcgtgatgtcagtcgctatcgcggcgttgagcgtgcgctgagcgagcaggggttacagccttaccatgtggtgccaaaagccatttcgtcactggccttaggtcgtcagttgtttttgcagacgatgcacgacagaccggatattaacgcgattttttgcaccaatgacgacttagccgttggcgcgctgctggagtgtcagtcgcagcagatccccgttccgcaacaggttgctattgccggatttcatggcctggaaatcggccgcgcacgtttgcaaaaaatagcgagcgtgattaccccccgctacgatatgggaagcgtagccgcagatatgctgattaaacgtctgggcggaaaagagacgctggacagggtcaatctgggatatcaaatatattatggcgatacgctttaa

SEQ ID NO: 71650 - DNA, 1290 bp, Citrobacter koseri
atgaacgctcttgctaaattaccagcccggcgctggtggtatttaatgccgattatttttattacttacagcttagcgtatctcgatcgcgccaattatggttttgccgccgcagcaggtattgaaaccgatctgggtattacgaaaggaaccgcatccttaattggcgcgctttttttcctcgggtatttcttttttcaggtgccgggggccttgtacgccgttaaacgcagcgtacggaaaatgatctttttcagcctgatcctgtggggaatatgtgccgccgcgacggggtttgtcagtaatattcccatgctgatggcgatccgttttactcttggcgtggttgaggcggcggtgatgccagccatgctgatttatatcagcaactggtttacgaaaaccgagcgctcgcgggcgaatacctttttgattctgggtaatccggtcaccgtgttgtggatgtcgattgtctccggttatctgattcaggcctggggatggcgcgagatgttcattattgagggcatcccggcagtactgtgggcattttgttggtgggtgctggttcgtgataaaccggccgatgccagctggctgacggcggaggaaaaagagacgctgcaacaggcgatggatcgtgagcaaacccatattaaaccggtacgtaactacggggaagccatgcgctcgcgtaacgttgtcatgctgtgcgcggtacatgctttgtggagtatcggcgtgtacgggttcatgatgtggatgccatccatcctgaaatcagcggcccaaatggatatcgtatccgtcggctggctggccgccgtgccttatctggcggcgatctgtctgatgcttaccgtatcgtggttatcggataagtttcagaaccgtaagctgtttatctggccgttgctgctgattgccgccatcgctttcttatgttcctggctgttggggagcaacgctttctggctctcttatggattgctggtggttgccgcagcctgcatgtatgcgccttacggcccgttttttgccttaattcctgaactgttgccgcgtaatgtggcgggcgtgtcgatgggcttaatcaacagtttcggcgcgttaggggcattcctcggcgcatggctggtggggtatctcaatggcctgacgggcgggccgggcgtttcgtacacctttatggcgatttccctgctggcctcggtggtattgatgtataacgtgcgcgctaaccaggcaccgtcgtccacatccttacaaaccgggaaagcggtgggctaa

SEQ ID NO: 71651 - DNA, 765 bp, Citrobacter koseri
atgaaaagtatttttagtcttgcaggtaaacgcgcattgattacggggtcagcgcagggaatcggtaatttgctggcaagggggctggcagagcatggcgccagcctggtgattaacgatattacgcagcagcgggcggaacaggccgcgagcactctgacggctctgggttatgacgccgtgggttatgggtttgatgtcactcacgcggcggaggtggaaaaagcgattgcgcatattgagcaggaaattggggcgattgatattctcatcaataatgccggtatccagcgtcgttaccccctgacggaatttcctgaagcagagtgggatcgcgttattgatgtcaatcagaaatccgtcttccttgtttctcaacaggtagccaaatatatgatggcgcgccgggaagggaagattattaatatttgttccatgcagagtgaattaggccggaaaacaattacaccctacgctgcttcaaaaggcgcggtgaaaatgttgacgcgaggaatgtgcgtggaactggcggaatataatattcaggttaacggtattgcaccgggctattttgccacagagatgacggaagcgctggtgaacgacgacgccttttccgcctggctgtaccagcgcacgcctgccgcgcgttggggaaagccggaggagttgattggcgcggcggtttatcttgcggccccggcctcgaattttgttaacggtcatattctcttcgtcgacggcggaatgttagctgcggtatag

SEQ ID NO: 71652 - DNA, 1194 bp, Citrobacter koseri
atggaatcctggaaggttaatcttatctccgtctggttcggctgcttttttaccgggctggcgatcagtcagatcctgccatttttaccgctgtatatctcgcaaatgggcgtcacttcgcatgaagcgctctccatgtggtctggcttaaccttcagtattacctttctcatctccgcgattgtttcgcccatgtggggcagtctggctgaccgtaaaggccgcaaactgatgctactgcgcgcatcgctcggcatggcgatcgcgattttacttcaggcgtttgcgaccaatgtctggcaactgtttcttttgcgcggcgtcatggggcttacctccgggtacattcctaacgcgatggcgctggtggcttcgcaggtgccgagagagcgtagcggctgggcgctcagcacgctttccaccgcccagatcagcggggtgatcggcgggccgttaatgggcggagtcattgccgatcatatcgggctgcgggcggtcttttttattaccgccacgttgttgatggtgagctttctggtaacgctgtttttaattaaagagggcgttcgtccgactctcaaaaagagtgaacgactgagcggcaaagcggtttttgcctcattgccctatccgggtctggtgattagcctgtttttcacgacgatggtgatacagctctgtaacggttcgatcagccccatcctggcgctgtttatcaaatccatgctgccggacagcacgaacattgcctttttgagcggattaattgcgtcggtgcccggcgtttcagcgctcatttccgctccccgccttggcaaacttggcgacaggatcgggacggaaaggattctgatggcgacgctggtctgtgccgtggtgctgtttttcgccatgtcgtgggtgacgacgccgttccagttgggggttctgcgttttctgttaggttttgccgatggcgcgatgctgcctgccgtacagaccttattggtgaagtattccagcgatcgaataaccggccgtatctttggttataaccagtcgtttatgtatctcggaaatgtggccgggccgctgatgggggcatccgtatcggcgatggcgggctttcgctgggtatttgtcgcgacggcgctcattgtgctggtgaatatctggcaactggcgattgcgttgcgccgccgtcacgctgcctga

SEQ ID NO: 71653 - DNA, 684 bp, Citrobacter koseri
gtgaaaggtaagggttggcttgcgattgtgctgctgggggccgtgggtgtggtgggttaccgctctcttccgtcgcattacaatccttttgttcccctgcaactgtccgatcctccgggctggctcaccaaattcaaactacagcgtctgacgccgcaacagtgccagggattacttgagcaggccaatcgccagggaatgatctcgtcgcaacccgttgccgacagcgcgggcgaatgtccgctgtcagacgtggtacgggtcaggcattttggctccgtgtcgttgagcagcagtttcctggcctcttgcccgctggcgctgagttctgcgctgtttgtggcgcgccaggcgaaaccgctaacccagtcgtttatgggcagtcaactgacccgtattgagcaccttggcagctatgcctgtcgcaatatctatcaccgggcggatgcgcgtcgcagtgaacatgccagcgcacaggcgtgggatatcagcggttttcaactggcggacggtcgaaaagttacggttctgcggggatggaaggatgagaaaaccgccccctggctgcgcgcgatgcttaacgccagttgcacttattatggcaatggactggggccggagtacaacgccgcgcacgccaaccatttccatctcggtatgcgcggatacgggctttgtcgttga

SEQ ID NO: 71654 - DNA, 1116 bp, Citrobacter koseri
atggaatgggtttttaagatggcaaaattgcgggtaggtatcgtatttggtggtaaatcagcggaacatgaagtgtctttgcaatcggcaaaaaatattgtcgatgccatcgacaaagcccgctttgacgttgtgctgttaggcattgataaacaagggcaatggcatgtcagcgatgccgaaaactatctgctgaatgcaaacgatcccgcgcacattgcgctgcgcccctcttctaccagcctggcgcaggttccgggcaaacacgaacaccagttaattgacgcacagaacggccagccgttgccgacggtggacgtcattttcccgatcgtacacggcacgctgggagaagacgggtcgctgcaagggatgctgcgcgtagcgaatttaccgtttgtcggctccgatgtgctgggttccgccgcctgcatggataaagacgtcaccaaacgtctgctgcgcgatgccgggctgaacatcgcgccgtttattacgctgactcgcgcgaatcgcgatgcgatccgttttgcggaagtggcgtcccggctgggtctgccgctgtttgtgaaacccgcaaatcagggctcctctgtgggcgtcagcaaagtcaccagcgaagcgcaatatgaacaggccgttgcgctggcgttcgaattcgatcacaaagtggttgttgagcaagggatcaaaggccgtgagatcgagtgcgccgtgctgggcaacgatcacccgcaggccagcacctgcggcgagatcgtcctgaacagtgatttttacgcttacgacaccaaatatatcgacgacaacggggcgcaggtcgtggttcccgcccaaatcccgcaagaggtgaacgacaagatccgccagatcgccattcaggcgtaccagacgttaggttgtgcgggaatggcgcgcgtggacgtcttcttaacggcggaaaacgaggtggtgattaacgagatcaatacgctgccgggattcaccaacatcagcatgtacccgaaactctggcaggcaagtggcttagggtataccgatttgattacccgtctgattgaactggcgatggaacgtcatgcggcggataacgccctgaaaaccagcatgtcatga

SEQ ID NO: 71655 - DNA, 213 bp, Citrobacter koseri
atgaacctgcctgtaaaaattcgccgtgactggcactattatgctttcgccattgggctgatctttatttttaatggcgtggtggggttgttgggctttgaagcaaaaggatggcaaacctacgcggtaggcctggtgacgtgggtattcagtttctggcttgccgggctgattattcgtcgccgtgaggatgataaaaccgaagaagcttaa

SEQ ID NO: 71656 - DNA, 309 bp, Citrobacter koseri
atggctgactttaccctctcaaaatccctgtttagcgggaaacatcgagatacctcctccacgccaggtaatatcgcctatgccgtgtttgtgctgttttgcttttgggcaggggcgcagatcctgaaccttctggttcacgcgcctggcgtttatgaacatctgatgcagatgcaagagaccggacgcccccgcgtggaaattggattaggcgtcggcaccattttcggactggtgcctttcctgacaggttgcctgatttttggcgtcattgccgtaattttgcgctggcgtcaccgtcatcagtaa

SEQ ID NO: 71657 - DNA, 1095 bp, Citrobacter koseri
atgtcggcggcgcaccgtctttaccctttgtcattcctggctgcgttggtgctggcagggtgtagtagccagccttcgcaaccgctgaaaaaaggggaaaaacctgtcgatgtggcaagcgtagtgcgccagaaaatgcccgccagcgtaaaagacagggacgcgtgggcgcaggacatcgcaaagaccttcgaaagccaggggctggcgccaacggttgagaatgtttgctcggtgctggcggtggcgcagcaggagtctaactatcaggcggacccggtggtgccggggttgagcaaaatcgcctggcaggagatcgacaggcgtgctgagcggatgcatatccctgtttttctggtgcataccgcgctgaaaattaactccccgaacggaaaaagctacagcgaacgtctggacgcggtgaaaacggaaaaacagctcagcgcgatttttgatgattttattaatatggtgccgatggggcagacgctgttcggttcgcttaatccggtgcataccggcgggccgatgcaggtcagcatcgcctttgccgaacagcacacaaaaggttatccgtggaccatgaacgggacggttcgccaggaggtctttagccgccgtggcggactgtggtttggaacctggcatctgttgaactatccggcgaattacagcgcgcctgtattccgttttgctgattttaatgccggttggtacgccagtcgtaatgcggcatttcagaatgcggtcagtaaagccagcggcgttaagctggcgctggacggcgacttgattcgttatgacagcaaagaggccgggaaaacggaacaggcaatccgtaagctggcgggcaagctggacatgagcgacagcgcgattcgacgtcaactggaaaagggagacagcctcgcttttgaggagacggcgttgtacgagaaagtgtataagctggcggaagccaaaaccggtaaggcattaccgcgcgagatgttgccaggtattcagctggaaagtccgaagatcacccgtaatctcactaccgcgtggtttgctaaacgtgtggatgagcgtcgggcgcgttgtatgaatttgtag

SEQ ID NO: 71658 - DNA, 1221 bp, Citrobacter koseri
atgtttaagtcttttttcccaaagccggggccgttttttatctcggcgtttttttgggcgcttgtcgccgtcattttctggcaagcgggcggaggcgcctgggttgcgcatcttactggcgcttccggtgatgttcccatcagtgccgcacgcttctggtcgctggattacctgattttctacgcgtattacgtcctttgcgtcggattgtttgcgatgttctggtttatttatagcccgcatcgctggcaatactggtcgattctgggcacctcgttgatcatctttgtgacctggtttttggtggaagtgggcgtggcggtcaacgcctggtacgcgccgttttacgacctgatccagacggcgctgagctcgccgcataaggtcactatcgaacagttttaccgtgaagtcggcgtgtttctcgggatagcgctgattgccgtagtgattggcgtgatgaacaatttcttcgtcagccactatgtgtttcgctggcgtaccgcgatgaacgagcactacatggcgcactggcagcatttgcgccatattgaaggcgccgcgcagcgtgtgcaggaagatacgatgcgttttgcctctacgctggagaatatgggcgtaagctttatcaatgccatcatgacgttgatcgcctttttacccgtactggttacgctgtctgcgcacgtaccggacctgccgatcgtcgggcatattccttatgggctggttatcgcggctatcatctggtcgctgatgggaacaggattgctggccgtggtggggatcaaactgccggggctggagtttaaaaaccagcgggttgaggccgcttaccgtaaagagctggtctacggtgaagacgacgccagccgcgctacgccgcccaccgtgcgtgagttgttcagcgcggtgcgccggaactatttccgcctctacttccactatatgtacttcaacattgcacgcattctctatctacaggtggataacgttttcggtctgttcctgctgtttccgtcgattgttgccggtacgattacgctgggcctgatgacgcagattaccaacgtgtttggtcaggtgcgcggttccttccagtatctgattaattcctggaccacgctggtggaactgatgtccatctataaacgtctgcgcagctttgagcgcgaactggatgggcaggatatccaggaagtgacgaatacatttagctaa

SEQ ID NO: 71659 - DNA, 1158 bp, Citrobacter koseri
ttgaaacgtagtctgcttttttctgccgtgctgtgcgcggcgtcattgacatctgtccaggcggcacagccaatcaccgatccggttttcgcttccgatatcgttgatcgttatgccaaccatatcttttacggcagcggcgcgacgggaatggcgctggtggtgattgatggtaatcaacgcgtgttccgcagtttcggggagactcgccccggcaataacgtacatcctcaactggactccgttattcgcattgcgtctatcacgaaactcatgaccagcgagatgctggtcaaactgctcgatcaggggacggtgaaattacacgacccgctgagcaagtatgccccgcccggggcgcgcgtaccgacctacaacggaacgcctatcaccctggtgaatctggcgacccataccagcgccctgccgcgtgagcaacccggcggcgcgccgcatcgcccggtatttgtctggccaacccgcgaacagcgctggagctacctctctaccgcaacgctaaaagcggctcctggctcgcaggcgtcttattccaaccttgcgtttgacctgttggctgacgcgctggcaaccgcatccggcaaaccctacacgcagttatttgaagaacagattacgcgcccattggggatgaaagacacaacctttaccccctcccccgatcagtgcaagcgcctgatggtggcggagaaaggggccagtccctgtaacaacacgctggcggcaattggcagcggcggcgtctattccacgccgggagatatgatgcgctggatgcagcaatatctctcatccgacttttatcatcgcagtaatcaggccgatcgtatgcagacgctgatttatcagcgaactcagctcacacgggtgacaggtatggacgtgccgggcaaagccgatgcgctgggcttaggctgggtctatatggcgcctaaaaacggacgtccggggattattcaaaaaaccggcggcggcggtggtttcatcacctatatggcgatgattccgcaacacaacgttggcgcttttgtggtcgtcactcgctcaccgcttacgcgatttactaatatgagcgatggcatcaacgacctggtaacagaattgagcggaaataaaccgctgatcgtgcctgcgtcctga

SEQ ID NO: 71660 - DNA, 624 bp, Citrobacter koseri
atgctgtctctgaataaaccacttcaggaatttagtaagctcgataagtgcctgtctaaatacggcacgtactttgaatacgccgatgaaaagcagattgtctattcgaatgatgccaatcaaggcgatacgtttgtcattttagacggtctcatctctttgcgcagaggggagaacgtgcttatggggataacgcaggctccctttattatgggtattgctgatggcgtgatgaaaaatgatatcgaatataaattagtcacggaaagtcgttgtaccggttattttcttccttcttcccacgcgataaaaatccttgagcaacaccagttatggcgtgaagccttttgctggctggcatgggaaaacagaactctggaactgcgcgatctgcaattaattggcaacaactcgtatgatcaaattcgggcgacgttgatcgcgatggttgactgggatgaaggcctgcgagcgcgtattggcgtgatgaactacattcatcagagaacgcgaatttcccgttccgtagtggctgaagtgctcgccgcgttacgcaaagggaactacatcgaaatgaaaaaaggcaaactggtcaatatcaaccatttgccttcagagtattga

SEQ ID NO: 71661 - DNA, 2922 bp, Citrobacter koseri
atgcactcctggaaaaagaaacttgtagtctcacaattagcactggcctgcactctggcaatcacctctcaggcaaatgcttctacggatatttctggaaccacctacacaacattcaaccactataacgacgcaacctacgctgatggtgtttattatgatggttacgtaggctggaacaactacgcgaccgatagcgtttataacggtgatatttatccggttatcaacaacgctaccgttaacggcgtaatctcaacctactatctggatgatggtctttctaccaacaccaacagtaatagtctgacaatcaaaaacagcaccattcacgggatgatcacctctgagtgcatgaccaccgattgtgtgggtcgcgatgcgaccggttatgtttatgaccgtctggcgctgactgttgataactcaaccatcgatgataactacgagcattatacctataatggcacgtacactgatggtacggcggatacgcatgttgttgacgtttacaacctgggtactgcgattacgctggatcaggaagttgacctggtcatcaaaaataattcccacgttgcgggtattacgctgactcagggttatgagtgggaagacattgacgataataccgttagcaccggcgtcaacagcgctgaagtgttcaacaacaccgtcacggtgactgactctacggtgacctctggctcatggtcagatgaagggacttccggttggttcggtaacaccaacaacgcgagcgattacagcgattcttatactgctgatgacgtggcgattgcggcgattgcgcatccgaatgcggataacgcaatgcagaccactgttaacctcagcaattctaccctgatgggcgacgttgttttctccagcaactttgacgaaaacttcttcccgaacggggcggatacttatcgcgatacggacgctgacctggacaccaacggctgggatggcactgaccgtatggatgttacgctgaacaacggcagcaagtgggttggcgcggcaatgtccgtacatcaggttgattctgatggggatggcgtgtacgacagctttgctgcgggcaccgatgccactgcgacgctgatcgacattgcggctaacagcctgtggccttcctctacttacggcattgacaataatgacaccgcgtatggcgaagatggtcatgttgttggtaacgaagtctatcagagcggcctgttcaatgtgacgctgaacggtggttcacagtgggataccacgaaaacctcgctgattgatacgctgagcatcaacagcggttccgtcgtgaatgtggcagactctgatctggtttctgacagcatctccctgaccggtggcgcggccctgaatatcaatgaagatggtcatgttgcaactgatgaactgacaatcaacaacagtaccgttacgattgctgatgatgtgtctgctggctggggcgtgtacgatgccgcactgtatgcaaacaccatcaacgtcaccaacaacggcgttctggatgtgggcaacagcaccgcgtatgcgctgcaagctgataccctgaatctgaccagctacaccgatgctaacggtaacgtgaatgcaggtgtcttcaacgttcacagcaacagctttgtgctggatgccgatctgactaacgatcgcactaacgacatcactaagtctaactacggctacggtgtgatcgcgatgaactctgatggccacctgaccatcaacggtaatggcgatgcctggactggcgatcaatctgaagtcgataacgcgggtgataacgttgctgcggtaaccggtaactacaaagtgcgtattgataacgcgaccggtgaaggttctgtcgctgattacaaaggcaaagagctgatctacgttaacgacaagaacagcaaagccaccttctccgcagcgaacaaagctgacctgggggcatacacctatcaggctcagcaggaaggcaacactgttgttatgcaacagatggaactgaccgactacgcgaacatggcgctgagcatcccgtctgcaaacaccaatatctggaacctggaacaagacaccgttggtactcgtctgaccaactctcgtcatggtctggctgataacggcggagcatgggtgagctacttcggcggcagctttgatggcgacaacggcaccattaactacgatcaggatgtgaacggcatcatggtcggtgttgataccaaaattgacggtaacaacgctaaatggattgtcggtgcggcggctggctttgcaaaaggcgacatgagcgaccgtaccggtcaggtggatcaggacagccagtctgcctatatctattcttccgctcgctttgccaacaatgtctttgttgatggtagcctgagctattctcacttcaataacgatctgtctgccaacatgagcaacggccagtacgttgatggcaacacctctgcggatgcgtggggctttggtctgaaactgggttatgactggaaactgggcgacgctggctatgtcacgccgtacggtagcgtatccggcctgttccagtccggcgatgattatcagctcagcaacgacatgaaagttgacggtcagtcttatgacagcatgcgttatgaactgggtgttgatgcaggttataccttcacctacagcgaagatcaggcgctgacgccttacttcaaactggcctatgtttatgacgacgcgaataacgacgccgacgtaaatggtgattccatcgataacggcgtagaaggctctgcggtacgtgttggtctgggcactcagttcagcttcaccaaaaacttcagcgcttataccgatgccaactacctcggtggtggtgatgtcgatcaagactggtccgcgaatgtgggcgttaaatacacctggtaa

SEQ ID NO: 71662 - DNA, 975 bp, Citrobacter koseri
atgacagacctaatccaacgcccccgtcgcctgcgcaaatccgctgcgctgcgcgccatgtttgaagagacaacactcagtttgaacgacctggtgttgccgatttttgttgaagaagaactcgacgactacaaagcgatcgacgccatgcctggcgtcatgcgcattcctgaaaaacatctggcacgcgagattgaacgcatcgccaacgccggcattcgttcagtgatgaccttcggcatttcccaccataccgacgacaccggcagcgatgcctggaaagaagacggcctggtggcgcgcatgtcgcgcatctgcaagcaaaccgtgccagaaatgatcgtgatgtctgacacctgtttctgtgagtacacctcccacggtcactgcggcgtgctgtgcgaacacggcgtcgacaacgatgcaaccctggcgaacctcggtaaacaagcggtggtcgccgccgctgcgggcgctgattttattgccccttccgccgcgatggacggtcaggtgcaggcgattcgccaggcgctggatgccgccgggtttacggatacggccatcatgtcctactccaccaagttcgcctcctctttctacggcccgttccgtgaagcggccggtacggcactgaaaggcgatcgtaagacctatcaaatgaatccgatgaaccgccgtgaagcgattcgcgagtcgttgctcgacgaagcgcagggcgcggactgcctgatggtgaaacctgctggcgcttatctggatattctgcgtgatatccgcgatcgtaccgaattaccgctcggcgcgtatcaggtcagcggcgaatacgccatgatcaaattcgccgcgatggcgggcgcaatcgacgaagagaaagtggtgctggaaagcttaggctcgatcaaacgcgcgggcgcggatctgatcttcagctacttcgcgctggatctggcggagaaaaaaatcctgcgttaa

SEQ ID NO: 71663 - DNA, 1716 bp, Citrobacter koseri
atgtttagtctcgataacgtactcgacgacctgtggcctcaggcgaggccgacaccctggcaaaaaaatctgctcaggcggttgctgtatgaagaagaatttcagcaatttgcatcccgccatccccatctgaaaggggtggacatggtggaacaggttctcgaacaccttgaaatacgctgcgatatccccgcacacgacctcgaaaacatcccctcacatggcccgctggtcatcattgccaaccacccgacaggcacgcttgatgggctggccctgctgtatgccatctcgcgtgtgcgccgtgacgtgaaagtagtgaccaaccgcctgctctcacatctgcaaccgctcagctcacttttcattcccgtggacaacatcggcgggcgcacgccaaaatcatcgctacaacagatagatgcgcatttacaggccggcggagcgttaattttctttccggcgggcgaagtggcgcgcttcacatcgcagggaatcagggaaggccgatggcattccgggtttatccgggtggcggagaaataccgcacgccgttgcttcccgtacatatcaacgcgcgtaacagctcgctgttttacgccagcagcctggtgtcccccaccttcgcattgctgctcctgatgcagcagatgtttcgtcggcgtcgcagcagcctgccgctccgcatcggccaacaaatcgcatggacgcagtggtccgccacgaaaaccaacgtccgcgagcaggccgaaaaatgccgtcagcacgtcgcggcattaggtaaaggacaccccgggttattcaccaccgaaagtacgatagcccgcgcagaagacagagcgcacctcaaacgcgatctcgcccaggcggaatgccttgggcacaccgccgacgggaagcacatttacctctggcagcgcaacggcaaagaggatgtccccatcctgcgggaactggggcggctgcgtgaaatcgcctttcgcgcggttggcgaaggcagcggaaagcgtcgggacaccgaccgctatgatgacgactatctgcacctgattttatgggatgaagacgatctggaaattgttggcgcctatcggttcattccctgcgcgcagcagcaggaaaaacgtggcatagaagggctttacagctacagtttgttccattacgacgagcagatggcgcaagtgatgcagcacggcattgagctgggtcgcagttttatccagccgcgttactggggacgtcgcgggctggactatctctggtctggcattggcgcttatctggcgcgctatccgcaataccgatacctgttcggcccggtgtctatttccggcggtctgcctgcggatgcgcgggatttactggtggccttttatcgcctgtggttcccgccaacgcacccgctggcgatatcacgccagccctaccccgcgtcattgccggacgtactggcgcagtttgaaggcaaaagctacaacgacgatctgacgcggctgaaatcgctgctcggcaatctgggctgcggtattcccccgctctacaaacaatactccgaactttgcgaccccggcggcgtgcagtttattgatttcggtaacgatccggcattcagcaactgcgtggatggtctggtgctggtcgatttaacctatctgaaggcaaacaggtatcagcgctatattggcgcgcatttgggtttccaggcagaataa

SEQ ID NO: 71664 - DNA, 852 bp, Citrobacter koseri
atgagtgaacgtctgagcattaccccgctggggccgtatattggcgcgctggtttccggcgcggatctgacccgcccgctgagcgataatcaattcgaacagctgtatcacgcggtgctgcgccaccaggtggtttttctgcgtgaacaagccattacgccacagcaacagcgcgcgctggcacagcgttttggcgatctgcatattcatccggtctatccccacgccgaaggcgtcgaagagattatcgtgctggatacctataacgataacccgccggataatgataactggcacaccgatgtgacctttattgagacgccgccagcaggggcgattctggcggcaaaggaactgccctctaccggcggggatacgctatgggccagcggtattgccgcatatgacgcgctttccgaaccgtttcgccagttgctgagcggtttgcaggcggagcatgatttccgtaaatcgttcccggaatacaaataccgcaaaactgatgaggatcatcagcgctggcttgaggcggtagcaaaacatccgcctttgctgcatccggtggtgcgtacccatccggtgagcggcaaacaggcgctgtttgtgaatgaaggctttactacgcggattgtcgatgtgacggagaaagagagcgaggcgctgcttggattcttgtttgcgcacatcacaaaaccggagtttcaggtgcgctggcgctggcagcctgatgacgtagccatctgggataaccgcgtcactcagcattatgccaacgctgattacctgccgcagcggcgcattatgcaccgggcgacgattctgggagataagccgttttatcgcgcaccgtaa

SEQ ID NO: 71665 - DNA, 828 bp, Citrobacter koseri
atgagcgtggtcatcaacgataagctgcgtcaacgcgggttgaaatggcgctggccgttctctcgtcgcattaccctgagtatcagcacattagcggtgattctggccgtgtggtggagcgtagcggagttgcagttaatcagcccgctgtttctgccgccgccggggcaggtgctgcaaaaactgatcgccatcgccgggccgcaaggatttatggacgccacgctgtggcagcatctggcggcgagcctgacgcgcattctgctggcgctgctggccgccgtgattatcggcattccggtgggcattgcgatggggctaagcccaacgatacgcggcattctcgatccgatcattgaactctaccgacctgttccgccgcttgcgtatttaccgctgatggtgatctggttcgggattggcgagacctccaagatcctgctgatctatctggcgattttcgccccggtcgccatgtcggcgctggcgggcgtcaaaagcgcgcagcaggttcgcattcgtgcggcgcagtcgttaggcgccggacgagtacaggtattgtggtttgtgattctgcccggcgcgctgccggagatcctcaccggattacgtattggcctgggcgtgggctggtcaacgctggtggcggctgagctgattgccgccacccggggtttagggtttatggtgcagtccgccggggaatttctggcaaccgacgtggtgctggcggggatcgcggtgattgcagtgatcgcgtttattttagaactgggtctgcgtgcgcttcagcgccgcctgacgccctggcatggagaagtacaatga

SEQ ID NO: 71666 - DNA, 768 bp, Citrobacter koseri
atgctgcaagtttcccatctctttgctgattacgccggtaaaccggcgctggaagatatcaatctgacgctcgacagcggtgagctgttagtggtgctgggcccgtcagggtgtgggaaaaccacgttgctgaatctgatcgccggttttttgccttatcagcacggcacgatccaactggcgggcaaacgggtcgatgggccgggtgcggagcgcggcgtcgtctttcagaacgaagggctgctgccctggcgcaacgtgcaggataacgtcggacttggcctgcaactggctggagcggacaaaacccggcgtcagcacgttgcgcagcagatgctgaaaaaagtcgggctggaaggggcgggaaaacgctttatctggcagctttccggcgggcagcgccagcgtgtcggcatcgcccgcgcgctggcggccaatcctcaacttctgctgctggatgagcctttcggcgcgctggacgctttcacccgtgagcagatgcaaacgctgctgctgaaactctggcatgagaccggcaaacaggtgttgctcattacgcatgatattgaagaggctgtgtttatggcgacggagctggtgctgctttctcctggccccggtcgcgtgcaggagcggctgtcgcttgatttcgcccgccgctttgtggggggcgaatcctgccgcagcattaaatccgatccgcagtttatcgagacgcgggagtatgtgttaagccgcgtctttgaacaacgggaggccttctcatga

SEQ ID NO: 71667 - DNA, 963 bp, Citrobacter koseri
atgggtatttcatcgcgtaacacacttctcgccgcactggcgtttattgcattccaggcgcaggcggttaacgtcaccgtcgcgtatcagacatccgccgaaccggcgaaagtggcgcaggcggataacaccttcgccaaagagagcggggcgaccgttgactggcgtaaattcgacagcggcgcgagcatcgtgcgcgcgctggcttccggtgatgtacagatcggcaaccttggctccagcccactggcggtcgccgccagccaacaggtgccgattgaggttttcctgctggcgtcaaaactgggggaatccgaagcgctggtggtgaagaaaacgatcgctaagccggaggatctcatcggcaaacgcattgcggtgccgtttatctccaccacccattacagcctgctggccgcgctgaaacactggggcattaagcccgggcaggtcgaaatcatcaatctgcaaccaccggcgatcattgccgcctggcagcgtggcgatattgacggcgcttacgtctgggcacccgccgttaacgcgctggaaaaagacgggaacgtgctgacagactcagggaaagtcggcgaatggggctcgccgacgctggatgtgtgggtagtgcgtaaagacttcgcggaaaaacatccagaggtggtcaaagcattcgcgaaaagcgccatcgacgcgcagcaaccctatatcgccaatcctgaggcgtggcttcagcagccggataacatcagcaaactgtcgcgcttaagcggcgtgccggaaacggacgtgccggggctggtgaaaggcaatacctacctgacggcgcaacagcaggccgttgagctgaacgggccggtcaataaagcgattatcgacaccgcgcagttcctgaaagagcagggcaaagtgcccgccgtcgcgacggattacagccagtacgtcaccgatcgctttgtgcaataa

SEQ ID NO: 71668 - DNA, 630 bp, Citrobacter koseri
atgattcgtgtggtgctggttgatgaccatgtggtggtgcgttccggctttgcgcaattattaagtcttgaagacgatctggacgtagcaggccagtacagcagcgcggcggaagcctggcccgcattattgcgcgatgacgttaacgtcgcggtgctggatatcgcgatgccggacgaaaacgggctgagtctgttaaagcggctacgcgcgcaaaaacccacgtttcgcgccatcgtcctcagcatttacgacacgccagcgtttgtacaaagcgcgctggatgcaggcgccagcggctatctgaccaaacgctgcgggccggaagagctggttcaggcggtgcgttccgtcggtatgggcggccactatctgtgcgccgatgcgttgcgggcgctgcgcggcggtgaacagccggcgcaggtgctggaggtattaaccccccgtgagcgagaagtttttgatttactggtcaaaggcgacagcgtcaaagagatcgcatttaagctcgacctcagccataaaaccgttcacgtccaccgtgctaacgtactgggtaaattgcagtgccacagtaccatcgagctggtgcatttcgccctcgaccaccagttgctgacggggcactga

SEQ ID NO: 71669 - DNA, 1542 bp, Citrobacter koseri
atgtctcgcggcgtgcgttactgggtgatctcactgtttatcctgctggcctggggaacaggttggctgatgctatggacgctgggcttttacctgacccataacggccaacaggcggcgctctttttgccgcacggcgtttatcttgcgctgttgattttactctcccgccgttactggcccgcgctgatactgccgccggtgctgatgccgttatggctccatagcgagcaactgctcagcggctacgtcctgctggcggcgccgctgatctgcctgatcccggccagcatcggacaaaaattctggcaccgttttcccctgtactggcagcgtctcacgctgctgctggccgccgtcacgctggcctcgctgctgaataccgccctgctgtcgccctttataaaaagcccggcaatgctgactggcctggcgtcgtttaccggcggcgtgctgctcaccccctttgtttatctggtatttgaatttttacgccagcagcaccgttatcatctgttggggctggataccaacaacccgccgctgcgcacttcgctgatcatctggtgcagcctgttctttattatcggcatcggcacgcaaatggtgctgtcgccggaaattgaacgcctgctgctgatcgtggtgttcctgcctaacgtggtgatggcgtggaagtttggctggcagggcggcgtgctctccggtctgctgggcagcatgatgatcaccatcgctcgccaggtcggcgtcgggtttaacaacctggtcgagctggagattttcctcgccacccaggcgctactcggcataggtcttgggatcgccatcagccgccagcagcatctggcgcaaaacctgcaccactatcgccagcgtctggaggcggagctggcggcacgccgggcgctgaccgaaaagctgatccataccgaagaggatacgcgcaaaaacctggcgcgcgagctgcacgacgagatcgggcagaacatcaccgccattcagatccagtcacagctcgtgaaacgcgcgcgcgatccggcgcagacgcaggccgccgccagccagataaacgatctcgcccgccgtattcaccactctacccgccagctgttacgccagctacgtccccccgcgctggatgagctgtcgttcaaagaggcgctgcatcatctggtcaacgaattcgcgttccccgaacgtgggattcgctgccagtttgagtatcgccttacgcttaccccggaaaatgaaaccgtcaggtttaccctctaccgcctgttgcaggaactgctgaacaacgtctgtaaacatgccgaagccagcgaggtcacgattctgttaagccagcagaaacagaccctccatctggaagttcgggacaacggcaccggcatccagcctgaaaaaatgccgggattcggtattcaggggatgcgcgaacgggtcagcgcgctgggcggcgaactgacgctcgaatcgctgcacggcacgcgggtaattgttaacttgcccacaattttgcaacaaaccacgtcctga

SEQ ID NO: 71670 - DNA, 1305 bp, Citrobacter koseri
atgcacccacgttcaataagcgaaacagaccaacgataccgggcgctacgcctgcggttgctgatgtgcatggtcattgggtatgccgcgttttacctgacgcgaaaaagcgtgaattacgtgcttccggcgctgcaaacggatctgggactcgataaaggcgatatcggcctgttgggttcattgttttacctgacctacggcctgtcgaagtttaccgccgggctgtggcacgacagccacgggcatcgctggtttatgggcgtcggcctgttcgccaccggcctgctgaatgtggtgttcgcctttggcgagtcgctgacgctgctgctggcggtctggacgctgaacggtttctttcagggctggggatggccgccctgcgcccgactgctgacccactggtattcgcgcaacgagcgcggcttctggtggggctgctggaatatgtcgatcaacatcggcggggcgattatcccgctgattagcgctttcgccgcccactggtggggctggcaggcggcgatgctggcgccggggatcatcagcatggcattaggtatctggctcacgctacagctgaaaggcacgccgcaggaagagggattgccaacggtcggcgcatggcgtcatgacccgctggagctgcgccaggagcagcaaagcccgccgatggggctgtggcagatgttgcgcaccacgatgctgaaaaacccgatgatctggctgctgggcgtctcatatgtgctggtctatctgatccgcatcgccctcaacgactggggcaacatctggctcacggaaagccacggcgtcaatctgctcagcgccaacgccacggtgatgctgtttgaagttggcggtctgctcggcgcgttgttcgccggttgggggtcggatttgctgttcagcggccagcgcgcgccgatgattttgctgttcacgctggggctgatggtgtccgtcgccgcgttgtggttagcgccggtacaccattacgcactgctggcggtctgtttctttacggtgggctttttcgtttttggcccgcaaatgttgattggccttgccgccgtcgagtgcggacacaaagcggcggccggttccatcaccgggtttctcggcctgttcgcctatctgggggcagcgctggcgggctggcctctgtcgctggtcattgaacgctacggctggtcgggcatgttcagtctgctctcggtcgccgcggtacttatgggtttattgctgatgccgctgctgatggcgggcatcaccacctcgctcagtcaaaggataaaacaatga

SEQ ID NO: 71671 - DNA, 1032 bp, Citrobacter koseri
atgaaattgacgcttacctctaccctgattgcatccggcattgcgctggcaaccttaaccggcgccgcgcaggccaaaggccgcctggtggtttattgcagcgccaccaacgaaatgtgcgaagcagaaaccaaagcgtttggcgacaaatatgacgtcaaaacctcgttcatccgcaacggctccggcagtacgctggcgaaagtcgatgccgagaagaaaaacccgcaggcggacgtctggtacggcgggacgctggaccctcagtctcaggcgggtgaaatggggctgctgcaaccctacaagtctcccaatcttgagcaggtcatggagaaattccgcgatccagcgaaagtaaaaggcaacctctcttcagcggtgtatgtcggtattctcggctttggcgtcaacacccagcgcctgaaagagaaaaatctgccggtgccaaaatgctggaaggatctgaccaaaccggaatacaaaggcgagatccagattgccgacccgcaaagttcaggcaccgcgtataccgcactggcgaccttcgcccagctgtggggcgaagatcaggcctttgattacctgaaacagctcaacgccaacgtgtctcagtacaccaaatccggtattgccccggcacgtaacgccgcccgtggcgaaaccgctatcggcatcggcttcctgcacgactattcgctggaaaaagaacaggacgcgccgctggagctgatctctccgtgcgaaggcaccggctatgaaattggcggcgtcagcatcctgaaaggcgcgcgcaatctcgacaacgccaaactgttcgtggactgggtgctgtcaaaagaagcacaagaactggcgtggaagaaaggcaagtcttatcagatcctgaccaacaccacagcagaaacgtcaccgaactcgctgaagctcgacgacctgaagctcatcaactacgacatggataaatacggttctaccgacgtccgtaagcagcttatcaataagtgggttagcgaagtgaagatgggtaaataa

SEQ ID NO: 71672 - DNA, 2079 bp, Citrobacter koseri
atgtcacacacacttgcacaccatcccgtgaaaaaacgggatgcgatattcttttgggttctgctgggctggctggcgtttgccctgctgccgagctggagtctggattacggcctgctggagtccacgggcgatgaaatccttgaatcctacggctggtcacagcgcaatatcagttggctgtggtatctgctgccgagcctgctgctgattcgcccgttccatgaagccaggcgcgaacagcgcagccgccattaccttgatgcgggctgggcgctgttgtgtatggcctttatcgtcatcagcgccaccgttgaaggccgtggtttaggctacgccactatcgtgctgttcgtcgcgctgggcgcgatcatgacgctggcgttgacccgtctggaatggctgggcggcgaccgcttcgtgatcggctcacttaccgccattgtggcgctgatcggcatctttatcgtctggccgagtatcgcgattttcatcccgatgttcaccaacgacgccggggaattcgcgccgctggcgtttatgacggtgctgtcgcaggcgcatatcatccaggtgatcctcaactccatcgccctgtcgattgcggtgggcgtgggctgtaccttcttcggcctggtgctggcgatttacaccacccgcattgccaaacgcagcgccattattggccgcatcttctcgattttgccaatcgtcacgccgccgttcgtagtgggtttaggcgttacgctgatgatgggacgctccggctacgtcaccgaatttatggtcgagtggttcgggctgaccaacaccaactggctgtacgggtttaccggcatctggctggcgcaggtgctggcattcaccccgatggcgtttatgatcctcgacggggcgatcaaaaccattcatccgtcgctggaagaagcgtcatataccctgcgcgccagccgctggcagacctttaacggcgtgtttgtcccgctgctgaaaccggcgctggcgaacgcctttttaattgtggtggtgcagtcgctggccgacttcagtaacccgttggtgctcggcggtaacttcgacgtgctggcgacgcagatctatttctatatcaccggttcgcagcttgattatcaggccgccagtacgctgggcgcgttcctgctgctgttctcgctgctggtgttctgtgtgcagtatatgtggatcggtaagcgctcttacgtcacggtctccgggaaatcgtaccgtggcgacgtccagccgctgcctgtcaccctggtgtggagcgtcatcgccattctggccgtgtggatagccttcaacgccctgctctacggcagcattttctacggtagcttcaccgtcaactggggcgtggattacaccctgacgctggcgaactttatcaagctgttcggccagggtatgagcgacggcgcgtggccctccctgcttgatacgttgctctacgccggaattgccgcgccgatcaccgccatcttcggtctgctgatcgcctggattgtggtacgccagcagttcaaaggcaaaaagactatcgagttcaccaccatgctgtgcttcgccgtaccaggcaccgtggcgggcgtgtcgtacatcctcgcctttaacagcgccccggtgtacctcaccggaacggcggcgattgtgattatttcgatggtgatgcgtaacgtgccggttgggattcgcgccgggatcgccggattaggccagatcgataaatcgctggatgaagcgtcgctcagcctgcgcgccgggagcttacgcaccattacgcacatcctgctgccgctgctgcgcccggcgatcctctcggcgctgatctacagctttgtgcgcgccattaccaccgtcagcgccattgtattcctcgtcacgccagacacccgcgtggcgacggcctacatcctcaaccgcgtggaagacggcgaatacggcgtggcgatcgcctacggctcgattctgatcgtggtgatgctggcgattattttcatctttgactggctgatcggggaagcgcgtatctcccgttcaaaagccaaaaaccaggcgtaa

SEQ ID NO: 71673 - DNA, 1047 bp, Citrobacter koseri
atgagtcagaaaaattttgttgaactgcgcaacgtcaccaaacgattcggcagcaacacggttatcgataatatcaatctcaccatcccgcaggggcaaatggtgacgctgctcggcccttccggctgcggcaaaacgaccattttgcgtctggtggccgggctggaaaaaccgagcgaaggacagattttcattgatggcgaagacgtcacccatcgctctattcagcagcgtgatatctgtatggtctttcagtcttatgccctgttcccgcacatgtcgctgggggaaaacgtcggctacggtctgaagatgcttggcgtatcgcgcagcgaagtgaaagcccgtgtgcaagaggcgctggcgatggtggatctggaaggattcgaagaccgctatgttgatcagatctccggcggtcagcagcagcgcgtggcgctggcgcgcgcgctgatcctcaagccgaaggtgctgctgtttgatgagccgttaagtaacctcgacgccaacttgcgtcgcagcatgcgcgacaagatccgcgaactgcaaaagcagtttgatatcacctcgctgtacgtcacccacgatcaaagcgaagcctttgcggtttccgataccgtgctggtgatgaacaaggggcatattatgcagatcggttcgccgcaggatctctaccgtcaacctgcgtcacgctttatggcgagctttatgggcgatgccaacctgttcccggcgacgttcagtcaggagtatgtggatatctacggctaccggctgccgcgcccggcgcactttgccgcccagggttccggcaccgttggcgtgcgcccggaagcgattaccttgagcgatcgcggcgaagagagccagcgctgtgtgattcagcatgtcgcctatatggggccgcagtatgaggtgacggtggcgtggcacggacaggagattttattgcaggttaacgccacccgattgcagccggacgtgggggaaaattattacctcgaaatccacccgtacgggatgtttgttttagcagacgctgtgtaa

SEQ ID NO: 71674 - DNA, 933 bp, Citrobacter koseri
atgtcgcaacataatccgttgagcgccatcctcgataaacaggatttcctgttgctggacggggcgatggcgacggaactggaagcgcgcggctgtgatttagccgatagcctgtggtcagcgaaggtgctggtagaaaacccggcgctgatccgcgaagtccaccttgattactaccgggcgggggcgcaatgcgcgattaccgccagctaccaggcaacgctcgcaggacttgccgcgcgtgggtttgatgaagcgcagtcgaaagcgctgatcggcaagagcgtggaactggcgcgcaaagcgcgggaagcgtatctggctgagaacccgcaagcgggcacgctgctggtggcgggttccgtcgggccatatggcgcgtatctggccgacggtgcggaatatcgcggggattacgtatgtactcccgaagcgttccaggcttttcatcgcccgcgtgtggaagcgctgctggatgcgggcgttgacctgctggcctgcgaaacgctgccgaattttattgagattaaagcgctggctgagttgttaaccgaatatccacgggcgcgggcatggttttcgtttacgctgcgcgacagcgagcatctgagcgacggtacgccgctgcgtgacgtggcgacgtttctcaacgcctgcccgcaggttgtggcgactggcgtaaactgtatcgcgctggaaaacgtcaccgccgcattgcagcatttgcacgggctgaccgcgctgccgctggtggtttatcccaattcgggcgaacggtacgatgcggtaagcaaaacctggcatcatcacggcgaagcgtgcgccacgctggcggagtatttaccgcagtggctggcggcgggtgcgaagctgattggcggctgttgccggacgacgccgaaggatattgctgaattgaacgcgcaacgttga

SEQ ID NO: 71675 - DNA, 1083 bp, Citrobacter koseri
gtgaaaccggtaacgctctatgatgttgcagaccgtgcaggcgtctcttatcagaccgtctctcgcgtggtgaatcaggccagccacgtttccgccaaaacccgtgaaaaagtcgaagccgcgatggcggagctgaattacattcccaatcgcgtcgcgcagcagctggcgggtaaacaaaccccgctcatcggcgtcgccaccgctaacctcgcgctgcacgcgccgtcgcaaattgtcgcggcgattaaatcccgcgccgacaggtcaggcgccagcgtggtgatcgcgatggtagagcgcaacggagtagacgcctgcaaagcggcggtgcataacctgctggcgcagcgggtaagcgggttgatcatcaactacccgcttgatgagaacgatgccattgccgttgccgccgcctgcggcaacgtgccggtactgtttctcgacgtatccgatcggttccccgttaacagtattattttttcccatgacgacggcgcgcgtctgggcgttgagcatctggtagaacacgggcaccagcgcatcgcgttgttgacagggccgcgctcgtccgtctctgcgcggctaagactggcgggctggcataaatatctgacccactatcagttgcgaccggtggcagaaacggaaggcgactggagcgcgatgtccggcttccagcaaaccatgcagatgctcaatgacggaacgatgcccaccgcaatactggtggctaacgatcagatggcgctgggcgccatgcgggcgatcgccgagtttggcctgcgcatcccgcaggatatctcggtgataggctacgatgacaccgaagacagcgcctgctacatcccaccgctgaccaccatcagacagaatttccccctgcttggcgcaaccagcgtcgacaaactgctgcaactctcccgtggcgaacccgccaccgataaccagcgactccccgtttcattggttcagcgtaaaaccgtgcagccccccaatgctcaggtcacttctccgcaggcgttggccgactccctgatccaactggctcggcaggtttcgctgttagcgccgaaaatgtga

SEQ ID NO: 71676 - DNA, 3078 bp, Citrobacter koseri
atgccccagaatgcagattcactcgccgtcgttctgaaacgtcgcgactgggaaaaccctggcgtaacgcaacttaatcgcctggaggcgcaccctcctttttgcagctggcgtaatgccgatgacgcccgcgagaaccgtgactccgcacacaagcgcagcctgaacggtgaatggacgtttgcctggttttcggcgcctgaagcagtaccagagagctggcggacaagcgatctgcaacaggcgaatagcgtgcgcgtgccgtctaactggcaaatggacggttacgacgcccccatttataccaacgtcacctatcccattccggttaacccgccgttcgttccggcagataacccaaccggatgttactcgctcacattcagtattgacgcagactggctacaggcaggccagacgcggatcatttttgatggcgtgaactccgccttccatttgtggtgcaacggtcgctgggtcggatacggtcaggacagccgtctgccgtctgaattcgatctcacgcattttttgcttaagggtgaaaaccgcctcgcggtaatggtgctgcgctggagtgacggcagctatctggaagatcaggatatgtggcggatgagcggcatttttcgcgacgtctcgctgctgcataaaccggcaacacaaatccgtgacctgcgcatcaacacccgctttaacgatgatttcagccgcgcagtgctggaagcggaggtcagagcgacgggggaacgacgcgatgatttacgcgtgacggtgcagctgtgggatagcgaaacattcgtcggagaaaaaaccgccccgctcggcagcgagatcattgatgagcgcggcgcttaccctgatcgcacaacccttagtctgaatgtcgaacacccggcgctgtggagcgcggaggccccgcatctgtatcgtgccgttgtgcagctacacaccgccgatggcacgctgattgaagccgaagcctgcgacgtcggttttcgtcaggtcagcattgaaaacggtctgctgctgttaaacggtaagccgctgctgatccgcggcgccaaccgccatgaacatcacccggaaaacggccaggtgatggataaagagaccatgattaaagacattctgctgatgaagcagaacaattttaacgccgtgcgctgctcccattatccgaatcacccgctgtggtacaccctgtgcgatcgctacggcctgtacgtggtggatgaggccaatatcgaaacccacggcatggtgccgatgaatcgcctgagcgacgatccggtctggctgcccgccatgagccagcgcgtgacgcggatggtacagcgcgaccgcaaccatccgagcattattatctggtcactgggcaacgagtccgggcacggcgccaaccacgacgcgctgtaccgctggattaagtcggaagatccctcccgtcccgtgcagtatgaaggcggcggcgcgaatacggcggcaaccgacatcatttgcccgatgtacgcccgcgtcgatcaggatcagcccttccccgccgtaccgaaatggtcgatcaaaaaatggctgtcgatgccgggcgagcagcgcccgctgatcctgtgtgaatacgcccacgcgatgggcaacagcctcggcggttacgcgaaatactggcaggcgtttcgccagtatccgcgcctgcaaggcggttttgtctgggactgggtggatcagtcgcttatcaaatatgacgacgacggtcggccgtggtcagcctacggcggcgactttggcgacgcgcctaacgaccgtcagttctgtatgaacggcctggtgttcgccgaccgaacgccgcatccgtcactgtatgaagccaaacacgcgcagcagtttttccagtttgcgctgctgccgggagccgaatgccagattgaagtgaccagcgaatacctgttccgccatagcgataacgaggtgctccactggtcactggcgctggatggcaacccgctgaccgcaggcgttgtgacgctggatatcccgccgcagggacgtcagatcatcacactgccagcgctcccggaagcggaaaccgcaggccagctgtggctgacggtacgcgttgaacagccgcaggcaaccgcgtggtcgcaagccggacatatcagcgcctggcaacagtggaagctcggcgaaaaactcgctacgcagtggccgcagcacgctggcaacgcgccacacctcaccagcagcgggacggcattccgtattgtcgcaggcgagaaacgctgggagttcagccgccagcagggcgtattgacgcaattctggattggcgaagaggcacagttgctgactccgcttgtcgatcagttcacccgcgcgccgctggacaacgacatcggcgtgagcgaggcaacccgtatcgaccctaacgcctgggttgaacgctggaaggccgccggccattaccaggcaaaagcggtattactgcaatgcgataccgacatgcttgccagcgcggtactgattaccaccgcccacgcctggcagtatcagggcgagacgctgttcatcagccggaaaacctaccgtatcgacggcaacggtgaaatgcagataacggtagatgttgatgtcgccagcgggacaccgcatccggcgcgcatcggcctgagctgccagcttgcgcaggtggcggagcgggtcaactggctgggattaggcccgcacgaaaactacccggatcgtctctctgccgcctgctttgatcgctgggatctgccgctggaagagatgtacaccccgtatgttttcccgagcgaaaacggcctgcgctgcggaacgcgtgaattgtgttatgccgcgcatcagtggcgcggcgattttcagttcaacatcggtcgctacggccagaaacagctgatggaaaccagccaccgccatctgctccagccggaagcgggcacctggctcaatattgacggtttccatatgggcgtgggcggcgatgactcctggagcccctccgtttcagcggaatatcagctcagcgccgggcgctaccactaccagataagctggcggtaa

SEQ ID NO: 71677 - DNA, 1887 bp, Citrobacter koseri
atgtcttttagcgagttttatcagcgttccattacgcagccggcgtcgttctgggccgagcaggcccgacgtatcgactggcagcagccgtttacccaaacgctggatcacagccatccgccgtttgcccgctggttttgcggcggaaccactaatttgtgccataacgctatcgaccgctggctggacaagcagccggatgcgctggcgctgattgccgtctcctctgaaacggaagaggagcgcacgtttaccttcagccagttgtatgacgaagtgaacgtggtggcgtcgatgctgttgtcgctgggcgtgcagcgcggcgaccgggtgctggtttacatgccgatgattgccgaggcgcacattacgctgctggcctgcgcgcggattggcgcgattcattcggtggtgttcggcggttttgcctcgcacagcgtagcggcgcgaatcgacgacgctacgccggtgctgattgtctcggcagacgccggggcgcgcggcggtaagattctgccgtataaaaagctgctggatgatgccatcgcgcaggcgcagcatcagccgcgccacgttttgctggtggatcgcgggctggcgaaaatggcgcgagtaccggcgcgcgatctcgattttgcgtcgctgcgtcagcagcatctcggggcgcgggtgccggtggcctggctggaatccaatgagatctcctgcattctctatacctccggcacgaccggaaaaccgaaaggcgtacagcgcgatgtcggcggctatgcggtggcactggcaacctcgatggatactatcttcggcggcaaagcgggcggcgtgttcttttgcgcgtcggatatcggctgggttgtggggcactcctatattgtctacgcgccgttgctggcaggcatggcaaccatcgtttatgaagggttgccgacgtacccggactgcggcgtctggtggaagatcgtagagaaataccgcgtcagccggatgttctctgcgccaaccgccatccgcgtgttgaagaagtttccgacggcgcagatccgcaatcacgatctctcctcgctggaggtgctctatctggccggtgagccgctggatgagccgacggccgcctgggtgacggagacgctggatgtgccggttatcgacaactactggcagaccgagtccggctggccgattatggcgatcgcccgcgcgctggacgaccggccttcacggctgggcagccctggcgtaccgatgtacggctataacgtgcagttgctcaatgaggtcactggcgaaccttgcgaggtgaacgagaaggggatgctggtcattgaggggccgctgccgcctggctgcgttcagactatctggggggacgatgcgcgttttgtgaatacctactggtcgctgttctcacgtcaggtgtacgccactttcgactgggggattcgcgacgcggacggctattatttcatcctcgggcgcaccgatgatgtgatcaacgtcgccgggcaccgtctgggcacgcgcgagatcgaggaaagcatttccagttacccgaacgtggcggaagtggcggtggtgggggtgaaagatgcgctgaaggggcaggtggcggtagcgtttgtgatcccgaaacagagcgacacgctggaggacagggacgtggcgcaaacggaagagaaggcgattatgtcgctggtagacagtcagatcggtaattttggccgcccggcgcacgtctggtttgtttcacagttgccgaaaacacgctctggcaaaatgctgcgtcgtacgatccaggcgatttgcgaaggccgcgatccgggcgatttgtccacgcttgacgatcccgcttcgttgcaacaaatccgtcaggtgattgaggagtaa

SEQ ID NO: 71678 - DNA, 1452 bp, Citrobacter koseri
atgtccgcacaaataatgaacattcgcccggaatttgaccgtgaaatcgtggatatcgtcgattacgtcatgaactacgacatcacctctaaagtggcctgggacaccgcccactactgcttgctcgacacgctgggctgcggtctggaagcgctggaatatccggcctgtaaaaaactgctggggccgatcgttccgggcaccgtcgtgccgaacggcgtacgcgtaccgggcacccagtttcagctcgatccggtgcaggcggcgtttaatatcggcgcgatgatccgctggctcgacttcaacgatacctggctggcggcagagtggggccacccctctgataacctcggcgggattctggcaaccgcggactggctgtcgcgtaatgcggttgccgcaggcaaaacgccgctgaccatgaagcaggtgctggccgggatgatcaaagcccatgagattcagggctgcatcgcgctggaaaactccttcaaccgcgtcggcctggatcacgtactgctggtcaaagtggcttcgacagcggttgtcgccgaaatgctggggctgacgcgtgatgagatcctcaacgcggtgtcgctggcgtgggtggatggtcagtcgctgcgcacctatcgccatgcgccaaacaccggaacacgtaagtcctgggcggcgggcgatgccacctcccgcgcggtgcgtctggcgctgatggcaaaaaccggtgagatgggctatccgtcggcgctgacggcgaaaacctggggcttttatgacgtctctttcaacggtgaggcgttccgcttccagcgtccgtatggttcttacgtcatggaaaacgtgctgttcaaaatctccttcccggcggagttccactcgcagacggcggttgaagccgccatgaccctctttgaacagatgcaggcggcgggcaaaacggcggcggatattgagaaagtgacgattcgcacccatgaagcctgcattcgcatcatcgacaaaaaagggccgttgaataacccggccgaccgcgaccactgcattcagtacatggtggcgatcccgctactgttcgggcgcttaacggcggcggattatgaggatggcgtagcgcaggacaaacgcattgacgccctgcgcgagaagataacctgctttgaagacccggcgtttaccgctaactaccacgacccggaaaaacgcgccatcgccaacgctatcacccttgaatttaccgatggttcacagtttgccgaggtggtcgtggagtacccgattggccacgctcgccgccgcgccgacggcattccgaagcttatcgataaattcaaaatcaacctggcgcgtcagttcccgacccgtcagcagcagcgcattctggatgtctccctggacagaactcgcctggagcagatgccggtcaatgaatacctcgacttatttgtcatctga

SEQ ID NO: 71679 - DNA, 1170 bp, Citrobacter koseri
atgagcgatacgacgatcctgcaaaacaacacccatgtcattaagcccaagaaatctgtcgcattatcgggcgttccggccggaaataccgcgttgtgtaccgtgggaaaaagcggcaacgacttacactatcgcgggtacgatattctcgatctcgcggagcattgtgaatttgaagaagtcgcgcatctgttaattcacggcaaattgcccaatagcgatgaactccatgcctataaaaataagctgaaagcattgcgtggattaccggccaatgtacgcaccgtgctggaagcattgcctgcggcgtcgcacccgatggacgtcatgcgcaccggcgtgtcggcgctcggctgtacgctgccggaaaaagaggggcataccgtttccggcgcgcgcgatatcgccgacaaactgctggcctcgctcagttccatcctgctctactggtatcactacagccataacggcgaacgtattcagccggaaactgacgacgactccgttggtagccatttcctgcatctgctgcacggcgagaagccgtcgcaaagctgggaaaaggcgatgcacatctcgctggtgctgtatgccgagcatgaattcaacgcgtccactttcaccagccgggtgattgcagggacgggctccgatgtctactccgccatcatcggcgcgattggcgcgctgcgcggcccgaagcacggcggggcgaatgaggtatcgctggaaattcagcagcgttatgaaacgccggaggaggccgaggcggatatccgcaaacgcattgaaaataaagaggtgatcattggtttcggccatccggtctacaccattgccgatccgcgccatcaggtgatcaaacgcgtggcgaaacagctttcagaggctggtggttcgctgaagatgtacaacatcgccgaccgtctggaaaacgtgatgtgggaatcgaaaaagatgttccccaacctcgactggttctcggcggtctcctacaacatgatgggcgtccccaccgaaatgttcaccccgctgtttgtgatcgcccgcgtcaccggctgggcggcgcacatcatcgaacagcgtcaggacaacaaaattatccgaccttccgccaattataccggcccggaagatcgcgaatttattccgctggatcagcgccaataa

SEQ ID NO: 71680 - DNA, 879 bp, Citrobacter koseri
atgtctctacactctccgggccaggcgtttcgcgctgcgctcactaaagaaaaccccttacagatcgtcggcaccatcaatgccaatcacgcattgctggcccagcgcgcaggctatcaggcgatttacctttccggcggcggcgtggcggcgggatcgctgggtctgccggatctggggatctccacgctggatgatgtgttgaccgacatccgccgtattaccgacgtctgcccgctgccgctgctggtggatgccgacatcggctttggttcctccgcctttaacgtggcgcgtacggtgaagtcgatgatcaaagccggcgccgctgcgctgcatatcgaagatcagatcggcgcgaaacgctgcggccatcgcccgaataaggcgatcgtgtccaaagaggagatggtggacaggattcgtgcggcggtggatgcgcgtaccgatcctgacttcgtgatcatggcgcgtaccgatgcgctggcggtggaaggattagaggcggcgatcgatcgcgcgcgggcttatgtggaagcgggggccgacatgctgttcccggaagcgattaccgagctgtcaatgtatcgccagttcgccgatgccgtaccggtgccgatcctggcgaatatcacggagtttggcgcgacgccgctgtttaccaccgacgaactgcgcagcgctaacgtggcgatggcgctctatccgctgtcggcatttcgcgccatgaatcgcgctgccgagcgtgtctataacgtgctgcgccaggaaggcacgcaaaaaaacgttatcgacatcatgcagacccgcaacgagctgtacgaaagcatcaattattaccagtacgaagagaagctggatgcgctgaacctgaagtag

SEQ ID NO: 71681 - DNA, 1587 bp, Citrobacter koseri
atggctgacacgcaccttcccgctcgcgataatcatgacaagccggtgatctggacggtctcggtaacgcgtctgttcgagctgtttcgcgacatcagcctggagttcgaccatctggcgaccatcacccccatccagcttgggtttgaaaaagcggtgaactatatccgtaaaaaactggcgaccgagcgctgtgacgccattatcgcggcgggttccaacggcgcttatttaaaaagccgcctctccataccggtgatcctgattaaacccagcggattcgacgtgctccaggcgctggcgaaagccggaaaactgacttcgtccattggcgttatcacctaccaggagacgatccccgcgctgatcgcctttcaaaaaacgtttaatttgcgtctggaacagcgcagctacatcaccgaagaggatgcccgtgggcaaattaatgaactgaaagccaacggcattgaggcggtagtcggcgcagggctaattaccgatctggcggaagaggccgggatgaccggcatttttatctattctgcggctaccgtgcgtcaggcgtttagcgatgcgctggatatgacccggctgacgctgcaacatggcggccaatatgcctccggcaacgggctgcgcacccgctacgatctgggagatatgcgcggccattccgcgcaaatggagcaggttcgccatacgattatgctgtacgcccgctccagcgcggcggtgttgattcagggtgagaccggcaccggtaaagagctggcggcgcaggcgattcaccgcgagttttttgcccgtcggggccagcgcagcggtaaaaaaacgcctccgtttgtggccattaactgcggcgcaattaccgaatcgctgcttgaagcagagttattcggttatgaggagggggcatttaccggttcccgacgcggcggacgcgccggtctgtttgaaatcgcccacggcgggacgctgtttctggatgagatcggggaaatgcccctgcccttacagacccgcctgctgcgcgtactggaagagaaagaggtgacgcgcgttggcgggcatcagcctgtcccggtggatgtacgggttatcagcgccacgcactgcaatctggaacaggcgataaagcaggggcaatttcgcaccgatctgttttatcgtctcagcattctgcgcctgacgcttccgccccttcgggagcgcccgtcagatatcgtgccgctggcggagggatttttgaaacagtccctggcggcattagacgcgccgtttggcgaatcggtgcgcgaggggctggcgcaaagccagaccattcttctgcgctatgcctggcccggcaatattcgcgagctgcggaatatgatggagcgcctggcgctttttttaagcgtcgagccgcagcccagtctggatagccagtttttacagcagtttttacccgaactggcgacaattcccgaagcgccatcagcgcttacgccgcagcaggttctggcgcagtttaacggcgataaaaccgcggcggcgcgatatctgggtattagccggacgacattctggcgacgattaaaagagtga

SEQ ID NO: 71682 - DNA, 276 bp, Citrobacter koseri
atgaagacaggatataaagtattgattggtgcgttagcgtttgtcgtaaccaacgtctatgccgcggaactgttgacaaaggtcgagtttgagaaagtggcgtcgcaatacacgaagataggcaccattaataccagcaacgagacgtcaactatggaggcaaaagaggatctgcttaaaaaggccgatgaaaaaggggctgatgtggtcgtactgacctccgggcaaaccgataataaaattcatggtactgcggatatctacaagaaaaaataa

SEQ ID NO: 71683 - DNA, 633 bp, Citrobacter koseri
atggaacctctgcacgcggttgtcctgaccgtcagcctgttcgtcttaaccttctttaaccccggcgcaaacctctttgtggtggtacaaaccagcctcgcctccgggcgtcgggccggtgtattaacggggctgggagtggcgcttggcgatgcgatttattccgggctgggactgtttggcatggcgaccctgattacccagtgcgaagaaattttctcgctgatcaaaatcgtcggcggcgcatatttgttatggtttgcctggaacagcatccgccatcaggccaccccgcaaatgccgactctgcaacagcccatttccgccccctggagcgtgttcttccgccggggactgttaaccgatctgtcaaatccgcaaaccgtactgtttttcatcagtattttctcggtcacgctcagcgcggaaaccccgacatgggcaagactgatggcctgggccggcatcgtgctctcttccgtcatctggcgcatcttcctgagccaggccttttccctaccggcggtacgccgcgcttacgggcgaattcagcgcattgccagcagggtgattggcgcgatcatcggcgtgttcgccctcaggctgatttacgaaggcgtgaaccaccgctag

SEQ ID NO: 71684 - DNA, 1170 bp, Citrobacter koseri
atggcgcgcgtgtcgctttcgtgggtgctgatcctcggtttgttaaccgggatcgggccgctgtgtaccgatctttatctgcccgctctgccggagatgtccgaacagctggcaacgacgaccaccctgacgcaactgacgttgacgtcttcgctgatcggccttgggcttgggcaactgctgtttggcccgctcagcgaccggattggtcgtaaggttccgttgatcctgtcgctgttgctgtttattgcctcttcggtactgtgcgcgacaactcaggatattcactggctgatcgtctggcgatttgtgcagggcgcggcgggggccggtggttcggtgctctcgcgctctattgcgcgggacaaatatcagggcgtgaccctgacccagttcttcgcgctgctcatgacggtgaacggcatcgccccggtgctttctccggttctgggcggctacattgccaccgcgtttgactggcgtatgttgttttgggtaatggcggggattgcgacactgcttttgctctgctgcatcctgtttatcagtgagacgctgccgcagcgaacgcgcggcgcatcgttattttcgaccgggcgcagcgtggtaaaaaatcgtctctttatgcgcttttgcctgatgcaggccttcatgctggcggggttgtttgcttatatcggctcttcgtcatttgtgctgcaaagcgagtatggcttaagcccgatgcagtttagcctgctgtttggccttaatgggatcgggctgatcgtcgcctcgctgattttttcccgtcttgcgcgtcgaatcacggcaatgacgctgctgcgcggcggcttgctgttggccgtcatctgcgcgttaatcaccttgctctgcgcctggctacagcagccggttctggcgctggtggcgctcttttttaccgtcgccttttgcagcggaattggcaccgtggcgggcgctgaggcgatgagcgtggtggctgttcaggagtcaggaaccgcctccgcgctgatggggatgagcatgtttgttttcggtggcatcgccgcgccgttgtcggggctgggcggcgaaaccatgctgaaaatgagtctgacggtggcgctctgttatgtggccgctctgctactggctagcggtggttcacgccttcgtaaatcagcctga

SEQ ID NO: 71685 - DNA, 1365 bp, Citrobacter koseri
atgttgcgtatttttctctttgttttcgctctcctgagcgcagggtgtgtgtcgcttgatccgcactacagcacgcccgatgcgccggttccggcaagtttaccgggcgcgcaggggcaggggaacgctgtcagccgcgactggcagcagattgttaacgacgcgcggctgcaacaggtggtgaacaccgcccttaacagtaaccgtgatgtacaaaaggcgattgctgatatcgactccgcacgggcgttgtatggcgaagcgcgtgcctcgttgttcccgacggtgaatgcttcactcagttctacacgcagccgtacgctggcgaacggaaccggaacgagcgctgaagccgatggcgcggtgtccagctttgagctggatctgtttggccgcaatcagagcctgtcacgggcggcgcgagaaacctggcttgccagcgaatttaccgcgcagaacacccgtttgacgttaattgccgagatcagcaccgcgtggctgaccctggcggcagataacagcaatctggcgctggccagggagacgatggccagtgcggaaaactcgctgaaaattgttcaacgtcagcagcaggtcgggacagccgccgcaacggatgtcagtgaagcgatgagcgtttaccagcaggcgcgcgccagcgtagccagctatcagactcaggtggcgcaggatatcaacgccctgaacctgctggcgggcacaacgctgccggaaagcgtgctgcccggtacgctggaaagccttgatgcgcaggtgattacgctggtgcccgctggcgtctcttcttccgtgctgttgcgtcggccggatattcaggaagcggaacataacctgaaaagcgccaatgccgatattggcgcggcgcgagcgaatttcttcccgaccatctccctgacggcaagcgccggtgtcggcagcgatgcgctctcgtccttgttcagtcatggcatgaaggtgtggtcgtttgccccttccattacgctgccgctgtttaccggcggcagcaacctggcgcagctccgctatgccgaagcgcaaaaacggggactcattgctacctatgaaaaaacggtgcaaagcgcgttcaaagatgtggctgatgcgcttgcccggcgtgcgacgctggatgaacagctggatgctcagcgccagtatgtcgccgcagaacaaaaaacgctggatgtcgggatgcgtcgctatcgcgccggggtcggggattatctgaccgtactgacggcacaacgcacgctgtggtcggcgcagcagacgcttatcgccctgcaactgacggacaatgaaaaccgcataacgctctggcagtcgctcggcggcagggcccggtaa

SEQ ID NO: 71686 - DNA, 3108 bp, Citrobacter koseri
atgttctcccgtttctttgtgcgcaggcccgttttcgcctgggttatcgccattctgatcatgctggccggtattctggcgattaaaacgctgccggttgcgcagtatcctgacgtggcgccgccgtcggtgaaaatctcggcgacctataccggcgcttccgccgaaacgctggaaaacagcgtgactcaggtgattgaacagcagcttaccgggctggataacctgctctattttacctcgaccagcagttccgatggttcggtcagtattgatgtcacctttgaacagggcaccgaccctgacaccgcgcaggtgcaggtacagaacaaggtgcagcaggcggaatcccgcttgccgagcgaggttcaacaatccggcgtcacggtggtgaaatcgcaaagtaacttcctgctgattgccgccgtgtatgataagtccgaccgggcgagcagctcagatatcgctgactggctggtgagtaacgtacaggacccgctggcacgcgtggaaggggtcgggagcctacaggtgtttggtgcggaatacgccatgcgtatctggctggacccggcgaaactggcctcctattctttgatgccgtcggatgtgcagagcgccattgaagcgcaaaacgtccaggtttccgccgggaaaatcggtgcgttaccttcccctgacacacagcaattgaccgctacggttcgcgcgcagtcgcgcttgcagacggtagaacaattcaaaaagatcattatcaaaagccagtctgacggggccgtggtacgcatccaggatgtggcgcgcgtggagatgggcagtgaagactacaccgccatcgctaaactcaacggccatccggctgcgggggttgcggtcatgcttgcgccgggggcgaacgcgctggataccgccacgctggtaaaagataaagtcgctgaatttaaacgggatatgccgcagggctatgacgtggcgtatccgaaagacagcaccgaatttattaagatctccgtagaggatgtggttcagacgctgtttgaagccatcattctggtggtctgcgtgatgtacctgttcttgcagaatcttcgcgccacgctgattccggcgctggcggttccggtcgtgctgctcggtacttttggcgtgctggcgctgtttggctactccatcaatacgctgacgctgtttgcaatggtgctggcgataggcctgctggtcgatgacgccattgtggtggtggaaaacgtcgagcgtattatgcgcgatgaagggctgcccgcgcgcgaagctaccgaaaaatcgatgggggaaatcgctggcgcgctggtggctatcgctcttgttttgtctgcggtattcctgccgatggcgttctttggcggctctaccggcgtcatttatcgccagttctctgtgacgattatctcggcaatgctgctctcggtcgtggtggcgttgaccctgaccccagccctgtgcggttcgattcttagccataccgcgccgcataaaaagggcttcttcgggatattcaaccgattctatagccgaactgaacagggttatcagcgcggcgtcctgcatgtgctgcgtcgcagcgtcagcgtgatgggcatttatgcgctgttatgcggggcgatggcgctggcgatgtggaagctgcccggcagcttcttaccgaccgaagatcagggtgaaattatggtgcagtacaccctgcccgcaggggcgacggcgtcgcgaaccgcagaggtcaatcgtcaggtgacagactggtttctcaataaagagaaagccaatacggacgttatttttaccgtcgatggttttagcttcagcggcagcgggcagaatgccgggatggcgttcgtttcgctgaaaaactggtcggagcgtaaaggcgaagaaaataccgcacaggctattgcgctgcgtgccagtaaagaactgggcgctattcgcgatgcgacgctttttgcgatgacgccgccgtcggttgaggggctggggcaaagcaacggcttctcttttgagctgatggcgaatggggcgaccgatcgcgataccctgttacagatgcgtaatcagctgatcgcccaggcaaaccagagcgatattctgcacgccgtgcgcgcaaatgacctgccgcaaatgccgcagcttcaggtggatatcgacagcaataaggccgtctcgctggggcttggtttaagcgatgtgaccagcactttatccagcgcctgggggggaacctatgtcaatgactttatcgatcgcggtcgcgtgaagaaggtctacattcagggcgacagcgagtttcgttcttcgcctgcggatctgggcaaatggttcgtgcgcggcagcgataacagcatgacgcccttttccgccttcgccactacccgttgggagtacggcccggaaagtctggtgcgctacaacggctctgccgcctatgagattcagggagaaaacgccagcggtttcagctccggcgccgcgatggacaaaatggaagcgctggcaaacagcttgccagctggcaccacatgggcgtggagcgggttgtcattgcaggaaaagctggccagcggtcaggctatgagcttgtacgccatctctattctggtggttttcctctgcctggcggcgctgtatgaaagctggtcggtaccgttttcggtgattctggtcatccctctggggctgttaggcgcagctctggcggcctggatgcgtgatttaaataatgatgtttacttccaggtcgcgctgctgaccaccatcggcctgtcgtcgaaaaacgccattctgatcgtcgaatttgccgaagctgcggttgcggaaggttattccctgagccgggctgcgctgcgagcggcgcagacccgtttgcgcccaatcattatgacctctctggcctttattgccggggttacgccgctggctatcgccacaggggccggggcgaacagccgtgtggcgatcgggaccggaatcatcggtgggacattaaccgccacgctgttggctatcttcttcgtcccgctgttcttcgtgctggttaagcatctgtttacccgcaagtcccgtcgtcaggagtaa

SEQ ID NO: 71687 - DNA, 1122 bp, Citrobacter koseri
atgaaatacataacaacatcaattatcgcgctattgttattatccggctgtgataatacgcaaaccgacaataccgcttctccgtctcaggaagtgggcgtcgtgacccttaaaacagaacccgtttctgtcgtcagtgaactgaccggacgcaccagcgcagcgctcagtgccgaagttcgcccgcaggtggggggcattattcaaaaacgcctgtttaatgagggcgatatcgtcaaagcggggcaggcgctgtatcagatcgatcccgccagctatcgcgccgcatggaacgaagcgaatgcctcgctcagacaggcgcaggcgctggtgaatgccgactgccagaaggcgcaacgttacgcgcggctggttaacgatgacggtgtttcccgccaggatgccgatgatgcgcaggccacctgtgctcaggacaaagccagcgtggaggcaaagaaagccgcattagaaagcgcgcgtatcaatctggactggaccaccattaccgccccggtttccgggcgcattggtatctcatccgtcacgcccggcgcgctggtgacggcttcacaggagacggcgctggcgaccattcgtgggctcgacaccatgtatgtcgatcttacccgctccagcgtggatttgctgcgcctgcgtaagcagtctctggcgaccaacagcgataccctgaacgtgacgctgacgcttgaagatggcacgacctatagcgaaaaaggaaagttagcgctgacggaagtggcggtagatgagtctacaggctcagtcacgctgcgggcgattttccccaaccctcaacagcagctgttacccggtatgttcgttcgcgcccgcattgatgaagggatcatgaacgatgcgattctcgcgccgcagcaggggatcacgcgcgatgcgaaaggcaatgcgacagcgctggtggtcactaaagacaataaagtggcgcagcgtaccctggaaacaggcgatacctatggggataaatggctggtgctggacggtttacgtagcggcgaccggttgatcgttgagggatcaagtaaggtcacgccgggtcagcaggttaacgccgttgatgtacaactgaacggaggcaaaggctga

SEQ ID NO: 71688 - DNA, 567 bp, Citrobacter koseri
atgagcagcaagctggaaatccgccagaaacaacgacaggatgagatcatcaacgccgcgcgccagtgctttcgcgccagcggatttcacggcgccagcatgtcgcagatcgccgctgaagcccgtctcagcgtggggcaaatctatcgctacttcgccagtaaagatgccattatcgaagagatgatccgccgtattatcgactatcgcatcacgcagatagaagataaaacccagacggagcgtatccccggaatcctggcctggcggcaaacgctgagcgaggatgatgatgcgctgatgctggagatggcggctgaatcgacccgcaatcctcatgttgccgcgatgctcgaagaggcggatgcgcggatgttcgacaacgcctgcgcgcacctgagaaaaacgtgtccgcaactcagcgaagcccgcatccgttgctgtgttgaagtgattgcaaccatgatggaaggggcggtttaccgtcgcctgacgccgcaaaaaagtgaccctgatgcgttacaggagatatatcgggatatcgttaccatgcttgtgaatggctga

SEQ ID NO: 71689 - DNA, 894 bp, Citrobacter koseri
atgctgacggcgaagaaagtgaaaaatcgtattgatgtttacggcgatcgcttccgggcgcgggcgcatctgctttcgccgaggatgcaggcggtggcgcgttatatccatgagaaccgggaagtggtactggaatttacggcgatagaaattgcggccgccactcaaacttctgacgcgacggttgtccgggcgattcaggcattggggtttgccgggctgcgcgatttaaaacagaccatcgaacactggtttggcccgggtatcacctcggaagagaaaatgacgaccacggtgaatacgctttcctgcgatgtaaattcgagcattgattttgttctgcaagggcatcagcgcacctgcgacgtgctgtctacgccgcaaaaccgttacgcgattgcgcaggcggtcgcactgttggtggaggcgcgtcaggtggggatatttggcattggcgcatccgggatacttgcggactacacggcgcgtctgctcagccgtattggcttgccgtcggtggcgtttaatcgtaccgggattaacctggcggaacagctgattgcgctacagcggggggatgtgctgattatgatggcgcagaaatcgccgcatcgcgaagggttgacgaccatccgcgaggcgaagcggttgggcgtgccggtgattttactgaccaatgcgctggaatcacgttttagcaaggaggcggatgtggtgatcaatgtgccgcgcggcggtgagaacgggaaaatgccgttgcacggtacggtgctggtttgcctggaaatgatcgtgttgtctgtcgcttcgacagccccgcagcgttcgattaagtccgttaagcgcatcaatgaattgtaccggggaattggaaagtcaggggcaaagaaataa

SEQ ID NO: 71690 - DNA, 948 bp, Citrobacter koseri
atgcgtttacttttttcgctgttgctgctgctggggggctctgtacaggcagaggttgccacccggccttttaccgacgatctcggacgcgtggtgaacgtgccgctgcatccgcagcgcattgtgtcgctacacgatcttgatatcaccattccgctgattgagctgggcgttccgccggtcgccagccacggcagaacgcgtcctgacggcagccatttcctgcgttcgggcgcgctgctgaccggcgtcgattttgatcattcaacgataaagtttattggtacggcggacattgatattgaagcgattgtcgccgcgaaacccgatttgatcatcaccgagccgagccgccatacgcccatcgaacaactggagaaaatcgccccgacggtgagcattgatcatctcgacggcggcgcgccggaaatttaccgcaagctcgcgcagcttaccggaactcaggcgcgactggctatcctggagcgtcgctaccgggaagagattgaccggttgaaacacacggtggatacccaacacattacggtgtcagtcattcaggcaaaccagggaaaaatcaatgcgttgcacacctatcattcgttaggacgcgtcctgcgcgatgccgggttttccttcccgaaactgatcgacagcattccgccgggagggcggattgacgtgagcgcggagcgtctgccagagatggatgcggattttgtttttgccacctggcgcggtgataccggtggtaagccgcaggatgaaattgccgcgatggatgccgtgttgccgggctggtgcgagtttcttaccgcttgccagcgcgggcattacgttttgatctcccgtgaagaggcgatttcgaactcctttgcatcactcagcctgatggttgcacaggtacagtcgcatattgccgggcgccacttaccggaggggaaataa

SEQ ID NO: 71691 - DNA, 1053 bp, Citrobacter koseri
atgagcgttgttctggcgcgtgccgggctgcgcgcatggcgggtggggaaattctcacgccttgtccggctgaaaacggtgtggtgtgtgctggggtttgccacgctggccgccgtactgctggtttcgggcgtgttgcaggggtcgcttcccgttccggcttccgccatcgggcgtgcgttgttctctccgcaggcgttaacggagcaacagcagtatgttgtctgggatgtccgtcttccgcgtttgctgatggcgctgctgtgtggagcaatgctggggctggctggcgcggcgatgcagtcgattacccgtaacggcctggcggaccccggtcttatcggcgtgaaagaggggagtagcgtggtggtactggcgttagtgctgctcttcccgtcggtcagcctggtctggcgaccgctggcgggtattgctggcggattactggtcgccgcgctggtcatgctgctggcccgtgatttctcccgcccgcgatttgtgctgatcggcattggcgtctcgtggttttttgctgcgggaatgggcgtttttatgacgacagccgatgtccgcgatgtgcaaacggcgctggtctggctggccggaagcctgcacgccgccacctggccgttgctgtgggtggcgctggggtgggcgttgcctgcggctgttctgctgtttgcgacggcgagagcatcggatgtggcgctgctgggtaatcacaccgcgaccgggctcggggtgcgtctgtctcatctggcgctgctgcgttttatggcgccggtatttctgaccgccgccagcgtctcctgcgtgggcagcctggggtttgtcggcctgatggtgccgcatatggcgcgtttttgcctgcgcggagggcaaatggcgctgctgtggggcagtgcgctcattggcgctctgctggtgctgctcacggataccatcgggcgtctggcctttgcgccgctgcaaataccggcggggatcgtgattgcgctggtcggcggtcctttctttttactgttgctctggcgtcgtcgggatcgtttgtaa

SEQ ID NO: 71692 - DNA, 1014 bp, Citrobacter koseri
atgacggctatggtcatcgcatcaggccgccgtcgtggtcgatttctgctggcgcttcctgtcttgctactgctgctgtttatgctggcggtgattcatctgggcgtcggggcgcgtgccgtcagtccgcagaccgtcattcaggcgttatttcacttcgatgccaaaaactttgatcaccgaatcgttatctctctgcgtctgttgcgtatggctgcggccatgctggttggcgcggctttgggcgtagccggcgttctgttacaggcattgattcgcaacccgctgggcgaaccgcacattctggggctgaatgcgggagccgcgttctccgtagtgctgtgtaccgcgctgggcgtcgcggggctcagtcagtcactggttgcggcagggggcgcagcggcactcttttcgctggtgatggcgctctcttccgccgggcgtggcggactgacgccgctgaaggtcacgctctgcggcgtggcgctgtcggcgatggtgtcgtcgctcacggcggcaatccttattctggatgagcagacgttgctggcgatgcgcacctggctggtgggcgatctcgcggggatgagttgggaaaaagtacgccaggccctcctgccgtcgctggttggcgttgtactggcgatagcgatagcgccggggctgaatattctggcgctaggcgaccggatggcctgtgggttgggcgttaatattctgcgcattcgtctgatggcgatgatcgccattgcgctgctgtgcggcgcggcggtatccgtcgccgggccgctgggttttatcgggctgttggttccgggcgtcatcagacgtctggtgacggaagacattcgccagatgctcccgctggcggcgctgctgggggcggcagtgctgctactggcggatatcgttgcccgaaccctgcttgccccacaggagctggctacaggagtgatgaccgcgctggtcggcgcgccggtgtttattttcattgcgtcgagatttcttaaatga

SEQ ID NO: 71693 - DNA, 828 bp, Citrobacter koseri
atgccacagcatgtggaaaacaccgcccacagaacgggcattgagctgaaacagctttctgctggctatcgtcaccacgccatcgtgcatgacgtctgcctcactatcccgcaaggtaaaatgacggtgctggccggggcgaacggctcaggcaaatccaccttattaagtacgattgcccgaatgctgaagccgttgggcggcagcgtgctgcttgatggtaaagcgattcatcaacagccgaccaaagcggtttcgcgtcagcttggcatcctgccgcaatccccgctggtgccggagggattaacggtttttgaactggtttcgcgcgggcgttttccctggcagaattttctccagcaatggaccgatgatgacgcacaggccgtagagcaggcgttacagctcaccggaacaaccgacttcgcccatttgccggtagagagtctctccggcgggcagcgccagcggtgctggattgcgatggcgctggcgcagcaaacgccgtttattttgctggatgagcctacaacctttctcgatctgcgttatcaggtagagatccttgagcttctgcactccctgacccgtcatcatggtcgtaccgtggtggtggtgttacatgatctcaatttcgcggtgaattacggcgatatgctggtctttctcagacagggacggctggaggggatcgtacatgaaggagagcactgtacgccggagctgatcaaatcggtgtttgacgtcgatgtgcagatgtcggtgaatccgttgaccggaaagccattcttcatgccgtttcgtgccagggctggagcggaagaatga

SEQ ID NO: 71694 - DNA, 2163 bp, Citrobacter koseri
atggctaagttaactccttatttttctgggatgaaagggcgaacgctgtgctccgctctgtttttgggtatcacgacggctcctgcggtcatggcagcggaaaaagaaaactcgccgctcaaaaatgaagagacgatgaccgtgcgcgcagacgcctcttctgccgatcaggccgtcacgtcaggttatcaaccgctgagttcgtccaccgccacgctaacgtcgatgccgctgctggatatcccgcaggtggtcaataccgtcagcgacaaagtgctggaagatcagcacgccacaacgctcgatgaagcgctgtataacgtcagcaacgtcgtgcaaaccaacacgctgggcggaacgcaggatgcgtttgttcgccgtggtttcggcgcgaatcgtgacggttccgtgatgaccaacggtcttaaaaccgtattgccgcgcagtttcaacgcggccacgtcgcgggtggaagtgctgaaaggcccggcctccacgctgtacggtattctcgatcccggcggcctgattaacgtcgtgaccaaacgtccgcaaacgcaatttggcggctcgatttccgccacctcctccagcttcggcggcggcacaggccagtttgacatcaccgggccgattgaaggcacccaactggcgtatcgcctgatcggtgagtatcagcacgaggactactggcgcaactatggtactaaccagagcagcttcatctccccttccctgacctggtttggcgacaacgcgacggtcagcgtgctctattcgcaccgtaattacaaagccccgttcgatcgcggcaccattttcgatctcaataccaaacagccggttaacgtggatcggaaaacccgctttgatgagaaattcaatatcaccgatggcgaatcggatctggcgcagctcaatgccgaatatcgcttcaacagcgcgtggacggcgaagtttgattacagcttcagtcaggataaatacagcgataaccaggctcgcgtgatggcttatgattccgctaccgggaacctgacccgccgcgtggatgcgacgcaaggctccacccaacggatgcatgcgacccgcgccgatttacaaggaaacgtggatatcgctggtttctataacgagatcctgaccggcgtctcttatgagaattacgatctgctgcgcacggatatgattcgctgtaagaacgtgaaaggctttaatatttacaatccggtctacggtacgctcggcaaatgcaccagcgtctcggcctccgacagcgaccagacgattaagcaggagagctattccgcttacgtacaggatgcgctgtatctgaccgataagtggatcgccgtcgccgggatgcgctatcagtactacaccgaatatgccgggaagggccgcccgttcaacgtcaacaccgacagcacggatcagcagtgggtgccgaaattcggcatggtctataagctgaccccttctgtgtcgctgttcggcaacgtatcgcgcgcctttatgccgcaatactccattgccagctacattggcgatctgccgccggaaacctctaccgcctatgaagtgggggcgaaattcgatctctttgacggcatcaccgccaatatcgccctgttcaatattgataagcgcaacgtgctgtacaacgaaatcgtggatggcgaaaccgtggcgaaaaccgcagggcgcgtacgctcacagggggtggaagtggatgtcgcaggctcgctgacgcccaataccaatatcatcgccagctacggttataccgcagcgaaagtcacggaagatcccgattacaaagggaaaccgctgcctaacgtaccgcgtcataccggttcattgttcctgacctatgacattcacaacgcctttatgggcaatacgctgaccattggcggcggcggacatggcgtaagccgtcgctccgccaccaacggcgcggactattatctgcctggttattttgtggccgatgcctttgcagcctataagatgaaactgcaatacccggtgactctgcaattcaacgtgaaaaacgtgtttgataaaacgtattacacctcatccattgctaccaataatctgggtaatcagattggcgacccgcgtgaagttcagttcacggtaaaaatggagttctga

SEQ ID NO: 71695 - DNA, 1389 bp, Citrobacter koseri
atgaaacgtattcctgagccgttccgcattaaaatggtagaaaacattcgtataaccacctgggacgaccgtgttaaagcgcttgaagaagcgggatataacccttttctgctcagaagcgatgatgtatatatcgacctgttgaccgactccggcactggcgcaatgagcgatcgtcaatggtcaggcctgatgatgggcgatgaagcctacgccggctcacgcaactattaccatctgtgcgacaaagtaaaagagctgatcggctacccgttcacgatccctacgcaccagggacgcggcgccgagcaaattctgtttccctgcctgattgcccgccgcaacgccgaaaaaccggtctttatttccaacttccactttgatacgaccgccgcccatgtcgaattaaacggcgcgaaagccatcaacgtggtgacgccaaaagcgttcgacaccacctcatggtacgactggaaaggcaactttgatatcgacctgctcaacgccaccatcgcggaacatggcgcagaaaacgtcgcggcgattatcaccaccgtcacctgcaacagctcaggcggccagccggtttccatcgccaatatgcgcgaggtgtatcaaatagcgaagcggcacaatattccggtggtcatcgactccgcccgcttctgcgaaaacgcctggtttattaaacagcgcgaagagggatacgcggataaaacggtgaaagagatcgtccgtgagatgtaccagtatggggatatgctaaccatgtcggcgaagaaagatccgatggtcaatatcggcgggctgtgctgcttccgtgatgatgaagatctgttcaacgacgtgcgcattcgctgcgtgccgatggaagggtttgtcacttacggcgggctggcggggcgcgatatggaagcgctggcgatcggcctcgaagaagggatgaatgaagatttcctcgcctatcggattaaccaggtggaatacctgggcgaacggctgcgcgaaggggggattccaatccagtatccaaccgggggccacgcggtatttgtcgatgcgaagctgctgctgccgcacattccggcagaacagttcccggctcatgcgctgaataacgaattgtacctggaagccgggattcgcagcgtggaaattggctctctgctgcttgggcgcgatccggtcactggcaaacaaaaaccgtcgccaatggagttgctgcgtctgacgatcccccgccgggtctacaccaacgatcacatggattatatcgcggatgcgttaatcgccgtaaaagcccgcgccgcatcgatcaaagggctgactttcacctatgaaccgccggtgctgcgccactttgtggcccggctgaaaccggtgaaataa

SEQ ID NO: 71696 - DNA, 1245 bp, Citrobacter koseri
atggctacattatcggtcgcaaataaagcgccgtcgctgatcggcggggcaatgattatcggtggaaccattattggcgcgggcatgttttctctcccggtggtgatgtctggcgcctggtttttctggtcactgctggcattaatttttacctggttttgtatgctgcattccgggttaatgatcctggaagcaaacctgaattatcatattggcgccagcttcgacacgattaccaaagacctgctgggaaatcgctggaatattattaacggtctgaccgtcgcgttcgtgctgtatattctgacttacgcctatatttccgccagcggttcggttattcaccatacctttgcacaaatggggatcgtctttccggccaggctcggcgggttattattcgccctggcggtggcgtttattgtctggctaagcacccgggcggtgagccgtatgacgaccattgtgctgggcgctaaaattctcaccttctttatgacgtttggcggtttgctctggcacgtccagccgacgattttactcaataccgctgaagtcagccccagctacctgccctacgtcctgatgacgttgccgttctgtctcgcctcatttggttatcatggcaacgtgcccagtctgatgaaatattacggcaaagatccgttgaccatccgccgctgcctgctactgggaacgttgatggcgctggtgctgtatatcatctggctggtcggtacgatggggaatattccgcgtccggcgtttattgagatcgccgaaaaaggcggcaatatcgacgtgctggtacagacgctgagcggtttgctgaacagctcaacgctcgatctgctgctgaccgtcttctccaactttgccgtcgccagttcgttcctcggcgttacgctgggattatttgattacctcgccgatctcttcaggttcgacgactcgccaaaaggacgtttcaaaactgcgctggtcacgtttctgccgcccatcaccggtggcttaatctggccaaatgggtttatctacgccatcggttttgccgggctggccgccaccgtctgggcggcgattgtcccggcgcttctggcgcgcgcatcgcgcaaacgctttaacagcccgcactatcgggtatggggaggcaacgcaatgatcgtcctgattttatgctttggggcagctaacgcgcttatccatattctatccagcattaaccttctgccggtataccgatag

SEQ ID NO: 71697 - DNA, 651 bp, Citrobacter koseri
atgagtaacaggcagatccgccgtgttaacctctcattgcatttgtcgccagagcgatcgcgcgcggatttgcgcgcgatgctgcaactaaaaaaatggtatggcgcagtgcagcgggacgggagcgacgtcaatgacgccaacatggagatccgccagtttcatcgcaatatctatctgtccggcctgcaattgcatcttctcaacccgcaattgtgcagccatgttgcagaatccctgagccgggaaggtttgagcctcgaatccctttgcgcggaattgcaggagagcaatttgctgcccgtcgccctcatgaccggcgatggcgatgcagaaaaagagaaagacttcagcgaacagcagctggcgcaaatgcgtacgctgatggcgcagaccctgcaaaaacagcaggtcgccgcagcgccatcggataacacgcagcatgaggagacggcaaaactgcgcgaagaggttgcccagctcaaagtcttgctggaacagcagcatctgctgttgcaacagctgcgcgtgacggggcgcacgtcagcggcggaaccggctaaatccgtaaatgctgaagaagtcgatctcagtaccgtagacgcgccaacgcagaagatgagtaaagtgcgtcagaaagggatcttttag

SEQ ID NO: 71698 - DNA, 1050 bp, Citrobacter koseri
atgaccgcaacacgtatgaaattcgccattgatgatggctcaaccaatgtgaaaattagctggattgaaaacggtacgctgaagaccgttgtttcgccgaactccttccgtaaggactggaaaagcgcggcgctgctgcgtggtcagtcggtatacaactacaccatcggcaccacgaaatacacctatgatgcgacctcggataaagcgctttccacgacgcatatcgaataccagtatgatgatttgaatctgctggcggttcatcatgcgctgctgcaaaccggcctgacgccgcgtgacgttgaagttatcgtcacactgccgattacgcaattctacaagccggacgattgccagcgtaacgatgagcgcatcgaagcgaaacgtcgcaacctgatgcgtgagatctcgctgaataaaggcgagctgttccgtatcgttgatgtgcatgttatgccggagagcctgcccgcggcgctgtcgcatctgcttaactccaacgtgaatgaattcaccaagtcgctggtcatcgactgcggcgggacaacgctggatatgggggtgattgttggcgagtttgacgatgtttccgcaatttacggcaacaacgaaatcggcgtggcgatggtgacggacgccacgcgtaaattactggcggcggcggacagcgactccagctatctggtggcgaacgagctgatcaagcgtcgcaacgatctggattttgtcagaagcgtcatcaacgatgaatcgcggattgacgagatccttgaacggatcgagatcaagattcaggagcttggcgatcaggtggcttatgaagcgaagaaattcgctaagaaccctaaccgcgtttatctggttggcggcggcgcgcatctgatcgaatccgctctgcgccaggcctattcgacgctcggcgatcgcgtggtgacgctcgacaacccgcaaagcgcgctctctcgcgagatctgcctgtaccatgctgagtcaggcgttgagcagattgattcgccgcaaatggttgaggtaggcgacgatgagtaa

SEQ ID NO: 71699 - DNA, 720 bp, Citrobacter koseri
atgccgacgggctacagcatcgcaaagccgaagcctgtagaagcgggtatgacgcagcaggaaaacgcgttgcagatgcggaaaaaaaatcgcgagcggctgatggcaaaagtgaaaaaacggactgccgtcgtaccgttaacgccggaacaaaagcagcgggaaacggcgaaaaaactggctgaccgcactaaaaaccgcgagatgctggcaatgcatgcccgctggcagcccggtagcctgggaagctccgacacactgtggagtcaggcgcgcaaagggaaggacaaaacggggcgcatcagcccgaaactggcgtcccgattacacaccgtcatcaagcgtctggaagaccagttaggtaagccctatgtctggggcggtaaaaatccgctggaaggatttgattgcagtggcctggttttctacgccttcaatcatgtgctggagcgcaagctaccccgcacggcaaacggcatgtatcaggaccccactcttaaacatattcgcgtagataaactccgtcgcggcgatctggtgttttttaacattaaccagcgaccgggcgccgaccatgttggcgtctaccttggaaacgatgagtttattgaggccccgcgtagcgggctaaatatccgcattagccagctttcagatgatttctggcaatcgcattacctcggcgctcgccgcattctgacggaagaggcgacgctgtaa

SEQ ID NO: 71700 - DNA, 948 bp, Citrobacter koseri
atgcgtaaccgcagcaaagaacataccacgatcatcaaacgctcctcgcgtaaaagccatgatgaatttcatggcggcgcctggaaagtggccttcgcagacttcacgctggcaatgatggcgctgtttatggtgctgtggatcatgggcgcggtaacggaagaagaacgtaaagagattgtctccatgcttaatggcgagtcggtctttgaaggcaactcattaacgcccattacgcaaaaagaggggcagggcgggcagctttcgctgattgacagccgtcatccgaaaacgcctaaaccgtcgaaaacggcagagtcgtcaaaaccgttgaccgatgcggagaagcaggttgctcagcaggcgaaacagacggaaagcctggacgacgtgaacgctcgctcgcgtaatgagattgaagatctggcgcgcattatcatgaaaatcacctcgacgtacgatgcgcaagccaacctgaaaatggaaattgtgccgcaggggctgcgtattctggtctcggacgatcaaaaacgcgagatgttccagcgcagtagcgcaatcctgacgccgtttttcaaacgcttactgacggagtttgcgccggaactgaacaagatcgacaacaagatcatcatcaccggccataccgatgccacgcgttttcgcgatcaggtgctttataacaactggaacctgtccggtgaacgcgccatgcaggcgcgggcggttctgaccaccggggggctggatcaaagcaaaattctgcaagtgagcggcatggcggatcagatgttgcttgacccgcaacatccgctgagttccgcgaaccgccgcattgaaattatggtgctgacgcattccgccagtgattctctgtaccagttctttgggcagcatggcgaaaaagtcattaaaccgctgaccgataaactgacgaaaaaccattaa

SEQ ID NO: 71701 - DNA, 864 bp, Citrobacter koseri
atgcagaaattcttaggtattctcatcatcatggggtgtgttgtcggcggctttattttgtcaggcggacacctcgcctcattctggcagccgggtgaaatcatcattattcttggcgcgggactgggggcgatggtactggcgaaccccaaagcggtgctgagcgaaatgtaccgtcagtttcgcggcattatgcgcaaaaacgaatataccgatgagtatcagcgccagctgctgatgctgctgtatgaactgctggaactggtgcaggacggcggcctgaaggtgctggatgagcatatcgaagcaccggaaaacagcgcgttattccagaaatatcccctcatgctgcacgacaaagcgctggtgacgttcatctccgataacttccgcctgatggcgatggggaaaatcaacgagcacgagctggaagggattctcgaacaggaactggtggcaatggaagagaaccttctgcaaccgtcccgctctttgcaacgtactgcggaagcgatgcctggattcggcatctgcgcggcggtacttggcatcatcattaccatgcaatccattgacggctcgattgcggtcattggtgtgaaggttgcggccgctctggtgggaaccttcctcggcgtattcttctgttactgcctgatggacccggtggcgaacgccatggagcaacgcaccaaaaagcaaatctcggtgctggagtgcgtgcgtaccgtactggtgaaccacgttgccggtaagccgacgctgctggcggtcgatgccgggcgcaaaatgctgccgatggacacgaaaccgacattcgcgacgctggacggttgggtaaaccagatgatgggtgatgcctga

SEQ ID NO: 71702 - DNA, 693 bp, Citrobacter koseri
atggattttatcgcaagtgaaacgctgacgcctgcggatgaagcgcgctatgtcagcacgtatctgccgctcgtcaacaaagtggtgaagcaactcgcttaccagaccagtagcgttattgatcgggatgatatggaacagatcgcgctaatggggttgttaacctcgttgcgccgttacggtcatcctgatgagcagtttgccgcttatgccatacaacgcgttcgcggcgcggtactggatgagctgcggttgcttgactggcgtccgcgtcgtttgcgacagaaaacgcataagctcaatgacgcgatccgcgagattgcgcgtcagctggggcgtacgcccagctttgaggatatcagccaccatctttccattacggctgaagagtatcaggaatatctcttactcgattgcgccaaaacgctggagagtctcgacgatcttctgggtaatgacgtatatgcgggggcgctggatagccgtccgcttgaagaagagatcatcgtcagcagaacgctacgcaacgcgttggcgagtcttgatgagcgtgagcaacttattctcacgctctattaccagcatgaaatgagcctgaaggaaattgcgctggtcctcaatttaaccgaggccagggtatgtcagctcaataaaatcattgcgcaaaaaattcagtcttttttccagaagtga

SEQ ID NO: 71703 - DNA, 471 bp, Citrobacter koseri
atgaacgcaaaaacaatctcctttgggctggcgatcgctttggttaccgctttactgacggcatgtttaaccgttgccggcacctggctacttcgcgcggacacggcatcggagagcaatccgttgacgagcttatttaaatcctccacgccgcaacaggtggagttcgtggaaattaaaaacatcctcatcaccctgaaggggaaaggtaatgcggagcgttatctgatgctggaactgaacctggcgaccatgagcgcggaaaacgcgcggacggcgcaagacatgatccctgcgattcgcggggcgaccgtcaatttgttttctgaaatggactatgacgccgtgcgtgcgctaagcgtcagcaacctgcacgacaaactcaaagccgcctatgccgccagatttgacagcctgaagatggacatcccctttgatgacgtcatcatcagcaaaatggtcttccagtga

SEQ ID NO: 71704 - DNA, 1074 bp, Citrobacter koseri
atggatattctcaatctttctcaaaatgcggggcacgcttccggtttgccgatgcaggcggagacgatcgccgggcagagcggcgctcagtcatctgccgggcagacgcagccaggattcaacgatgcgttgatgaatgttgtcagcacgctgatgggcgggcagggcaaaaatgccctggggattaccgtcagcgcgcagccggtgagcgtgcaggacgaggacgatacgggcgatcggcatcagaaggatgcctctccgttgaaagacgatgcgcagcagcagctgttgcaggcgctgttgatgaccgggcagatgccggttaaacccgtcagctacgcgggtcgttcgcaaaacgagatgaatgcgctgacgttgcagacgcagccgttactggcgggacagttgcaggataagggggcgttatcgccaacgctgcgcccgacgctggcggcaggggttaacgtaacgcctgcgaccgagtcgccgcagacgccaaccgcagggttgcagcacattacgccgcagcttatgaccgcagtcgctgtggcgacgccgacagtgaatgcgcagccggtctccgttgtctccacgacgccaacggcggcggtgacgcctgatgcaatgtctgcgcatacctcgacattaaaacttgatacggaaacctcccgctggacgcagcagttgcaaagcgcgttgggcgatcgtctgcaacttcaggtgaagaaccagatccagcacgccactatccgtctcgatccgcctgaaatgggcaagatcgacatctcgttgcagcttgataacgggcgcgtacaggtacaaatcaacgccagccatgctgaggtctatcgtgcgcttcagcaaacgagcaacgatctgcgccagagcctgaccgaacagaactttgttcaggtaaacgtgcaggtctcctctcagtcagggcagcagcagggcaaagaacagcagttcgcacaacaacacgccatcattcaggcgggagatgagatcgcggcaggtctgccggaatcagaaagcacccgccgtgaagatgattcggtattactgaccgtttaa

SEQ ID NO: 71705 - DNA, 306 bp, Citrobacter koseri
atgagctatgcgttgacgatgcgaacgctgatgcaggcgttacgccaggccgcagccgaccataactggtctgccgtacggaatgttgacctgaagattgctgaattgcttaccgctgtccggggtaaacccctggacgcggcagacagcaaagccctggacgagctgcgggaaatccaccgtcaggtgcgcgattactgtcaggggcagagcgacattattgcgaacaaaatggcgctcgccatgcgcaatcgtgaaggtgcgacggcgtatgccgcgtttatggacgcagaggatatggggtaa

SEQ ID NO: 71706 - DNA, 393 bp, Citrobacter koseri
atgtacggtaacgagcaggaaggcttcggcctctatcaccaatctgacctggcgattcaggccgcagcagcgaatccgcatcagttagtgctgatgttgttcaatggcctgatggacgaactggtacgcgcgaaaagccatattgcggcgcgtcgctacgaacgtaaggcgcaaagcattaataaatgcatcgacatcctgaacgcgctgaccagcgcgctggattttgaaaaaggcggcgagctggcattaagtctggcgaatctttatgactactgcgtttaccgcctctatgacgccagccacaagctgtctgtcgaaaatattgaagaggtggaagttatcctcggcaatattcaggacggctgggaaaaaatgggtcagggaacatga

SEQ ID NO: 71707 - DNA, 1329 bp, Citrobacter koseri
atgtctgattttgatccaacgacactggccacacagttggcaggctatgacattcttgcgctgcaaacctcgctgaaatcacagacttccacgctggaagcgcagaaaaaagcgctttcctcgctgcgtaccgccctgtcggatttccgttcggcaatcaccgggctgaattcctccagcaccagcgtgctgaaaaataccgcgaccatgaaccaggaagggatcgcgaccatcaccgccagcgcgtctgcccgtaaagggacatacagcctgaacgtcacccaactggcttctgcgcagcagaaagggtttgacgggcttgatgatgaggcgattaaaaacgccagcggtacgctgaagatcaatctcaacggcgagagccttgaaattgagatggatgatttagacagcctcgctgattttgccgatgccatcaataatgcggatttcccgagcgcgtctgacaccgcgacctctgacgacggtcagaacggcgttaccgcttcgctgatgcgtattgatggcaaggtgacgctgatgatgagcagcgatcagagcggcgagaaatacgatattcagctggataccagcggcatgaccaacggtcaggatatctttaatggcgagaatgtgattaccgccggtaaagatgccaaattcaccgttggcgattccagcaccgtttactccagcagctccaataccctggataacctggtagacggcgtttcgatcaaactgaccggcaccaccgaagccaacaagccgctggttatttcagtcgacacggatgccacggggacaaaggagcaaatccaggcctttattgatgcctataacacgttgcaggacaccatctccgggctgacggcgaccggcagcagctctgattcgcgcggcgcgtttgccggtgatgccagtatctcctcgttaaccaacgatctgagcaacatgctgcgcggcaccttcggcgatcaaaacatgacgaagttcggcattactgccgacaaagacggcaagctgtcgatcgacgccgacacgctcaatgagcaactgaaatcaaatccgcaatcggtcgctgatttcttcaacgggaataacgggctgattaaagcgatggataaatcgctggataaatacctgaacaccagcaccggtttattaaaaggtcgccaggaaacgctcgacagacagcagcgcgacatcgacaccaaaaccgaaaaaatgaacacgcgttatgagtcttcctataaccgctatctgaagcagttcacgcagttacagtcgatcatgacgcagatgaataacaccatgagtatgtttagctaa

SEQ ID NO: 71708 - DNA, 894 bp, Citrobacter koseri
atgtcgctttctattttcaccagcgcttcttccatggcatccaccaatgccctgaataaatccaacaatctgctgtccaccgcaatggaacgtctgggtactggcaagcgtattaactccgcagcggacgatgcggcgggtctacagattgccacccgtttgcagggccagaccaacggcatggccgttgcacagcgcaacatctctgatgccactgcgctgctacagacctccgaaggtgcgttcgacgaagtgagcaacatcatgtaccgcatgaaagaccttgccacccaggcagcgaacgacaccaacaccaccaaagaccgcgatgccatcaacgccgagctgaacgacctgaactctgagttgcagaacatcatgaacaacacctcctatgcaggtgacaaactgttcggcgcttccggtaagtttggcgaagcgatgaacttccagattggctcttccaccgatgaaaccatgcaggttgatctgtctaaagagctgaaaggttctggcaccgactcgctgattgatgccagcggcggttttggcacgattagcgatacaagcagcagctactactcggccagcggcatcaacattactgacgctgccggcgcgaaagatctgatgaacaacctggaaactacgctgaatgacgtcggcgccgtgcgttccaaaatgggtgcgagcattaaccgtctgggccacaccgcggccaacctggcaaacatgaaagacaacaccgatctggcgctgagcaatattcaggatgcggacttcgccagcgaagcctcctctatgacccgtaaccagatgctggcgcaaaccagcatgtccatgctgaaacagtccaacagcatgtccagcatggtgatgtctctgctgggttaa

SEQ ID NO: 71709 - DNA, 879 bp, Citrobacter koseri
atgtcgctttcgattttcaccagtgcttcttctatggcatccaccaatgccctgaataaatccaacaatctgctgtctaccgcaatggagcgtctgggcaccggcaaacgcatcaactccgcagcggacgatgcggcgggcttgcagattgccactcgccttcagggtcagaccaacggcatggccgttgcgcagcgtaacatctctgatgccaccgcactgctgcaaaccgcagaaggcgcgttcgacgaagtgagcaacatcatgtaccgcatgaaagatctcgccacccaggcagcgaacgacaccaacaccaccaaagaccgtgatgccatcaacgctgaaatgaacgacctgaatgccgaactgaaaaacatcatgggcaacacgtcttatgcaggcgataaattattcggtactggcggtaaatttgccgattccctgaacttccagattggttcttcctctggagaaaccatgaccgtgagcctgggtgatgaactgggcggtacagcgagtggcctgtttagcgcttccggtttctcgggtatcggtgactggaacaacaccgcttccggtatcaacatcgggagcgcctccgacgctacggcgatgatgaactctctggaaacggcgctgaatgacgtcggtgccgtgcgctccaaaatgggtgcgagcattaaccgtctgggccacaccgcggccaacctggcaaacatgaaagacaacaccgatctggcgctgagcaatattcaggatgcggacttcgccagcgaagcctcctccatgacgcgtaaccagatgctggcgcagaccagcatgtccatgctgaaacagtccaacagcatgtccagcatggtgatgtctctgctgggttaa

SEQ ID NO: 71710 - DNA, 954 bp, Citrobacter koseri
atgaataaacgctattactccgttaataactggctggttgatatcccctcgggatctattctccatttaacaacaggggaacgtaaacgtctgggagaatatcaactcaagctccttgaaacgctcatgcaagatgcgggaaagatctttacgcgtgaagaactcaccacgctggtctgggaacgccgcgtcatcggtaataacagtctgcccaatgccatccacgcgctgcgtacggcactggaagacgacggcaaaaagcaaaaaatcatcaaaaccatccctaaaaaagggtatttgcttgagcctgattattgctgctttatcgaaaaagaagagagcgaggttcgcgaccccgaagaaaatcatcttccgctggaagaaaacgccccctccgatttagccggggaatatgaggttgtcgacgagacgtcacttcctgtcgcggaacaagtgaacgatatcgtccgcgtcacgccgcctgcaacgaccaggccagtgaaaaaatccatccactggaccaccgtgtttttactgctcgcgctgacggcgatcggcagcatactctttaccggctggtacatgaaactgaaaggtcatgagcatctggtcgcccaggagatacagcctaacgtttacagcaacatcaacctgtattccattgggacgagcagcgagccgtcttatgacgccaataacttgtacaccaagctgaaagacactttttataccattaatcagcagatcaaaatgcagtcagtcaggatgagcgtctactttagcatcaccaattcatcgctgaactacacgttcgcccttaccagccagtgcgacaaaaagcagttagcgatgacgatttatcactggcgtatcgatccgacacggctgaacaacctgattatgcgtgaaacccggagaaaactgaatgaaatggcaacatgcaaagaaagttaa

SEQ ID NO: 71711 - DNA, 471 bp, Citrobacter koseri
atgaaatggcaacatgcaaagaaagttaatcttgtgattttgttgagtatttccgtgcttctcgccatcgcattcggcaccagtgccctcacaggcggcgcagagcgccccaatacggatgtggaagggactttccagcttggtttctatgacctgatgtcgcagacgaaagaaatttataattcacggatgaaaacaacgaaaggcaccattctggcgaccattaccagccctgatgacaatcgtttcgtactaaaggaaaaatttacgccgacgtcagggaaaaacggcaaactctatttttacctgacgcccatctactacaccaccacgcacaaggggctgatgatagatggtctggtcgatatgttgatgaacaccaatttctggatggagccgctggcatttaacgggcaaccgctagtggtagggcaaagcgggtcgatttttctctaccctatccagcagtaa

SEQ ID NO: 71712 - DNA, 1005 bp, Citrobacter koseri
atgcaggtaggtttaaaaacaacgtcccttgcgacttccgcgcccgcaaccgggcgcggaagcattgatgcgccgcaaacggtcggccgcgtcaacgcgccagaaatcaccgcgacccgcaatgcgttccccgaatcggcgctgttgtcccgccgtccgatgcgttacaacgtacagctaaatcaacaacttacggcagtgcagcaggctgacagctatctggcgcagacggaaacgcaattgttgcaggtgcgtcagtcgtcgcttcgcggcgatgcgacgcagccggcgaatacgctgcaaaagcatttgatgcgtcggacgcagctttccggcggcactgtcgatcgccatctgaccgcgtcgctggagcaaaaaagcacggttaactttacgcttcccggcagtgagaaacttctcagccagccggggggagaaacgctggtattttcactgggcgggcgacagcgtgagatgaccgccatttcgttgccggaagaggcgacgccgcgtcagacgttgacccagttgaatgtggggctgggccgtctggggattcatgcgcgtcagacggcaaacgggcaactgatgttcagcgtggatgaaagccgttgggagcgggtcagccaacagctcaccgtgcgcggagagggcagacatttccccgccgatgcgtttacgttgctcacgccacaggcggaaacagcaagcagtgatgaggttgtttcgctggcgacgcgtcgggaaagggaaagccaggtaaagctgcaaaatacgctggagcacattaccacccagcgcagcaggcttcgtcaacagcaggagcgcgtggcgtcgcgcatcaatgatatggcgacggtatacagcccggcgcaggcccgggaaaccgcgcgcggcctgggggaagcgctggcgagcagcgccagcagctacagcaccctctccagggcgctgggcgcgcaggcaaacgtcaggctggcgacggtaaaaaatttgctggggtga

SEQ ID NO: 71713 - DNA, 918 bp, Citrobacter koseri
atgcgtattagtagtctttacaactcaaatgccatgctggcgcaattaggcgttaacggcacgcgtatcagtaagttgatggagcagatgtcgacgcaaaagcgcattaatgtgccgtctgacgatcctgtttccgcaagtcgtctggtgcaactgaaccgtgagcagtctgcgattaaacagtatcagagcaatatttccagcctgagcggcgcgctgtcgattcaggagtcgaacatcaccgcgctcagtaaccagatgctggcggtcggcgataagctgaagctggcgaataacagtacgctcagccagaaagatatggcgggttacggcatggagctttcttcaatgctggattcgctggtcgccaccctgaacgctaaaaatgaaaacggcagctatctgttttccggcacgcagactgacagccagacggtaacgtgggacgaggcgaaagggcagtatgtgtatggcggcaatgacagcagccgcgaaacgattgtcgcgaacggcgtctctattacggaaaacacccatgttgctcaggcattctccggttcaggaaacgaccttgagatgctgaataaattgaaagcgctcagcgacaaaatgcagtacccgaacgcgaattacgctgactataaagacgaactggaggagatgatcggtgtcgcgcaaaataccagcgataacatctccagcctcttcaccgatcttggcggccgtcagaaccgcctgacgctgctcagcgatgcgcacagcgatgtcagccttgcgaacgatcaggttgtacgggacctgtccgaaacggactgggcgaccaccagtatcaacctgcaactgtatacgcagtcggtgcagatcactaataaggcttacagtatggtgagtcagcttaacttgtttagtctgttgtaa

SEQ ID NO: 71714 - DNA, 1386 bp, Citrobacter koseri
atgagtatgattaatattgccttcagcggtttgcaggcagcccaggtgggcatgaatgtcacctcgatgaacatcgctaacctgctgacgccggggtacagccgccagggcattatccaaagctccatcggcccaatgggggaagcgggttttaccgccgggaacggggtacaggtcgacagtattcgccgcatctccagtcagtatctggttaatcaggtgtggcagaccaactcgaaagccagctatttcgaaaccggaaatcaatatatcggcgcgctggaacaggtgatcggcaccgactctaccagtcttggtaacgggctggatgattttgtcagcgccctgagcgcattgacccagacgccggaatccccggcgctgcgtcagcagcttattaaccaggcgggcgcgctggcgacccgtttcaataacgttaacaacttcatctccagccagaaagagtcgatcaacacccagcgcaacgcgatggttgaccagatcaacaccctgagtaccagtattgcggactacaacaaaaaaattaccgacatggagtcaaccggcggtaacagcagcgtactgcgcgatcagcgtgatgaactggtaaaacagttaagtacgctggcggacgtgaaggtgacggacgatggttccagcgggtacaccgtctcaatggcgaacggtcagccgctggtgagcggtaaggtcgccgggcagctcagcgcggggcaggacgccaacggcaactccacgctgacgctgaaattttccaccagcgagttcacgctgaacccgtcggcgggcggtcaacttggcgcgctgtatgattatgaaaccggcaccctccaacagatgaaagattcggtgcaagggatggcggaatcggtggcaaaactgtttaacgatcagctggcgaagggctatgacctgaatggcaattcaggcaagccgctgtttactttcgatccgagcaatcctgcgggcatgttgcaggtgacggatctgaagcctgaagaactggcgctgtccggcatccaggccgacgacggcacgggcgtaccgggcaacggcgataacctgaaggcgctgatcgaactgaaaaaccagaaaacggatattccgggtctgggaaatatgagcctgagcgaaggggctgcggcgatcatttccactatcggtattgccagtaagcagagcaaaacagaaatggaagcggcgtcgacggtgcgcgaccaggcgcagaatcagcgcgataacctgagcgcggtaaaccaggatgaagaggcgattaatctacagatctacatgcaggcttaccagtcgaacatgaaggtgatctccaccggaaatcagatcttcagcgacctgctggggatgttttaa

SEQ ID NO: 71715 - DNA, 390 bp, Citrobacter koseri
atgctgaatgccattaaccgacaaaccgcgattctgcccggcgatctctccgggcaggtaaagccgcagaatcttgaacaggccgccgaacagtttgaggcgctgatgctgcgttccatgctgtcgcaaatgcgcaaggcgtccgatgtgctgggggaagacaaccctttcaacagcaaacagcagcggatgatgcgtgatttttacgatgaccggctggcgtctgacctggcgtctcagcgcagcaccgggattacccagatgatcatcaaccagctttcgccgcaggtgaatacgccgcttaagaaaacggatgaaatgaccgctttagaagagcaaccgaaagaacttaaaacgcctgtggttccggtaatgcgcgggcaggagtaa

SEQ ID NO: 71716 - DNA, 1092 bp, Citrobacter koseri
atgtgtaaactggcactctttttcctgctgatttgcagcatgaacgcggcggcgcagcgtcttggcgatgtggtcgatattcagggcgtgcgcggcaaccagctggtgggctacagcctggttgtggggcttgacggtacaggggataaaaaccaggtcaagttcaccagccagtccgttaccaacatgctgcgccagtttggcgtgcaattgcctgcgaagattgatccgaaggtgaagaacgtcgcggccgtggcgattagcgccacgctgccgccgggctatgcgcgtgggcaaagtattgatgtaaccgtctcctcgattggcgatgcgaaaagcctgcgtggcggtacgctgctgctgactcaactgcgcggtgctgatggcgaagtgtatgcgttggcacaggggaatgtggtggtaggcggcgtgaaagccgagggcaacagcggctccagcgtgaccatcaacaccgcgaccgttggccgtgtgccaaacggcggctcggtggagcgcgaagtgacgagcgatttccagcaggagccggtggtgatgctgaacctgaaacgtcccagctttaagactgccaacagcgtcgcagtcgcgctgaacaacgcctttggttccggcacggcgaccgcgcaaagcgcgactaacgtggcggtacgtgcgccgatgggcgcgggcgatcgggtggcctttatgtcctctctggaagatgtgcagattaacgccggtaaacagccgccacgcgtggtgttcaacgcccgaacgggaacggtggtcattggcgatggcgtagtggtgcgcgctgcggcggtatcacacggcaacctgaccgtcaccatccgcgagtcgtcgaacgtcagccagcctggcgcattcagccagggaagaacggttgtcacgccggaaagcgacgtcaacgttaaccgtggccggggtcagatggtgactattgcggcaggaaccagcctgcgcagcatagtgaataccattaacagccttggcgcggcgccggacgacacgatggctatcttacaggcgctgcatgaagccggcgcgctggatgctgaactggtcgtgatttaa

SEQ ID NO: 71717 - DNA, 666 bp, Citrobacter koseri
atgaaaaagcagttagttatcagtctactggcgctgtttttgtcgggctgcgaaagcccggcgttgctggtgaaaaaagacgatgcggcgtatgcgccgccggaagatatcgtggtgcctgaaacgcaggtgcgcggcggtgggttatataacggcaactacaactggtcgttgacccaggatcgccgggcttatcgcgtaggcgacatcctgaccgttaagctggatgtgtctactcaggccagcaagcaggcgcgcactaactttggtaagaaaaacgatgtttccctggggataccggaagcattcggccattcaatcgataagctttccggctcgattgacggcaaccgaaactttaacggtaatgccacctcgcagcagcagaacagtctgcgcggcgcgatcaccgttgcggtttataaagtgttgccaaacggcgtgctggcgattcgcggggagaaatggctcaccctcaaccagggggatgagtatatgcgggtgacgggcctggtgcgcgcggaagatatcgaacgcgacaactccgtctcttcacagcgaatcgccaatgcccgtatctcctatgccggacgcggcgcgctcagtgacgcgaatgcggcaggctggctgacccgcttcttcaaccacccgctgttcccaatttaa

SEQ ID NO: 71718 - DNA, 786 bp, Citrobacter koseri
atgaatcccgctttatggatcagtaaaaccggcctggcggcgcaggacgccaaaatgaccgcgatttccaacaacctggcgaacgtcaacaccaccgggtttaaacgcgatcgcgcgatgttcgccgatctgttttatcagaatcagcgcacgccaggcgggcagctcgatcagaacaatatcgcgccgaccggcattcagtatggcaccggggtgaagatcgtggggacgcagaaagagtttaccgtcggcagcatccagaacaccgggcaaaccttcgacgtggcgatcaccgggcaagggttcttccaggtggaaactgcggatggcgatatcgcgtatacccgcgccggtaatttccagaaaacgccagatggcgtgctgacgaatgcgcaggggctgccgctggtgccgcagattgaattgccggagaacgtcaaagatttgcagattggtaaagacggcaccattaccgcgacggtggcaggcgaaaccgatccggtggagctggggcagttgacgctggtgaacttcgtcaatccggccggtctggaggcgataggcggcaacttataccgtgaaacggcggccagcggcgaagcggttgaaggcgtacccggcgaggacgcgcttggacagctggagcagggctctctggaaggttctaacgtacaggtcgttgaagagatggtcgacatgatcaccgttcagcgtgcctacgaaatgaacgccaagatggtctctgccgccgatgacatgttgaagtttgtcacccagtcgatgtaa

SEQ ID NO: 71719 - DNA, 732 bp, Citrobacter koseri
atggatcgtttgatttttaccgccatgagcggcgcatcgcgcagtttgtcgcagcagcagatccatgcaaacaacctggcgaatgtgaatacccaggggtttcgtagcgatcttgataatgcgatttctcagcaggttaacggcgagggatatgcctcgcgttatatggcgctgcctactcagggcggtgtggatatgacgcctggcgcggtacgtgaaacggggcgcaatctggatatcgccattaaaggcgatgggctgattgcgttgaccagcggcaaccgtgaggtttacacccgcaacgggcagatcgacgtcagcccggagggcgatctgtcgatcaacggtctgccggttgaaggtgacaacggcccgatcgttttaccgccgttctcgtccgtcagcatcggtgaagacggtgtgatcactatcgtgcctgacgacggcgatattgccgcgccggttgatgttgaccgcatcaagctggtgaacattccggtaagcgacctgagcaaaaatgtggatggctttctggtgagcaacacggcgattaacccacgcgatgaagaggtgatggtggcgtccgggcatctggaaaccgctaacgtctcggccattaatgagatggtcgccagcattgcgctgaatcgtcagtttgaagcgcaaatcaagatgatgaaagccgctgaagatctcgctaattcaggcaaccgtctgattcgtggcacctga

SEQ ID NO: 71720 - DNA, 1191 bp, Citrobacter koseri
atgagttttaatattgcgacctctggtctgaatgcaattaccgagcagttgaacgccatttccaacaacattgcgaactccggcaccgtaggattcaaatccggccgtgcggaattttcctcactgtatgcggaaagccagccgctgggcgtaggggtttctggtgtgacccagagtattacccgaggcggaaacatttctaccaccggaaatgcgctcgatctggcgatcagcgatagcggatttttcatggtgcgcgacagcacggggaccacggcatatacgcgtgcgggctacttcggcaccgacagcagcggcaacctgatcaacaacctggggatgtatcttcagggctacccggttaatgctaacggcgagatagaagtggggacgatcggcaatctgacgatcagcagcggctctattccggcgaaggcgaccgacagcctcgacttcaccgccaacctggacgcgcgcgccgccgaaccggagacggtgcctttcaacccaaaagacagcacttcctataacaatacctacaccacgcaggtctttgattccctgggacgcgagcacacgctgaaccagtattttgtgaaaaccggcgagaacacctggcaggttcactattacatggacgacgtggaaatcccggacagcagccaggcgatagaatttaccgagcagggcgtcctgaaaagcccggttggcctgacgaacctgaccacatcgatctccggcgcggcggatctctctatcgatctgagctacaacggcaccagccagtacggttctgacttctccgtcagcaaaaacaacagcagcggctacgcatctggcgaacgtaccggtcaggcgattgatgaagacggcagcgtttacgcgaccttctccaacggcgaacggatgttgcaggggcaactggtgctggcgaactttgcgaacccgaatggtctggcgtcaaaagacggcactacgtgggtacaaaccgccagttccggcgcgccgctgaccggaacgccgggcaccggtttgctgggttctgtgaaatccggtgcgctggaatcctcaaacgtggatttgacctctgagctggttggtctgatgaccgcgcagcgtaattaccaggcgaacacgaaggttatcagcactaacgacaacatgatgaacgctctcttccaggcggtgtaa

SEQ ID NO: 71721 - DNA, 684 bp, Citrobacter koseri
atgaatgtagacggcacgtccaccagaagccagacaggaacgtcggatagcagcattgccagtaacaacaataacagcagcgcagccggcatgaacacgctgttcatgcagcttctggtcgcgcagatccagaatcaggacccgctgaaccctaccgatggcaccgagtatgtcagccagttggcgcagctgacgcaggttcagtcaatggaaaccatgtcgcaactgatggcgaacagttccgtattgatggacaacctgcaaacgctcaccaccggcaacctggtcgggcagcatgtgatggtgcagaccgacgctatcaactctgacggcgaaacgacgattaacggacgtctgacgctggatcacgcttccggtgtgacgacggtcatcgtcaaagacgcggccggcaccgagcacaaaattgagctggggaaacaggacgccgggcaggtggacttcaccattgacccgcaggagctgggcctgagcgaagggaaatacacccttagcgttgtgaccgatacgggcgaagaaggcattcctgttgaagtgggcggcatcgtcaacaatgtgcgcatcccgcttgatggcagcgccatccaactgaatatcaccggaatcggtgagattgcttacaacaatattacccagtttggcagcgactcgcagaaacgtgcgtaa

SEQ ID NO: 71722 - DNA, 426 bp, Citrobacter koseri
atggcttttaccgatatttatcgcgtttcggggtcggcgatgacggcgcaaaccgttcgtctgaataccatcgccagtaacctcgctaatgcggaaaccgcctccgccaccgaagacggcgtctataaagcccgtcgtccggtgtttgctgcggtttataagaatgatgagttaatgaatagcagggcgttaaccggcgcgcgcgtccaggtgatggatgttgtcgaaaccggcaatgccgtacagcgttatgagccgcataacccgatggcgaatacggatggctatgtctactacccggatgtcaacgtggtggaggagatggcggacatgatgtcggcgtcgcgcggtttcgaaaccaatgttgatgttctgaacagtgttaaaagcatgcagcaaagtctgctgagactcggagaggtataa

SEQ ID NO: 71723 - DNA, 351 bp, Citrobacter koseri
gtgagtattacttttgacaaagcattgggcgttcatccacaggctgtagcgcttcgactttcccgagcagagttgctgtcagccaatctggcaaacgtcgatacccccaatttccaggctaaagatattgattttgccgctgagatgcaacgttcatcgtggagtttttcgaatccgtcagcgccgcaagagatgtaccgcgtgccttatcagccctcttccgatggcaacaccgttgcgctgaacgtcgagcaggctgagtttgcgaagaatacccaggattatcagatgagcctggcatttttaaacatgaaattcacgggcctgaaaaaggccattgaaggtaagtaa

SEQ ID NO: 71724 - DNA, 792 bp, Citrobacter koseri
atgatttttaatggctttattggttttatcccttcgcgggtgaagcgttgtttccgccctggaacgttatccttcctgctgatgctttttacagcgctgccatccttcgccgccccggaaaaagtgcagagcgcgcgtaagcaggtcactgccgccgttcaacatcacgcagcgcaagcccttcgccaggaggccgggcgccgcaagtggcccgagtaccaggcgaagatgaacctgtttatcccttccgacgtctcccggtacgctccctgccctgacgcgctaaccgtgtcgctgcccggcggcgaacgcatcgatctcaaccgcctgcgttttgatgtgcgctgtgaagggccgcaaggctgggatgtcgccgtcaccgtcaaaccggatgtctatcttccggtggtgatcgccaaaaattcactggagcgcggccaggtgttatccgctagcgacgtatccatcaaaaagctcaacatcagcagcacgcgcggcaactacctcaccgacccggatgaggccattgggctgaccgtgaagcgccgcattcgtgaactacagccgatcaccctgacgcaactggaatctccggtgctggttgaacgcggtcagcgcgttctgatgatcgccgaacaggggggcgtagaggcccgtacgatgggggaagccatgaaaaagggacgtaaaggcgaaatgattaaggtgaaaaatgagagcagcgagcgggtggtcagcgcaattgtcgcggacgctggcgtcgtcaaaatggtctacgccagcggaaactaa

SEQ ID NO: 71725 - DNA, 273 bp, Citrobacter koseri
atgaaagtagtagcgaatcaatacaatctggcaaccgcaatcaacaagagcagcgccgcagaacagacccgcactgtcgctcaggaaggcacgaaaattgagcgcagcgccgcgatcgatccggtactgggcgatgcgcaaacacaactctctgcgctgccggaagtggatatggcgcgcgtagctgaaatgaaagacgctatcagcagcggtaaaatcgcggttaacctcgattcgctgacggatgcgatgcagaagtatttccagaggtaa

SEQ ID NO: 71726 - DNA, 438 bp, Citrobacter koseri
atgactaacgccgctcagagcgttaaaacactgatacaggacatggccgaagaccgtaagcattaccatgtcctgaatgatttactcatacagcagcgcgaccacattattgcgcgccgcgccgcagagcttgacgtgctgaacgcgcaaatcatggcgtgctaccagcacttgtcgcagcacagtcagcaacgttatcgcctgcttgagcggttaggcattaacgccaacgcacagggcatgcaaacgctcattgcccgcctgcctgccgcccaccagccttccgtttccgctctctggcaaagtctccagcaacaggtcgcgcaatgtcaggccaccaatgaatacaacgccatgctgatgaatatgcagcaggagattctgaccaatctgttgaatatcagcgaacccgaaaactggctgtatcagcaggggtaa

SEQ ID NO: 71727 - DNA, 1248 bp, Citrobacter koseri
atggggcaattacgacgcttcaaccttccccacctgattcgtcactatcgtgttactcatgtaattgaaacaggttttggtaaaggtgcatcaagtgtatatgccttacgctcaggtgctgaagaagtttattcctgtgaaatctataaaccgttatttgatgccgcgccaaaaatagacaatctgcatctgtacaatgaagacagcctgacatttttgtcccatgaagaaattaaacgcactcttttcatcaagcgcgccgttgtttttctggatgcacacttccccggcgcggattttaaattcgaggactaccagagcaataaatacaatgaggaaacgcgccttcctctgctcaatgagttacgccagctaaaagaatttgcggataatgcgctgattattattgacgatagccgtatctatcttcgcgtcatgcatgaggccaccggctgcaaagcgctccctcctcccacagaagacgctgagaacgcgtttctggaagcgcttgaggcctatagcgggacgcatatcatcaaacattaccccgatgaccagggctacgttgtactttggcctaaaagctggcgagaattcggcgttaacacccatattctggcaggagaccggactgccgcccccgtatttcgaacggggataccaggaacaacctgtatgtcaattaacaggagattgcttgatgcgcgtttcagtactcgctggctgtcaggaaaaggtctggatattggcggcggcgatgacagtattgcgttgtatcaaagcctgtttcctttaatccaatcaataaccgtattcgatcttcaacaaggtgacgcgcagtatttagccagagtaccggataacgaatttgatttcgtttattcagggcattgcctggagcatgttatggacccctacgtcgcgctgcctcattggttaagggtcgtaaaacccggcggtcatctggttttaaccattccagacgaagatttatacgagcaaggcgtttggccttcaaccttcaacgacgatcataaacatacttttacgccctttaagcatcggagctggtcgcctgtttccgtcaacgtattatcgttactacaaaccctgccagggaacttcagcattgagaaaatagagaggctgaatcatagccatttaaaaggtatgcctcgattcgatcaaacgcggacggcgtttgctgaatccgcaattgagataatcatccaaaagctgaaatcatag

SEQ ID NO: 71728 - DNA, 1074 bp, Citrobacter koseri
atgaatcaccctgtcgtatcgattattttgccggtctacaatgtcagcgcataccttgagcgctgccttgattcactcgttgcgcagacctggcggcatctggaaattatcgcggttaatgacggttcgacagataactcccgggatattctggcgcgttatcagaaccgtctgccgggtatgcgtattgttgaccaggaaaacagaggacttgccgaggcccgcaacgccgcgttagcaagcgcatcaggtgaatatatttattgcctggactctgacgatcatatcgcttcggatggtatcgaaaccattgtgcgcgaaatggaaaagcatcacctggatgtcctgtttttctccacccatctggaatttcacctgcaccatatcagcaacaatatggtttccgggtattatcaacggccgcgtaatctgattaataaaacatttcatgccgaaacgttctttaatcactgcattaccgaacgcgcccgaacaggacacggttactccgttgtggtctggggatatgcctggcggcgaaaaacgtatgctcatatgcggtttaagacaccgttttttgaggatgaatacttcaccaccgaattgctgctcagcgtgcccgacgcaaaagtaaggtgccttgccgacagactgtatttccataccattcgtaacggctcaatcaccacttccagcagcaaagcaaaacgcgcgctggctatccttgataccttccgactgctgcttccccgggccggaaatatcagcaatccccaaaccgtacaatgtttaaaccgatatacgggtatgctatatcaggatgcgataatccgtaatttgcccgaaacgctgcctttattttccgcacagaagatgattcactatctggcatccatttttcatgaactgtatgtagacacgccaacagagaatgggcttgtgttgctgcatgccttgattaaccaaattgctcgcgacagcaatattattgatgagagcgaattcatcgcgctatcaggcagaattgaactggcgataaagaacaaaagaagaatattagccgaaggtttttag

SEQ ID NO: 71729 - DNA, 957 bp, Citrobacter koseri
atgggagataccctgtatctcctggcagcgtgcagagccatcaaaaataaaacaggcgcgagcatcattatgttgagccagccgcactttagcgcgctggcgcgggcatgcccgcatatcagcgaggtctggccggtggactctcttagtgcggagcagcatcaatgcattcagcgggcgcaggcgcaagggcgactctttgactttacgcattgggcccatgcgctcagaccgctacatatgatcgatgcttttctcgcgcaggcagggcttgaggcgtccgcagcggataaacacctcgatttagtcattccagaatctgcccacagtgccgttgacgcgttctggcagcaacataaattagagaacgcgccggtgttattaatgcaccctaatattgggcacccaaaccggacttggccgcaaaataactggcatgagctggcgcaaatgtggctgcaaacggggtggcaagttgtgttcattgggagcaataacaactcagaggcgggaaaatcgatggcggaagcgtatccggccggagttatcaatgccattgaccgcttttcagcgctggaaacggttgcgcttatgcagcgagcgaacatgctggtttcctgtgattcagggccggtcatgcttgcggcggcaacagatatccctgtggtagccctctattcaaccgtggctgcggaacaccggttgccgtttcgccgtagggaagcgggctggcgttgtatgggaattgatcttgcctgtagtcatgggccatgtgcgcgtttgctgatgaacgatgtcattttcaccaccgtgcttaaacgcccttttgatgtgccgacgactcaggaatttgcaaactggtgcgttcataaaacccctttccgttgtctgcgacaatatgaaccgacgatgctgtatacccaaatggtcagttttgttttatcgctccaggaataa

SEQ ID NO: 71730 - DNA, 942 bp, Citrobacter koseri
atggaactgatagaacattaccaacctgaatttgtgtcacgctttgatgcgcgagaaaccccgtgccagtgcccggcttgccagcatgcgcagcaaaactggccgcgtattagcgtgaagctgaaaaaccagcagcgtgaaagtctggatatcacctgtgaagcggcggccagagagatgctgcttaacccggaggcctttatcctgcacacctcgcaaggggaggcgcagggcgaagatgagttatccgcctggagcgaaaccctgaaccagcaatgtattaacctggcggtacatcctgcgctgtcgctggaaggcagcctgtatgcgatcggcgttttgctgagtaaggcgcagcagtatctggacggcggcgagcacgatccggccctgctgtcctctatgggagagcaactggcaatgctggcagaacaaggcgtgctgacacagcagtttgcgctgttgcctccgattgctgaaaaccgcattgccgcgctaaaagagatgggccgggtacgcctgaatctgaatctgccgctgactgaaaaaatgagcgtggcgctgaaaatgagcgagctgtcggtgatgcagccagcgcggttggcggatcgtcttcagcaactggaatcgctctggtcaaccattccgctgtttgatgaacagccacacatcctgcgtaatgcgctgatttatcaactgtataacgatgtattccccggcattcaatgcaccaactacggtgaggcgctactggggctggccaaccagttcttccagatcaaaatgctgtgcgcaatccgctgcgaacagggagcgctgacgcaggatgatgtcgtgctgctgattaacgcgctgaaggggtggcagcagcagaatccgttctccgcgaatgcggcgcatacctctgactacagcctgctgtgcgggttgtcgctgttgtaa

SEQ ID NO: 71731 - DNA, 1434 bp, Citrobacter koseri
atgaaaagaaacaaaccgggtttcccgcaaacgtcttcgcgttctctgatggggacgctgattcaccgtcagcagacggcacgcgttcacagcacgccgttcgttagcgtcgtctgcccgacgtataaccgacgcgagttcctgccgtatctgctgtatatctggcagtaccaggactatccggctgacaaacgcgaactgattattctggatgattctccggtcagcaatgccgatctgattgagatgatgacggacccgtcgcagcccaacgtgcgttatgtccacagtgaagcgcgcctggtactggggcaaaaacgtaacatgctcaatgcgatggcgcagggagagtacatcctgtgttttgacgatgacgattattacccgccggataaaatttcctggcaggtggcgcagatgcaggccagcaacgcgctgttctccggcagcgatcagatttatatctggtacagccatctggacaaaatctatatcacgcaccctttcgggccgagacatgcgctgaacggcacttttgggtatcaccgcaatttgttgaaaaaaaatcgttatgacgacgatgcgacaaaagcggaagagacgggattcctgaaaggctttaccacgccggttcaccagatagatccgaagcgcgccattctttgtatttcgcacagcagcaatacctatgacaaagatttcatcatgggcagctccacgccggtggatctgacgctggaagacattgtcaatgacgcgaacttgctggcgcactaccgtcgactgagtcatgcgccgctgaatgttcaggtgaactggcaggcttttgaaaaggtggcggtgctctacgacccggcaaaagaggcggagctggcccgtcgctgcgaggctttactggattttggcctgcgtggcgaacagatctggccggtagcgaaaaacgcggaggcgtcggcggaacgggcggaactggcaacgcactgccaggtgcttgagcgggcgcagaaagaaggctggaaaaatgtactgctgctggatgccgacgtgcagttcgtcaaaaaagagaacgccgttaacgacatcaacaagctgctgaatggcctgaaccagcttaactggcaggtgcttctgctcggcgggcgctatgaaaactttacgctcacccagtcattgaagggcgtagcgcggatctataacgcgggctgcggctgcgcgtatgccgttaacgcaggttattacgatgccctgctggacgcctatcgccaggcgatggactatccggcaagcctggatcgctgctgggcggcattaatgaataagggggatttgtggctgggattcagcccgagctttgccttcctgcaacatcacccggaccctaaaagtggcgaaatcatcgattgtacgcactggtttttccgtaaacaccgctaa

SEQ ID NO: 71732 - DNA, 444 bp, Citrobacter koseri
atgagcaaactgatttctacgcttgagcaacttcacctgctgcgcgcccgcgcggtagaagacttaagcacgaagctggcatcgcaaaaccagctgtgccaacggtttgagaaaaatatcgatacgctgacgtcacttgctgcgggtctggtgtctcagagcgccaacagtgcggccatgatgattaaccagtcgaaatataaacataacattcaacgcattatcgactggcaaaaacaggagcaggcgctggcgcacctggaagcgcaaaaaattcagggcaacctgctggcggaggcgaagcgggaaaaaagcattgagctggttctcgacgctaaacgcgctgaccggcaggctgaaatcaaccgtcgggaacagaaaatgaccgattcgctctctgcccagtgctggctgcgtcaacaacgtctgattcgtcaacgatag

SEQ ID NO: 71733 - DNA, 1320 bp, Citrobacter koseri
atgagcagccttgattttgaagaggcgctgcgctctatcgagcagatcgatctggcgcgcgtcgccgggaggttggtcagggtcaacggcattctgctggagtgcgtcggttgtcgtctggcggtagggcagatgtgccatgttgaaagcgtcgatcaggagatgatggatgcgcaggtggttggctttgatcgtgacgtgacctacctgatgcccttcaagcatccctctggcctgatcgctggcgcacgcgtgtttcccgcaggcaaaactgaaggggttatgatcggcgatcagtggctgggacgcgtggtaaacggtcttggcgaacctcttgataataaaggaaagctcggcggagatacgctgttagcgcagcagcttccgcaggtgcatccgcttaagcgtcagcctgttcatgcgccgctggacgttggcgttcgcgccatcaacggcttgctgactatcggtaaaggccagcgcgtcgggctgatggcgggcagcggcgtcggtaaaagcgttctgctcggcatgatcacgcgttacacccgggcggaagtcgtggtggtagggctgatcggcgagcgaggccgtgaagtcaaagagtttattgaaaatgctttgcaggctgaagggctggcgaagtcggtgattgtcgccgcgccagcggatgaatcgccgctgatgcgcatcaaagccaccgagttatgccacaccattgctggctattaccgcgataaagggaaagacgttctgctgctggtagattccctcacgcgttacgcgatggcgcagcgcgaaatcgccctgtcgcttggcgaaccgcctgcgaccaaaggctatccgccgtcggcgtttgggatgatcccgcggctggttgaaagcgccggaaacagcgaaagcgagggatcgatgaccgcgatctatacggtgctggcggaaggggacgatcagcaagatccgattgtggactgcgcccgcgcggtgcttgacgggcatatcgtgctttcgcgccaccttgccgaggccgggcattatccggcgattgatgtcggccagtctatcagccgctgtatgagtcaggtgacggagcgtgagcaccagctcgccgcccgcacgctgaaacagctgtatgccgaataccaaagtattaaaccgctgatcccgctggggggatacgttgcaggcgccgatccgctggcagacagagcggtacgtctttcgcccgcgatcaatcaattcttacaacaggaagtccaggatgccgcgctgcttgagcagacaatcagcgatctgtgcgccctggcgcaggcagggtaa

SEQ ID NO: 71734 - DNA, 759 bp, Citrobacter koseri
atgttcaagaaacggagtttaccgctggatgccctgaccgccagccgccaggcggtggttaagccgcgcttataccgcttcccgcccctgcgtaatcgcaggatgcctgccggtgttgtcgctgatgaagacgccgcaccgacgctggaccccgccgactaccagttacaggtaaaagaggggttccaggaagggatgaaccgggggtttgcccaggggatggaagaaggccgggaagagggctaccaggaaggcattcgtcttggttttgacgaagggatgcgcaaagggctgattgaaggtaaacagcaggcgcgtcaacagttcctggacgccgccgccccgtttgagcgcctgaccgcagaggtgcagaactacctggagcgttacgagcagcgtcgccgcgaagagttgctgcaactggtggaaaaagtgacccgccaggtgatccgctgtgaactggcgttgcacccgacgcaactgctggcgctggtggaagaggcgttgaccagcctgccgcatcagccggagcaggtacgtgttcagctgaacagcgaagaatttatgcgcatcagcgaggccgaaccggagaaagcgcgtgagtggggactggttgccgatccttctctggagccgggagagtgccgcgttatcaccgataccacggagatggatgtgggctgtcagcaccgtctcgatcagtgcgtagatgtactgaaaaacagtttgctgccggaatcgccgcatgagcagccttga

SEQ ID NO: 71735 - DNA, 1038 bp, Citrobacter koseri
atgaccgaagcaacagtaagccggaatgataaaaaccactcagcctcagccgggcgcagccgtctggagcaggcggcgatcctgctgatgagcgtaggcgaagaggccgccgcgcaggtgatgcagaagctgaaccgcgaagaggttatgttgttgagcgaaacgatggcgcgtctccatgatgtgaaggtgcatcaggcgcgtctggcaatgaacaattttttctctgattaccgcgaacaaagcgggatcaacggcgcctcacgcacgtatctgcgcagcattctggaaaaagcgttgggcggtgagattgcccgcagcgtgatcaacggtatctacggcgatgaaattcgctaccgtatggcacgcctgcaatgggtcgatatcccacagctggcggcattgattgagcaggaacatctccagctccaggccgtttttctcgccttcctgccgccggatattgccgccagcgtgttaagcgttctgccgcaagaacggcaggatgaaattatctatcgcgtcgcgcgtctggacgacatcaatcgtgacgttatcgacgaactggacagactgatcgatcgcggcgtcgcggtgctttccgagcatggttcaaaagtgattggcctcaaacatgccgccaacatcgttaaccgtatccccagcaatcagcaacagctgctggatcaactgcgcgagcgcgacgagaaagtggtcgaagatctgaaagacgagatgtacgagttctacattctcagtcgtcagacgccggtgacgttgcagcgtctgatggatgaaatcccgatcgaagagtgggcggtagccctgaaagggacggagccggttctgcgtcaggccatctttaacgtgatgccgaaacgccaggtcacgctgctgcaaagcaccacgacccgcctggggccagtgccgattagccgtatagagcaggtgcgcaaagagatcatgcaggttgtgcgccagctggctgaagaaggtgaaattcaggtgcaactgtttgccgagcagacggtggagtaa

SEQ ID NO: 71736 - DNA, 1692 bp, Citrobacter koseri
gtgcttactaagattaaaagtcgtctcccttccgtgtcggtgccatccggtctgaataagccccagctcatggcgattgtgggcggtgtggtgctggcggccgcgattattctgtcgctgtggaaccgcaatcagggttatgtcgcgctctacggttcgcaggaacatctgccggtgtcacaggtggtggacgttctgggggcagaaaacatcgcttaccgcattaacccggacaatggccagattctggtgagcgaaagcaaactgccgcaggcgcgaatggcgctggcggcaaaaggcatcagcgcggcgacgcccgatggctacgagttgatggacaaagaagagatgctcggcagcagccagtttattcagaatgtccgttacaaacgcagcctggaaggggaactggcgaagagcatcatggcgctggaccccgtggaaaacgcgcgcgtccatcttgggcttaacgagtccagctcctttgtattgaccaacaagccgaccagcagcgcatcggtcatggtgcaactgcactatggcagaaaactggatgagcagcaggtcgcttctgtcattcaactggtggccggaagcgtaccgggtatgcagcctggcgcggtgcgggtggtcgatcagagcggtaatttgttgtctgacggcatcgaaggcacggatggcggcatgacgagcaagcgcatgggcgatgacgtcatgcagcgcattcgcgaggataccacgaaaaatatcaccagcctgctgacgtcgttagtggggccgggcaacttccgtatcagcgttgcgccgaccgtagatttaagccgtgtggaagagactcaggaacggctgggtaaagatccgcgcgtcagcgatgaacaactgagccaggaaaacaccaccaatgaaatggcgtttggcattcccggctcgctgagtaaccgtccggtcaacccgacgccgcaggctcccgccaacctggcggagggcaatccgcccactgaaaacgctgcaaacgccgcgaataacaccgacccgcgctcgctttccagccgcagtcaggaacagcgtaagtacgcgtttgatcgcgatattcgccatatccgccacccgggttacaagctggaaaaactgagtgtcgcggtggtgctgaaccaggccgctcctgcgctggcgaaaattacgccggaacaactgacgtcgatgacgcgcctggtggaaagcgcggcgggtatcgaaaaagcgcgcggcgatgccttaacgctggatgttctgaccttcacggccccggcagacgatgtcatgccagacctgaaatggtggcaagacccttccatgcagtactggggacagaatggcggaattgggctgctggccttgctgacattgctgtttggcgttcgcccgctggtacagcgctttggacgtcgcgacccgatcacccttgatggcgaggcgacgaagaaagagctggaagcgcctgacaatggggtggtgatgaacgatgacgagttcgccagcctgtcgaaagcggcgttcaacaataatgaagatctgctgccgccgcaaagctccggcctggaagccaaagtggaattcctccagctgttggcccagagcgaaaccgagcgcgtagcagaagtactgaaacaatggatcaacagcaatgaccgaagcaacagtaagccggaatga

SEQ ID NO: 71737 - DNA, 369 bp, Citrobacter koseri
atggataagattactgccgcaggcattaacacgacacaccaggcgttgctgaacagaatgcagcaaaccgcttcattagcgtcagccggttcggttgacgcctctttaactatcgctcccgccagcaacgcgtttggcgtcagtgaaccgatttcctttgcgggcgcgctgaataacgctatcgataacgtcgatgcgattcaacacagcgcaggcgcaaagcaaaaagcgattgatatggggctgagcgacgacttagccggtgcgatgatcgaaagtcagaaagccagcgtggctttttcggccatgatgcaggtgcgtaataagctcaccacggcactggacgaagtaatgaatattccgctctaa

SEQ ID NO: 71738 - DNA, 1032 bp, Citrobacter koseri
atgagtattatcattgaatgcgaagatcgtaatagaaatggctttatcgccgtttctcctgccagcgttagcgtaatgtcgttagcgcgtcgcgttgctaagtataatgtatcagtactgattacgggcgaaacgggaacagggaaagagtgtatcgccaaatacattcacgagaatgcctgcggcagtgacgccccgtatgtcggcgttaactgtgcagctattccagagagtatgctggaagccattttatttggttacgagaaaggcgcgtttaccggcgctgttgcgagcgtcgccggtaaatttgagcaagctaatggcggcacgctgctgcttgatgagattggcgatatgccgttggcgttgcaggcaaaattactgcgcgtattgcaagagcaggaagttgaacgtctggggagccataagcgtattccgttggatattcgcctgatcgcttctacaaataaagatttgcagcaggaaattgccgaaggccgtttccgccaggatcttttctaccgtatttccgtcgtgcctattcatattacgccgctgcgtgaacgcaggcaggacatcctgccattggcccagcgttttatcactaaataccgcgcttttcataaaggcgatctgcgtctgagcgatgaggcgcgtaccgtcctgctcagatacgactggccgggtaatgtccgtgaactggagaatgtgattcagcgcggcatgattttgtgcaacggcgaagagattcacgccgccgactttggcctggccgttcgcgtttcccagcctgaagcggcggttatcgaaatgatgcctgcctatcgcgagcaggagacgggcaacccgtcgatccgcgatgtcaaactgcacggacggctggcggaataccagtacatcatcgatctgcttaaacgccataaaggcaacaaatccaaaaccgcagagtttttaggcatcaccccacgcgctctacgttatcgtctcgcctccatgcgcgacgagggtattgatattgaatgttattcctga

SEQ ID NO: 71739 - DNA, 885 bp, Citrobacter koseri
atgaaccctgcatcacagcgagtcagaattcatcagagaaaggatttaccctctctggtaaagctcgacaccagtaaactcggtcggccgtggcacaagttacccaagttgatgaatgacagttttgacatacttgatgcacgcctgagcatttattttctgaagaaactccgtgttaatgccgcgttgaagtcgatgaccttcgcaatcgaccagcaatataagaatgcgcaggttttttcgacgccttacggaaatgtcgcctttgttattgatcgcatcttattgctgaacatccttcatgattattacggtttaagtaaagacagcagccatgttgcaccagatgaatcgttgcgcgtgacaaaaacagaagagcgcctgagaagtaaactgggtcaggaactcacgcaactggtgatttgcaaagaaacctttggcgaaaatctcgatattaaggtcgattattcaacggtcattagccactggtcctggtgcattacctttaccctcgaagggtacgatcacggctcttttaccattctgctcgatcaccaccatgttgatcagatgctggcgatactccgttcgccagatgcggccgatagccgcgccgtgaaaagcgtaccgctgagccctgcgcagatagaacggttgttcgacagtctgccgttaaaactgagcgggcgtctggccagcctgaacctgaccgtcgcccagatttccgatattaaacccggggatatcatccccatcgccattaacgaacctttaccggtatttatcggcaaagaacagatttttgaggctgctatcgttgaagatcgtagcaagctgtttttgtgcgatatctatgataagacaaccgagaagcaatatgagtga

SEQ ID NO: 71740 - DNA, 399 bp, Citrobacter koseri
atgagtgatttgcaacacgagctaagccagtctcttgacctggatgacctgaaccttagcgatatgacgcaggaagacaccgtcgaagggaatatccgcctggatttgcagcctgaaacgcgcaacaccgcgatgacggatatccgtaaaatggcgctgtttagccgcattcccgtgacgctgacgctggaagtcgcttccgtaaatatctcgcttgctgaattaatgtcagtcaacagcgattcggtggtcgaactggacaagatggcgggcgagccgctggacattaaagtgaacggcattctgtttggtaaagcagaagtggtggtgctcaacgataaatacggcctgcgaatcattgaattcaacgccaaagaactcggtgagctcacgcgatga

SEQ ID NO: 71741 - DNA, 753 bp, Citrobacter koseri
atgaaccgcttgtttaacagaagcggcatcgctctgctgctcctgggtctgcttgtcgcacaaccggcactggctgcaaatggcgacattaccctctttagcaccgccgccaacggcgcaggtcaggattacaacgttaaaattgagatcctgatcctgatgaccctgctcggcttattgccgatcatggtgctgatgatgacctgtttcacccgcttcattatcgttctggcgattctgcgccaggcgctcgggctgcaacaaagtccacccaataaaattcttaccgggattgcgctggcgctgacattgctggtgatgcgcccggtctggaccacgatttatactgacgccattgacccttttcaaaaagatgaaatcacgctgaaacaggcgctggcgaaggcggaagtgccgctgaagaactacatgctggcccagacgaacaataaagcgatggcgcaaatgatgagcatcgccgggatcgagggcgatgcgcgcgagcaggatctcacgatcgtgactccggcctatctgctgagcgaactgaaaaccgccttccagatcggctttatgatctatatccccttcctggtgatcgacctgattgtcgccagtatcctgatggcaatggggatgatgatgctctcgccgctgatcgtctctctgccctttaagctgatgctgttcgtcctgtgcgatggctggacattgatcgtcggtacgctggcctccagcgttcagggtctttag

SEQ ID NO: 71742 - DNA, 273 bp, Citrobacter koseri
atgatgaacatggacacggcaggcgacatcatggcgaccggcatccatctggtgctgctgatttccgccgtcgccattattcccagcctgattgtcgggctgtgcgtcagtatttttcaggccaccacgcaaattaacgaacagacgctgagctttctgccgcgactggtcgtcactctgggcgtgctgatcttcgccggtaagtggatgctgacgcaactggtggattttacgatccagatctttcaccaggcggcggcgctggtcggttaa

SEQ ID NO: 71743 - DNA, 774 bp, Citrobacter koseri
atgggaatcgatatacaggcgctgttcacgccgctgatggctctggtgctgccctttttccgcatcctggcgtttttgcagttcgcgcccgtgctggacaaccgggctttttcccgtcgcattaagattgccgcagcgctggcgctgtcgatcattatcacccccatgctgcccaataatgttgtgctcagcgaactgctttcgatgcgcaccgtcttgctgatcggcgagcagctcctgtggggattcctgttcggcatggcgctccagctcgtctttgtcacgctgcaaaccgccgggcatattctgtcgatgaacatggggctggggatggcgatgatgaacgacccggtcaacggcagctccaccacggtgatttcgcagatcatttatgttttctgcgcactgctctttttcatcatggatgggcacttgctgctggtcacgattctgttcaaaggctttagctactggcctattggtcaggcgattaaccagccaacgctgacgctgattgttcagggactgggctggattatggcatccgcgacgcttatcgcgctgccgacgacgttcgtcatgctgattgtgcagggcggatttggcctgttaaaccgcgtttcaccgacgctgaaccttttctcgctgggttttccgatcagtatgctgtttgggttgctctgtatctcgatgatggtgaccaacattcctgatcactatctcaatctcaccaatgaaatactggcgaagctcgacgccataagggtgtcgtaa

SEQ ID NO: 71744 - DNA, 1134 bp, Citrobacter koseri
atgtcctccagcggcgacaaaagcgaaaaacccacccccggaaaactgcgcaaagcgcgtgaaaaaggcgacctcccgcgctcaaaagatctgacgatggcggcgggactgctggcgtcgtttttcacgcttgccgcatttctgccctattaccagcagttaatccgtgaatcgtttgccgctgtcggtgaaatggcgggcaggctcgacgatcccacggcgctgaatcagtttatgctgctgaacgtctgggttgtactgcgctttatcgcaacgctgattccgattccgctgtgctgcatagtggcaagcctggtgcctggcggctggatttttacccccacaaaactgaagccggattttaaaaagctcagccccattagcggcatcaagcggatgttttccgccagccactacacggaagtcggcaaaatgctgctcaagtgcggcattattcttaccgtgttgtacatgatggtgcatgactccatgctcgctctgctgcacctgcaacagctttatcttcgtcaggcgatcggacaagggtttgccatttttcgtcacgtcttcagctacttcatcgccgttatcgtcattttcgccctgctggatgtaccgctcagtaagttcatgttcaccaaaaaaatgcgcatgaccaaacaggaagtgaaagaagagtataaaaacaacgacggtaatccacagattaaaggacgcatccgccagcttcagcgtcagatggcgatggggcaaatcgcgcgaaccgtaccaacggcagacgttatcatcaccaacccgacgcattacgccgttgcgctgaaatatgatccacagcgtgccgaagccccttacatcgttgctaaaggaatcgacgatgttgcgctctggatccgtgaagtgggcgctaatcacaatatcgaggtggtggaatttccgccgctggcgcgggcagtttattacaccacccgcgttaaccaacagattcccacacagcttttccgcgcgattgcccacgtactgacctacgtcatgcaattaaaatcctggcgcgaaggcaacgtggaacaaaagccccgcctgaacaggcaaatcaacattcctcaagaggtactgaaagccaatggcgaacagtaa

SEQ ID NO: 71745 - DNA, 1173 bp, Citrobacter koseri
atggcgaacagtaaattgcgcaacgcgctgagcgtgctccgtcaggggcaagtcggcgtgcctattctgcttctctgcgtgctggcaatggttattctgccgttgtcgccgctgatgctggatattctgtttacctttaatatcgtcctggcggtcatcgtgctgctggtatcggtgaatatgcagcgtccgctggactttgcgattttcccgacgctgttgctgatcacgacgttaatgcgtctgacgctgaacgtcgcctctacccgcgtggtgttgctgcacggtcatgaaggcgaaggcgcggcgggtaaggtcattgaagcctttggtcaggtggtcatcggcggcgatttcgtcgtcggtttcgtggtgtttatcatcctgatgatcatcaacttcgtggtagtcaccaaaggggcggaacgtatttccgaggtttccgcgcgctttaccctggatgcgctgccgggcaaacagatggctatcgacgccgatctgaacgcgggtctgattaaccagcagcaggcccgaaaccgccgacaggaagtatcgaaagaagcagacttctacggtgcgatggacggcgcgtcgaagtttgttcgcggtgacgccatcgccgggatcatggtgctgatcatcaacgtgatcggcggtatctgtatcggtatttttaaatacgatctcgatgccagccacgcgttccgccagtacgttctgctgaccattggtgacggtctggtcgcccagatcccgtcgctgctgctggcgactgccgcagcgattatcgtgacccgcgtcagcgaaggcaatgacgtcagcgatgagattaaaatccagcttctctctcgcccgaaggtgctctataccgccgctttcgtgatgtttattctcgcgattgtgccgggaatgccgcacattgccttcctgagcttcaccgccctgctgctgtttgccgcctggcggcagagcaaagcggtgcagcccgcccaggaagagacggatatggaggccatcaccgaagccatcgcgccggatgcgacgccaggcgtctcctgggaaagcattccattggtggagcccattggcctgaatctcggctataaactggtcacgctggtggatgagtcgaagggcagtccgttgtcacaacgtatacgcggcgttcgctag

SEQ ID NO: 71746 - DNA, 789 bp, Citrobacter koseri
atggcgattcccggcactgaattgtacggggagatcaacggcatactggataccgaccccgcttacggcatggcaattgtctggatcgacccggaacaaaaggcgaaagcactgaatcttggttatcaggtggttgactgcgcgagcgtggtggcgacgcacgtcaacaaggtcgcccgcgaacatctgccagatctgtttaactatgacgatattacccacctgcatgcgcgcctggcgctccaggcgccaaagctggcggaggatttaaatgccgcgtttagctacagtctgctgctgcgcatttatcgccagttattgctggagcagatttcactgaaggatatcgtcaccatcgcgtccacattgctggaaagcgtcaccgtgacgaaagatcccgttctgctgacctccgacgtgcgctatgctctgcgccgcgccatcgttcacaccattaacggcgatcgtcaacaactcgcggcctacaccatcgacagccagctggagaatatgctgctgggcgcgctcaaccaggcgcagcaggccggaaaagtggcgctggatagcttccctgtcgatccgaacattctgacccagttgcagacgacaatgccgatgatttacgagcagatgaaggcgaaagggctgccgccgctgctgctggtaacgccgcagctacgtccagtgatctcccgctatggccgactgttcgccagcgggctgcatattctttcttataatgaagtgccggatgacgcggatctgaacgtcgtagggacgctggcataa

SEQ ID NO: 71747 - DNA, 990 bp, Citrobacter koseri
atgattggtcgcctgattaactgtctgatactccttgtgtcattctccgctgccagcgcttatgcggttaactgtcagcgtgcttctatgcctttagaaaacaccatttgtaacaacgacaatcttcattggctggacagcacgatgacggttatctatcacacgatgttggtcagaaacccttctcaacaggttcacaagaagtaccaggaatgggaaaagtcgctacaggcgtgtacctccgacagctgcattgagcgcgcctactatcagggcatcagttctatttcagacgttgccccggattttgactgggaagggctgtggtggaacaccagtgtgtccaatttaagtggcggaatgatccagttcagccggagcgcggaatggtcagtcacgacggatattcgtgtctggtcgggattaaataaagatgagtttacggctgaagcccgaaaactgtacggcatggcgctggtcgaacgtattgccgataccagtaattgcaaactgctgtttatcccccgtaaaagtggcgcgcttcaggtctacagcaacgcggactggggatgccggatttcgatgccgacgggggcatttattgatgggcgctatctgcgctcggatcacgatccccgcccgaaggcgacgctgtactctctgggaattttctccgaccccaaaatggatgagcgcttccgcgcgctggtgggggatgattaccagaagtttgtggataccgccaacgtttacatttatcaggatgatatagataacatcggcgcaacggtcgtctctatgtgggtgcgtggcgcggcgaacaaccatacggccattattatgtacacgcaaagcaatatctgggcggcgagggtagaacgcgacagcgccggaaaaatgcagttgtactacttcagcaccagaggtaacgatatcaagaaaatgccgcgtacgctcgctggctggaaactgcgttacctggatcaataa

SEQ ID NO: 71748 - DNA, 258 bp, Citrobacter koseri
atgaagatagacagtagtaattacatgctttcgacactctcctcaggttcgtcacaaaacgatgccagtcgcaaacctctcggcatcacgcgtaacagcgggcaggccagtccacaaagcggctactggcaattgtccagcaccgcggtatcggctgtagtgaacctaaaaaaaggggaaatgatgccttattatcagggctcacccgtgcaatggcagttaattcagtatgatttaggtaaagagacgccagtctga

SEQ ID NO: 71749 - DNA, 1542 bp, Citrobacter koseri
atgtctttaaggtttataacaaaatcagataaaagaatccttacagcttctgtctttctgttttttctggtatttgccagcgtgctgtggctggagttaacgagcgtacagcaaagtaagcaggcgctgctgcaatctgaggtcaaaagtctggcttttgtcgtcgataaagtattaggcgatgcccgactggcgattgcgcaggcgcaaccgttactgggtcagccctgtaatacgacactggaaaaaaagctcaatattatccccacacgctacccacatcttcagtcgcttaactttacgcagggcaatacgatttattgttcctcgctgctctacaacaaagggtacaccctgagtcctgctctctctttacagcagggcataagggttgatcgggtgatcacctctccgcatgatttcatcatgatgctttatgtttcttatccggcgggaagaatatttgcggcttctgatgtgcgcattattgttgagcgcatcaaaaatatggcgttcagcgatcgtattgttttacgcatgaacgataaaattttaaccgcctctggcgttaaaccggggagtttgcaggagtcgcatttttcacactatataaaagcggaaagtaataacaaactttatacgattgcctggcgaaaaaccgaactgggggatgcgctggccgtgatcgcccactcatggcgctatattgcgatgattatcgccagcgcactcgtatcatccatattgctctggttactgttatcgcatcgggcatcattacctcatcaccttgcggtagccatcagaagaaatgaaatccagccttactaccagccgattgtatgcgctaaaacaaaccgcgtgattggcgcggaagttctggcccgctggcaacattgtgaagcgggttctgtttctcccgatatctttatcccggtggcagaacgtgccgggttgattgccgacctgacgaaaggattactggatctggtggttatcgatattcaacgctcggtcacggtatttaaaccgggttttaaatttaacctgaacatcagccatgctcatctggtgaaggactctttttattcattcatcgggacgtattcaggcgtgtttcgcgaacagaacctgcaacttgtttttgaaatcaccgagcgtggagagatcgaagtgaatgatgatatctccaataaaattgattatatgaagattcataatgtcgggctgtcgctggatgactttggcgcgggattttctaacctgtcttatatcactggcctgcggccagagaatattaaaataggtcgcatgtttattaatctgatttcggaagggaaaaatacgccgcttgttgattgtgtggtcgagatggcacaaagaatgcgtattcaaacgactgcggaaggggtggagcataagtaccaggttgattatcttcgatctaaaaatgttgatttcttccagggctatttcttctcccggccactctcattcgcaaattttatccgctttatcagaggttatcaggttgtcacgtaa

SEQ ID NO: 71750 - DNA, 345 bp, Citrobacter koseri
atggagtggagcgtcgaaaataacctggtgtgcccgacaacgggaaccgcctttgcgctgaccagcggagcggaaaatcttaagttcattctgtggtataagggcgattattttttacgcacaggttccgttatctccccggaggattcaggcgtcctggcgaacgggaaaaaaagaaacatcaaaatcctgcacgttttcccctacagcaatgcgttatgggcctcttttcataaccgaattgattgcccgggaaatggcgttgttaccatcaatcactgtgcgcgacagcagcggtgcgtattcacgctttgtccgtatggcgcgaggactgtcaccggataa

SEQ ID NO: 71751 - DNA, 531 bp, Citrobacter koseri
atggacataatatttattatctccttaatcataattggctgcatcctggcgctgtctggaggatggatactcattctgaaagccgaagctaaaatagaacaaaaaataatggatgggctggaactcaaaaggaaagaggatcagaataataaaattctgcaaaaatatgaggagctgttagcaatggaaatcgaatggcatacgtatcgaatatccaccattgagtttttcattacaaaagtgaagagtaaaagcgccacggaaacgccgataacacaaccgacaataagcggcgacagcaaactttactccaaaataaaagcattaatatctatttactttccgcatctacaggatgattataatacgctgtgtaaagtttcaaactgctctatctattttgactttatctacggcagatgtaccagcagcaataaagtcattaccacactgacagaaaagcgagcgcaatttaaatcgctgtctacggaatttcaaaacaaaatccgaaaagaagtcaccattacatga

SEQ ID NO: 71752 - DNA, 549 bp, Citrobacter koseri
atgccgaaaatcattcagtctttattattatttattgcactaagtaatatctcaatggcatcgacgcaggaaacggcgtttttggctgaacgcgggctggcgggaaaatcggttgagcaaatggtggatgctatcgatcaaaaccctcaggcgcgtcctttaccgtataccgcttctgtgaccagcacggatctgaaactgtcggcgaatggcgaaacgtacacctttccgctgggtgagaaattttatctctcgctggcgccttatgaatatcaaacccatccctgttttaaccacagtctttcaggttgccagggagaaatgccggacagctggtttgatgtgaacgtgacagatcggaacggtacggtgttgatacataagaaaatgaaaagttatcagaatggctttatcgggttatggctgccgcgtaacactgaggggatgattgaaatcagtcatgaggggaaaaaagcggcttattcgtttaaaaccgcgaatgacagtcagacttgcctgaccgacttgcaattacgcgctgcctcgtaa

SEQ ID NO: 71753 - DNA, 192 bp, Citrobacter koseri
atgaaaagggaactgttaaacataaaaaaaacaggaagaaataaaatagaccacgaccttaacttaaaaattaatgtctttaaaacgttgcgacaagaaaatgtcctgatgaaggattatattaatctgctggaaaacagaattatttttctggaaggcgtcattctggagaaaacgaagaacaaatcataa

SEQ ID NO: 71754 - DNA, 756 bp, Citrobacter koseri
atgatgatagaaagcattcaacctttacatcactcctctaagcatacgactcagtggcaccatcaccctggcgggcagttgtactggatcacgcgtggcatggtgatggtcgaaacggaacaagggcagtgggcgttgacgcccggttcggtagggtggcttccgccgtcgttaccccattgcgcgtggatgccggtgagtgcatatggcgccagtctgcacttcagcgcggaattttgcggggtctttccctcctcaccgtgcgttcgggcagcgtcgccttttttactgctgttgcttgagaaaatttgtggggagggaaccatcggagagtcttcagagcggctggcccacctgttgcaggttatggtcgatgagattcgctatgctgatgcgctctcttcacaattgatccttcccgacgacagaagggtcagacagattgcgcaaaaaatactggccgacagggcctgtacgcggagtcaggcagagctggcgaaacaggccgggctgagcgtcaggacgttgagccgcctttttatacagcagacgggattaacattcggtcagtggaagcaaaaagcgaaagtcattttgtctctggaatatttactgcgcggagagcctgtcagccttgtcgcgcaattagcgggttatgagaatgtgagtgcatttattgccgtgttcaggcgttttatgggaatgacgccagggcagttctatctgcgtttcggtcatggtacgaatgtggtttaa

SEQ ID NO: 71755 - DNA, 381 bp, Citrobacter koseri
atgcaacgcattgctcaggcgcttgatgccgttatttcccggcccgggcacgatgaacacactatcgaattatttttcacgcccgattatcgccagacggtaaatggtatcgaccttgattacgataacttcgtcacgcacatggcaaaactaaaacaggttactcgtaccatgaaggtgaacattctggccatcgctcagcagggcaatcacgttctgacccatcacctggtggccgtcatcaaaacgaacggcgaacaggcacaaaccgaagtctttgcctgtttcacattagaaaatggccgtattgctgcctgtcaggaattaacccggttaatcagcggcgccgaagaagataaaatgctgggaagtctgcggtga

SEQ ID NO: 71756 - DNA, 579 bp, Citrobacter koseri
atgaaaaagctcgctatctcttctttcgttatcgcgtcatccttcgcagcctttaatgtcagcgctgcaaccgaggcttctggcggtactatcacctttaccggccaggttactgatacaacctgtacaattaacggcggaaactctgctgacctgacgattccattagatcccatcgccgttagcgatgcatctaccgcaggtctgatccagaaaaaccgtaaacaatttactctggaatttaccggctgtacttctgcttccctggggcaggacgatggcgcgggaaataaaaataccctgaatctgatcctgagttcagacagtatttctaacgatggtctgtatctgaacaacacacagttgagaaccgacggcacgaagaaaaacgtgggtatcgcactcagcacgctggccaatagccagacgccgctgaacctgcatactaaccttgatacgaatgttgaaggtgatagcgccactgtcgatctgtatgcgaactactataaagtcggttcagacgctgccgataccggtgccgttaacaccatgctgacttataccgtcgcgtatttataa

SEQ ID NO: 71757 - DNA, 699 bp, Citrobacter koseri
atgaaacgttctctcatttttctaacgcttattgccttcagctttagcagtctggcgaatgttattattagcaataccagggttatctatcctgaagaacaaaaagaaacaacggttcagctgattaaccgtggcaacagtccggcgttaattcaggcctggatagacgaaggtaatccagactctacgccagaaaccgctcaggttccctttttgctgacgccgccagtggtgaaagttgaaggcggtagcggccagcagctgcgcattcgctataccggttcagccaacgcgctgcctcaggacagggagtccgtttattacctgaatgtgctggatattccgccaaaacaggaaaatcttgatggcaaaaacacgatgcaaatcgccattaagtcacgcatcaaattattttatcgcccgaccgaactcacgattccggccagcgatttacataagtatttatcgtttagcgcgcagggtaatcaacttgtcgccacaaaccgggctccttatttcgcatcgattgccacaatgagttcacgaggtaaatctcttactggcgaaccgaaaatgattgcgccattgtcgacactgacaatacccacgacaggggcggttttatcggggcaggctttggatattctgttagttgatgattacggttcatatcaaaaatattcattcaccacaaaataa

SEQ ID NO: 71758 - DNA, 2439 bp, Citrobacter koseri
atggctggtaaaaagagtcaatacatatgtttattgccaatactggcgatgatgtctatttatagtcgggcgtatgccgtggctttcaatactgactttttagccggtgactctaaaaatgccgatatgtcgcgtttttatcgtgcctctgcgcttcctcctggtgaatacccgtttgatgtttttattaacgaggagtggaaaggccgccttcccgtttatatcacggatgaaggaacgtttttccagcatgaaaatattgcccagcttgggcttctttcctcaatagtccctgccgcaaatagcgccagcgagcgagtggatgtgaatacgttactgcacggaggcagtatgaaagtcaatgcggccgatatgtcgctgcgtctgaccattccccaggcgtatattcgccagacgctgcgcggttatgtcgatcccgtcttttgggatgaaggcattccggcgctgatgctgggatacaatgccaactataactacaacgaagccaaaggcggcggacgcaatcaggaaaacgcctatttccagttaaacagcgggctgaatgcgtttggctggcaatttcgcgatagctccagctataacaaaagcaagggcgtggaaggatcatggacaaacaatacacgctacgttgagcgcgggatcgctgcgcttaaatcgatcatccgcatgggtgacagctattccagcaacgatctttttgattctttgcgttttcgcggcgtcagcatgggcacggatatgcgcatgttacccgattctcagcagggcttttccccgattgtacgcggcgtcgcacagtctaacgcgctggttaaaattagtcagaacgggcaggttatttatcagaaaaacgtgtcgcctggcccgtttgaaattgcggatatccttcctaccggctcaggcggcgatctgaatgtcgaagtcattgaagcagacgggcgcaccagcagtttcatcgtccccttttcttcggtgccaaacatgctgcaagaagggattgggaaatatggtctgttgctgggggaagcgcgcacggaagaaagccgctatcgcccccagtttgcccagggcagctatcaatacgggatcaataacctgatcaccggttataccggggtaatttacagcgaagactataacgcgtttcttctcgggagcggccttaatctcccgtttggcgcgctgtcttttgacgtcacacagtcacaaacgcaaattccggcagataaaaaagtccgtgggcaaagttacaaagtcgcctttagccgtttctttaatgtcaccgggacgaactttgcgctggcggcgtatcgctattccacgaaaaactattacagcttcaatgatgcaatcgctttgcataactggcaaaaagagaacgctgacagccctaatgccagatatatgcgccagaaaaacacttttaatatcaacctgagccagtctctgggtgaagaactgggttccctttacttatcaggaacctggcgggactactggaatggtcatggcacaacaaaagagtatcaactggggtattccaaccacgttggcgccgtaagttataccctctcagccagcagcatgcgtaacgataatcagcgcgaagagcgacgttattacctcacgttctcggtgcccctgagtctctttgaacggcccgttttcctcaacagcagcgttacatttaatcgtgacggctattccgacacgaacgtggggatcagcggaaccgcaggcgaatttaatcaggcgacctatagcgtcagcagcagcaaccgtcgcggtggaaataactcggccagcagcagcctgagctatcgcactgcgtttaccaccttaaacggcagctatagcgagtcaggagactatcgtcagatcggcgcgggagccagcggtagcctggtggcttatcggggcggcctgctgacgtccagccagttgggcgataccttcgcaattatcgacgcgccaggcgctcaaggggccacgctgggcggcgacggcacacgcaccacgaataccgccgggaaagcgttggttccttacctgtccccgtaccgtaaaaaccgaatccagttagataccacccatatgaaggaaggcgttgagctgaaaggcaatatccaggaagtggtgccttatgcgggttccgtcacctatgtgcgcttcgataccgaccaacggcggcagttcatgttgccagcacgggccgttaacgggcgccctctccccttcggcaccgaaatttttgacgatgctggcgccagcgtcggatatgtcgcccagggaggaatgttgtacctgaaaacggaacagctcccgtcacgtttacatatcaaaaccagcagtgacggccgccaaagctgtgttattagccagccgacccacgatggtcagataaatatttgccgctaa

SEQ ID NO: 71759 - DNA, 1092 bp, Citrobacter koseri
atgaaaatcactatgcgtacaataacgttaattcttgcctggctactgggatcgataagctatggcgtacaggcctcctgtaaaagcgattccggcgcgcaaaaagagagcaatctggtgctcaacctggattcactttccctcagcagcgaaaccacaggttcgcagaacctgtcgctgtcatccggtacgtttagctgtagtggcgaatggattggttatgttaaccgtgttgctattatctctgaaatggccaacagcacggcctatatcaattatggtaactatgtattgcaattcaccatcggcaatattgtacccacgaaaaaagactatagtcgctctggagaaagtcatattcccggtacttcgctgaataacgtagtctatacctataaggctaagttactcaaaagcgtaccgagcggcgccaacccggcctatgtctataacgttggcccggacgcaaccagtattactcttgctcacgctatatccgttgttgatgcttcaggtatcgatttctggtttcccggcgttaatttagccgaattcattaaatggatattaggccttatcggttctgacgaagagaaacgcctgttctaccagaatatcacgatcaattatcgtcctcatgtcagcacctgtagcatcccggatacgacggtcacgctaccggaaaccgatcttaccagcctgatatccgcaggaaaggaagcgcagttttatgaaaacttcactctgcatgccgaatgcagcgacctgttagaaggcatgagcacacgcaccattcagttttatctcagtagcgccagcgtcgatacggataaatacaccctgaaaaacacccagggaacggcaaggaatattggggtgcgaattatgcgtgccgataccagtaaaaaaattgccatcagccagacagagcttaccgcaggtaatattaccagcgagtatgaactctataagattgcgcagtggggaagcaattttgatattccactgagagcatattattacatctatggtgccaaaccgacggaaggcagaatacagaccacagcgaaagtaaatatcatttacccatga

SEQ ID NO: 71760 - DNA, 783 bp, Citrobacter koseri
atgcgtacactacagaacgatcaatttctttatctcagcagtgaggactcatcctgtaatccttccactgcaagatttgatttagtcatgatagaaaactctgtcaagtcattaaatagcgttacgcagccgctccattcaacgttaattattgataccgataactatatgattaattttctttgcaaacacctgatcaaccctttggtactacacaccagcccgacattcagagaagcaaaatacaaaatagaaaaccatattattgataatgtcgtcatggaagtttttactctggaggagagtgcgctggaggcgcttaatttcatttatgatatgcagataaactatcctggcattcgcttaacggtgtttacttttacgcgtaacagttacctgcttcaggttttgcgaagttttcattatatcaatatcgtttctaagtatgaacccatgtctgagcttaatcatgccgttcatgcctgctggctggatgaggctttttacagccagtacattaacgatctcatggctgaaatagaacagccggattcttttgacgacattgaatggaccgttctgaccgaactggcccatagcacgcctacccatgatatcgcaaaaataataaataaacgctatcacacgcttttttactacatcaaaaagatcaataaaaagctgcatctaagcactaaaaatgaacacataaaaatgctgaaagcgataaacagtaatccactaaaaagtgcaagcatatcttatcgcgaccgatttaattaa

SEQ ID NO: 71761 - DNA, 666 bp, Citrobacter koseri
atgaaactcatgtgccgtatcgaacctatcattcatgtccagaccggtagacggattggcggtgaggtgctctgccagccggaaggggcagatccagagctatttttccgctctgtttcgccagaactcctgtcacatattgttcaggaacagatatgcacgggagtagcaaatcagcacgatcgcaatggcattttatttttgaatattacgattccattgcttatgaatctggtgtggctcagatcgattcttgccatgttacccggcccaaaggtcattgaaattgattgccagcaaagcgagtcttattttccgcgacttgtgccgcatattgatgcaattctgaccctaatgcgcgcttttaatactcaactttggctggacgatctctatgtcaggcatattccgttaattgcgcaactcccctttcgctttgatgggattaagattgataaacatgaactctggagaatatccgctgaacaggatacctcagcaatgacaacgctggtaagacaggtggaatatctgactgatcatgttctggtggagggcgttgaaaacgaataccagcaccgctttatttcggagagcgacgtacattatgcccaggggtttctctggcccgttgatgagcgagaatcattcataataacgatttaa

SEQ ID NO: 71762 - DNA, 588 bp, Citrobacter koseri
atgaagtcgaaaatagtgatagtgtctgatgacgtctattatctgacgggtatatcgaaagggatgaaagagtcaggtacgcgtgttgagagcatttttttaagcgatgctgccgagtttgaacgtttcacgctaaccacctctttttcgctatcaaaagataccgttgtgttactctccgtcagagagccgggtttactcgacaggttaataacctttttctttagtaaggttacgctgtgcatatcaccgtcaggcctgcattcccgtcgccatttcttttgccagtacggtgtatattacttcaataaaaacaaaacattatcagaattaaacgatattctgatagctatttcaaatagaaaaaatacggaaagtaacaccatcactgacaaagagttttttattctcagcgagttagtccgcgccgggaatgtgaaacgaatgtacagcgcaataaacatctctgaaaaaacggtctcttactacaagaggtcggcattaaaaaagatgggattactgagcagccaaaattacttatgtatccacccggcgctctccgccgttaagaccattcaacggcactga

SEQ ID NO: 71763 - DNA, 882 bp, Citrobacter koseri
atgagcataaaaaacaaactggcagcctcctggctgacgctggggttgttcgcagcgcaggcgcaggcagcggatttcgttgtgggcagcaaaaactttaccgaacaatatattctggcggaaatctatgcccaggcactggagcaatccggtctttccgttgaacgcaaaacaaacctgggcgggacgttaatcgcccacgctgcgctgctgaaaggcgaaattgatatgtacccggaatatacaggtacggcgctcagcgcagtggtcaaaggaaaaccctcctccgatgccgcacaggtgtttaagcaggtcagcgacgcctaccagcagcaatatcatctcacctggctgcaaccagcccgcgtgaacaacggctacgcactgctggtgagcaaacaaaccgcagagaaataccacctgaaaacgctctccgatctcgccaaagccgcgccggaactgaccatcggcgcaggtgcggagtttggcgaccgccaggacggcctgaaagggctggagcagacctacggcattaaatttaaagccttccgccagtttgccaaagtcggcctgcgctacgacgcccttgctgccgggcaaatagacgtcgcaaacggcttcgcaaccgactggcaaatcgcggaaaaccagtatgtcgcactggaagacgacaaacacctctttcctccctacgaagttgcgccggtcgtgcgcgatgccgcgctacaggcacatcctcaggttcgcgacattttaaataacatcagccagttgcttgataacgccacgatgcaaaaactgaatgcggaagtggaaaagaataaagaagaaccgcgcgatgtggcggaagactttttgcgcgcagaaggcgtaattaaatag

SEQ ID NO: 71764 - DNA, 1545 bp, Citrobacter koseri
gtgacaacgacactttttctgggcgacgcgccgctcacgcttgatgacgtgcgagctgtcgctgactgcggccagactatcgcgctgggggcgcaggcgcagcaggccatcagcgcgtcctttgattttctgctgcacagcatcagcgccggaaagcatatctatggcgtcaccaccgggcttggcgctaatgtcgatacgacgctgctgcacatgcaaaatgaccgtcacgatgaggatctgctacaggcgattcagcgacgaatcccgctggcgcgggcggtcggcgtcggccagcaggcaacgcccgcacaggttcgcgcgatcatgctggcgcgtcttgcgggtttcgtgcagggcgcatcgggtatttctctgcccgtggcgcagatgctgctggcctttatcaacgaaggcatccatccgcgcgttccgcttatcggatctatcggcgaagcggatctcgcgccgctggcgcatatcggacgcgcgctcatcggcgatggcgaagcggaatatcagggtacggtggcgccggtctccgcactgctgaaccagacgggtctgacgcctgcgccgctgcgtggaaaagacgggctggcgctggtgtcgtctaacgccgccagcgtcggcctcgccgcgctgctgctgcacgacgccgcccggcttatgaacgcccacgcgggcgctatcgcgctctcgtttgaagcatttcgcgctaatatctcgccgctgacgccctgggcggcgcggatgcgccccgcaccgcaacaggccaggaccgccgcgtatctgctggcgctgctggaaggcagcccgctactccagcccggcagcgcgcgttcgttgcaggacccgctcagcttccgctgcgtcgcgccggtgctggcctgcgtttgccatgcctggctgaatgcccgcgcggcggtggaactggaactcaacagcgccgacgacaatcccggcctgctggctgagtctgaacaggttctggcaaatgccaattttgatgccacgcatctggcgctggcgctggaaagcctcgggctggctctcgcccgccatgccgcatgcagcggcgaacgcatcatgaaactgatgtcacccgccgccagcggcctgccgcgttttctcacccgccacgccgggcagacaggcttcgccacgctgcaaaaaacggtttccgcgctggtcagcgatatcgcccatcatgcccagccgctctccccgctgacgatgccggtagccgatcggattgaagattacgcttcgcaggcaatgggggtggtcgccaaaaccacacgactactggaaagcctgcgctatctggtggccattgaactgctggtcgccgcgcaggcgctggatcttcaggcgtcgccacggccaggacgctatgcaacggcattacacgacaagattcgtgctcgggtggcgccgctggatgaagatcgcgccagcgctggcgatatttccgttctggccgacgcgataatgcagccggaatggcttgcaggccaggccgtattgctggagacctcctga

SEQ ID NO: 71765 - DNA, 624 bp, Citrobacter koseri
atgcgctgggcgacgcgacactatgacgacattctgctggcgctctggcagcatctggtactggtcggcaccgcaatgctgatggcgttcgccatttcactgtttctcggcattaccaccgcccgccgcccgcgactgtatgcgctggtgatggcggtcaccggcatgattttttccattccagggctggcgctattcgcactgctcatcccgtggctcggcatcggaatgctcccggcgattgtcgggctgacagcctatgcgctgatgatcctgacccgcaatattgccaccggttttcatgccattccgctggacgtccgcgaagcggcgcgcggaatgggatatggcgcctggcgcaatctgcgcgaagtggaactgccgctggcgctaccgttcatcatcaccggactgcgcattgccaccaccacgcttatcggcatcgctacggtcgcggcatatatcaacgccggtggacttggcgcaattattctcgccgggctggatcagcgctatccagagaaaatatttatcggcggcggcctgacgtcgctgctggcgatcggcgcggatctgttttttgtccggctacagcggcgcgttttacaggggagagaccaatga

SEQ ID NO: 71766 - DNA, 633 bp, Citrobacter koseri
atgataatccaggcatggctatgggtgctggataaccagccgctgttctggcaggcagtgtggcagcatctgatgatgtgcgggctggcgctcagcatcgccctgattattgctatcccgacgggcgtgctgatcgcgaacatccctcgcctcgcttttatcatcaccagcggcgccagcacgctgcggacgatcccaagtctggcgatccttgcggcggtcatgccgtttctcggtattggcctgctgccttcagtcgtcgcgctggtggtgctggccgtgccgccgattttgctcaacacctgcaccagcattcagtccgtgaacccggatacgctctcagcggcgcacggcatggggctgacgccctggcaggtcacaggcaaaatcgtactgcctctggcggctcccggcattctcgccggctgccgtaccgccgccgtacaggttgtcggcggcgcggctctggcgtcatttatcggtggcggcggtctgggggattttgtcaccaccggcattgccatcatggacatgtcgcgcctgctggtcggcgcggtgccgattattctgctcgctgtggctatcgaagcgcttttcgccctgcttgagcgcctgttttctcagccgacgtaa

SEQ ID NO: 71767 - DNA, 972 bp, Citrobacter koseri
atgattacactggaaaatattagcaaaatttatcctggatcgccgcgtaaagcgcttgacgatctctccatgacgtttgaagagggaaccaccacggccctgattggcccttccggctgcggtaaaaccaccaccatgcgcttaatcaaccggctggaacaacccacttccgggcgtgtccgggtaaacgggcgcgacgtcgcaacggaagatccggtgatgctgcgtcgacatatcggctacgttattcagaacgtcggactgttcccgcatatgaccgtcgcggacaacatcgccacggtgccgcgcctgctgggctggagcgcctcgcgtattcaggcgcgagtggaaacattactggaactggtcgggctggatgcccggcaatacgccagccgatttcctgccgcgctttccggtggtcagcggcaacgagtcggcgttgcccgcgcactggcggcggacccgccggtcatgctgatggatgaaccgttcggcgccatcgatccgctggttcgcgggcgattacagaccgagtttaagcagattctgcaacgcgtgaaaaagacggtgattatcgtcactcacgatcttgatgaggccatcaaaatgggcgatcgcatcgccattatgcgcgaaggacgcctgtgccagtatgccccgcccgctgaagtgctctcggccccggcagatgagttcgtcgcggcttttgtcggcagcgatgcggcgctgaaacttcttgctattaccccggtagcccaggcgatggaaacgtctctgaacgctgaccatccacaacggcttgacgtcaacgctaccctgaaagacgcgctggcgctgatgctttcccggcgcgccgacagcatcaccgtcaccaaatgcggcgcgcccgttggcgtattaactcgccagcggcttttcacccacgtacgacccgatgcgaaccatgctaccagtgagagaaatttatga

SEQ ID NO: 71768 - DNA, 1005 bp, Citrobacter koseri
atgactcaacccatccatttaacctggctaaacggccccgacgttgaccaactgaagctcacggatacggaaatcctcacggcggtggaggacgggctgcgggcacagggagagaaaaaaacagtcattgaaccgcgcatgcatttaattcccgataaagcgtttaacggccactttaacgtgctgcgcggttatatcgaaccgctgggactcgccggggtaaaaatcgtcggcgattacgtcaataactatacgctcgggctgccctcggaaatggcgctactgaacctgttcgatccgcgcaccgggatgccggtcgccattctggacgcgtcggcaatcaccgatatgcgcaccggcgcgcttaccgcgctgggcgcacgccaccttgcccgccgcaacagtaaagtgctgggacatatcggcgcgcggggaaccgcctggtggaacgttcgtctgctcaacagcatttatgattttgatgaaatccgcattcattcacgtcgcccggaaagccgtaccgcatttgcccgccgtctggagcaggatctcggcaaaaaaatcatcgttaccgatgactgggaaagctgcgtgcgcggcgcggatattgtggtcgaagcctcgcgtcttaatgcgccgacgccgctgttaaaaacagaatggataaagcccggcgcctttgttgtgccctacggcaccatgagcgccgtggaactgtcgctcaccgacatgatggacaagctggtggtggacgactgggggcagtgcaaaggcggcatgtttggttcactgcgagcccacgtagaagcgggaaaattaagtgagcataccctgcatgccgagctgggcgacattgtcgcgggcacgaagccaggccgtgaaaatgatgatgaaaccatcctcttctggcaccgggggctgtcgctaagcgatattgcgctggggcatacgatgctgaagaaagcgcgtgcgctgggtattggtcaggagctacgctaccgatga

SEQ ID NO: 71769 - DNA, 807 bp, Citrobacter koseri
atgattgttaacgcaagaatgtactcggtaactccggcagcagcggaggggtggaaaagactcctgcccgaagccgtgcgccgcgccgggctgacggcagagattgttgactacccggccccggccaggctggaggggctatgggctcgttccgatctgctggcggtattcatgtgcggctggcccttcgcgcagcggcgctttccggtacgcccggtggccgcgccggttacggaagaggccgccagggaagggattccagggcactaccgcaccctatttatggtgccgacatcgtctaccgccagatgtctggaagagacgttcggcgggcggctggcgtataccaacccggagtcgcactccggctataacgcggtacgctatcatctgtcggcatacattaacgagacgcgaaagacgctctatcgcacgcttgtcgggccgctaatcaccccgcgacgcgtggtggaagcgctggcggcgggcgaagcggatgtcggcccgttggacagctatgcctggtcgcttctgtgccggtatgagccggaactaacgcgccatgtgcgcatactgacgcgcagcgttcctgcaccgatgcctttactggtggcaagcgataccgttaatccacaggccattacggcgctgcaaacggcgctgctgacgctgaacacagaacgcgacgccacgctattacggcctctggggctgcggggatttatcaccccgtcagcagacgcctggcaagtcgtctgcgaccgggaagaaattgcgttctccagaggctatgcaacgctgcgctga

SEQ ID NO: 71770 - DNA, 933 bp, Citrobacter koseri
atgaataaaacagaacaattgacgacattgccctcctttgcggagagtcgccttgccaacgatcctccgttgcgggcggtgcgcgcctttgaagccattgcccggttaggaagcgtgacgcaagccgcgagggaactggcgatttctccatctgcggttagccatcagctcaagttacttgagggatatctgcaaatcgcgctcaccgaacggcatgggcgacgactggcgctgagccagcaagggcgtgaatattatcgttcgatccgtgcggcgtttaacgttttgcgtcaggcgacggagcatctggtggagcaggagcagacccggcaggtaacgattagcctgattccgctttttgggatgggctggtttattcctcgcctgccgatgtttatgcgcgcgaatccgcataccgagattaacgtggtgtatgccaatcaccgcaactatctgagtgacgcttcagacatgtcgatccgcttcggcaatggcaactgggcgggataccagagtgaaaaactgatttccgggcgcatggtgccggtatgcagccaggcgtttttgcgactgcatggtcatattgataccccggagcaactgatgcagatgccgctgctgcatgatgaagaacgaaccacctggcatcaatggtttattcagcagggcgtgaagcgttccccgccgcgcagcggccccttgtttgaggacggtctgctgacgctggcgggcgtacaggcaggactgggatgcgccctgatgcgcgaacccctcattatgccgtacctggataaaggcgagctggtgaagattttcgatctgccaatagatgacgggcgcgactactatttgtgcgtccgccaggatagtgaaatgacgcaggatggcaaactattacagaactggttaaggcgcgaagcggctaccgtataa

SEQ ID NO: 71771 - DNA, 990 bp, Citrobacter koseri
atggtacccactgaaagagcaatttgtcgggtacaaacgttggacacactcatacaacaactgataaacggtgtgatgctgggcagcatctacgcgctgatcgcgctgggctataccatggtgtatggtattttgcgtattattaactttgctcacggcgatatcctgatggttggcgcgcttactacgctctccgccatcaatgtcctgaatcataccttccctgctatgccgcagttattgcaactcggtgtagcgctgctcattgcgatggccgtctgcgccctgctggcaatggcggtagaacgtttcgcctatcgcaggctgcgtaacgccccacgactggctccgctgatctccggtatcggcgtttccgtattactgcaaaccgtggcgatgatcgtctggacccgcaacccgctgatgttcccgcagatcctgtcgatggccccgatcgccgtgacctccggcggcgaaactcatccacccgcgattatcactctcaccggcattgtcaccgtcgggctggcgctggcagtcatgaccggtctgtggctgctggttgaatacactcgcctcgggcgaggcatgcgcgcagtggcagagaatccgcgggtcgccacgctgatgggcgttaacccaaacgccatcatcaccctgacgtttgctatcggcggcatttttgcggcgctggccggcgtgatgatggcgagcaactacggtaacgccagcttctcaatgggctttctccccggaattaaagcgttcaccgccgccgtgcttggcggcattggcaatattcgcggcgcgatgatcggcgggattttactgggcgtcatagaagcgctgggtgcgggctatctcggtgaactcactaacggcgtctttggcagtaattaccaggacgtgtttgccttcatcgtgttgatcctggtgctggtattccgtccggcaggtttgttgggcgagcgcgtggcgcacagagcgtaa

SEQ ID NO: 71772 - DNA, 1107 bp, Citrobacter koseri
atgacaaccgtacaactgcaagctccagccacgacgcgcaaattttggtcaggcatgaccttgttctgcatcgcattgctgattgctcctgtcgttgccagccagcttggcggtaactactgggttcgcgtgatcgatttcgccctgctctacatcatgctggcgctggggctcaatatcgtcgtgggctataccggcctgctggatatggggtttattgccttttatgccgttggggcttatctggccgctctgctggcctctccccatctgtctgaggtgttcccaatcctcaccgtctggttcccggacgggctacatacctcgtatctgctgatcgttcctgctgcggcactggtcgctgccgtatgcggcattttgcttggcgcaccgacgctgaagctgcgcggggattatctggcaattgttacgctgggctttggcgaaattatccgcattctgatgcgcaacctcgatcgtccggtgaatatcaccaacggtgccaaaggcatcaccggcgtggatacgcttaacctgtttggcctgaagttcagcggtgtttatcactggctcggctttaaagtacccgcgttgtggctgtggtactacctgctgatgctggtcattgtggcgatcatttttgtctgcctgcgcctgcaacactcacgtatcggtcgcgcctggcacgcgattcgtgaggacgaagacgtggcccgcgcgatgggcattaacgtgcgcaactataagctgctggcttttgctatgggcgcctcgtttggcggcgtcgctggcgcactgtttggcgcgtttcagggatttgtctccccggaatccttcaccctgcaagagtccattgccgtgctggcgatggtggtgctgggcggtatgggccatatccccggcgtgatcctcggtgcggtactcctgaccgctctgccggaactgctccgtagccaggcggcccctgttcaacagatgttgttcggtacggtactgattgacccggaaattttgcgtcagctcttctacggccttgcactggtgctggtgatgctggttcgcccatccggtatctggccggttcgccacaaagaggtgaaagcatga

SEQ ID NO: 71773 - DNA, 768 bp, Citrobacter koseri
atgagcctgttaaccgtgagcaatatgtccaaacgctttggcggcctgaccgccgtggacgatgtttcactttccattaataaaggcgagatctacggtctgatcggccccaacggagccggaaaaaccacctgttttaacctgattaccgggctttacccggcagacaggggggcgttttttattgcagaccaaccctattacccaaaacagatagagaaagtcaccgccgccgggattgcacgcacttttcaaaacgtgcgtctgttcaacgggatgtcggtgctggaaaacgtgatggtcggtcgccacgttcgcacccgtaatgggctatgggctgcactgagccgccataaacgcgcccgtgaggaagaagcgcaaacccgcgaacaggcctggcgctggctggagtacaccggcattgcaaagtttgcccattaccgcgcctgcgatctggcctacggccaccagcgtcgtcttgagatcgcccgcgcgctggctacagatccgctgcttctggcgcttgacgaacctgctgcggggatgaatgccgccgagaaggtcgcgcttggcgagctgttaattcgtattcgtgaagatggcaaaaccctgctgatgatcgagcacgacgtcaagctggtgatgaacatctgcgaccgcctgacggtactcgattacggcaaaacgctggcctgcggcacgccggatagcgtgcgtcgcgacccggcagttatcgcagcctggcttggaggcaataagcatgtctga

SEQ ID NO: 71774 - DNA, 720 bp, Citrobacter koseri
atgtctgagttactgaaggtggaacgcctggatgtgcattacggcggtattcaggccgttcgcgatatctcctttaccctgcatgagggtgaacaagccacgctgattggcgccaacggcgcgggtaaaagttccaccgtgcgcgccatcaccgggctggaaagttttaacggcaacattgagttcaatggcaaagccgtacgcaaacagaaaccggagacgctgctgcgcaacgggctggtgatggtgccggaaggtcgcggcatctttgcccgcatgacggtgcttgaaaatttgcagatgggggcatggttaaggcgtgacgccgccagcgttaagcgcgaaatggcagagatttttgagcgtttcccgcgtcttggcgaacgccagcaccagcttgcaggactgctctctggcggcgaacagcagctgttagcgctcaaccgcgccctgctgagccgcccgcgtttgctgatcctcgacgagccgtctatggggttagcccccaggatggtggaaaacatttttaccgtgatcgccgggctgcgcgcatgcggcgtcgccctgctgctcattgaacaaaacgcccgactggcgctggaagtaaccgacagcgcctgggtgatggacagcggcagcattgtgcatcacggcgagtcgaaagcgatgcttaatgacgatcaaattgcacagatttatttgggcgaaatgcctgtttaa

SEQ ID NO: 71775 - DNA, 1158 bp, Citrobacter koseri
atgaaaacagtaaaaatcagtgcgctcagcgccgctattctgctcagtagttttgcctcaacaggtgcatggtcagctaaaagcgaaaccgtggccatcggtcttgcgggcccgcttaccggcccgtctgcccgtattggtaaagatctggagaacggcgcccaactggcgattgacgatatcaacaagcagcacccgaccatcggtggtaaagcggtgaccttcaggctgcaatctgaagacgatcagtccgacccgcgcactgccgtggctgtggcgcagcgtctggtcgatagcggcgtggcgggcgtggtcggccactggaataccggcaccagtattccggcggcacgcgtttatcacgatgcgggtatcgcccaggtcgcgcctgttgccaccggccatgcctataccagacaaggctttgataccagcttccgtgtgatggggcatgacgacgacggcggccagtttgccggtcagtacgcggtgaataccctgaaggcaaaacgtattgccgtgatcgacgaccgtaccgcattcggtcaggggctggctgacgagtttataaaatcacttgaagcgcagggcgtgaagattgttgaccgccagtacgttgacgacaaaaccgtggatttcagcgccgtgctgaccgccattcgtagcaaaaacgctgacctgattttcttcggcggcgtggatagccaggccgcgccgctggcgcgtcgtatcaaacagctgggtatgaacgccacgctgatgggcgcaggcggcttcgtcagccagaccttcctgcaactggcccagaaagaaggtgaaggcgtcgtggcgctggagccgggcctgccggttgagcagatgccgggcggtaaggcgttcgaacaagagtatcagtctcgctaccacacccatattgaactccacgccccattcgcctatgacgccacccgcgttctggttgccgcgatggaaaaagccgactctgtcgatccggctgagtatctgccggttctgcgcgcaataagctattccggcgttaccgggcagatcgcttttgataatgaaggcaacctgaaatcgccgtctttcaccgtctacaaagtcgtggatggtaaatggcagccgcaaacggtactgggcggcgccaaaacgaagtaa

SEQ ID NO: 71776 - DNA, 483 bp, Citrobacter koseri
atgagtgataataatgagctgggcattctcgcccgccgcaaaatagaagcagagattattaaaccaatctatgaaatcctggtgcgcgagatagggaaagcccgcgcccaggcggtcattggcgaagccattgagcaggcggcgatcgatgccggtaaagaatttgcgcgcaaggagccgaatggcacagacgtgaagagttttatcgccctgcaatacctgtgggagaaggataacgcgctggatgtcaaagtgatcgacgccgacgacaagcagtacaactataacgtcacccgctgccgttatgccgagatgtaccacgagatgggcctcggtgagattggtcacctgctctcctgcgcccgagatgagaaatttatcgtcggctacgcgcccgacgtggagctgacccgtacgaccaccatcatgcagggtggcgcatgctgtgactttcgctatcgcaccaaaaaggaagacgtatga

SEQ ID NO: 71777 - DNA, 1224 bp, Citrobacter koseri
atgatccgcgtgaacgcagagcgtttatggtcaacgcttgagataatggcgcaaatcggcggcacgccagccggtggcgtcacccgactggcattaagcaatgaggatcgcctcgcccgtgatttactgcgcgactgggcgcaggaagccggatttcgctgcgaaatcgatagcatgggcaacatgtttattcgccgcaccggtaaaaaaccacagcttgcgccggtgatgaccggttcacacgttgattctcagccgctgggtgggcgatatgatggaatttacggcgtgctggccgggctggaagtgctgcgtactttaaacgatcagaacattgagaccgaacgcgatattgtactggtcaactggaccaatgaagaaggcgcacgcttcgcgccagcaatgctggcctccggcgtctggagcgggcagttcacacaacaatacgcgtgggcgcgtgaagatcaggatggcatcagcgtcggcgaagcgcttgaggccatcggttaccgtggcgaccagcccaccgtcgccttccctgtctacacctgttacgagctacatatcgagcaaggcccgattctcgaagaggaaggtattgatatcggcctggtgcatgccgctatgggccagcgctggttcaacgttgtaatccgcggatttgccgcccatgccggcaccacgccaatggccagccgccgcgatgcgttgaccgccttcgcccgtctggcgctggcggtggaggatattggcaatcagcacgaaccaaacggcagagcgacaatcggtatggcgcagatttcaccgggatcgcgtaacgtagtgccaggggaagtacattgcagcgtggagtttcgtcatccacagactgccaccctccaggcaatggaaacggcgcttcgcaaggcaaccgccgatctgaatcagcgcggcattcagctcgacgtggaacgtatcttcgattacgcccccatcgcatttgacgagacctgtctacagcgcagcgcaaacgcggcccaggcactgggatacagcagcaaacggatggtgtccggcgccggtcacgatacctgttatatcagcaaaatcgcgcccgccagcatgatttttatcccctgcgaaaaaggcatcagccacaacgaggcagaaaacattcagccggaatgggcagaaaaaggcgctaatgttctgctgcacagcctcctgccagctgcgcttgaataa

SEQ ID NO: 71778 - DNA, 984 bp, Citrobacter koseri
atgaataacgattttacatttacgatcaaaagcagtcgcttcgatgaacattataacccttcggaaaatacgcgtattactaccaactttgcaaatctggccagaggaaagaaccgccaggaaaacttacgcaacacgttagtgatgattgacaatcgcttcaatacactggcgtattgggataaccccaaaagcgatcgttattctgtggaacttgatatcatttctgttgcgatgaatattaacgttgatagcaacagcgatacattccccgctattgaaatattaaaaaccaatattattgacaaaaagaacaacgaacgttttgaaggtattgtcgggaataatttttcctcttacgtacgagattatgattttagcgtattactgccagaacataacaaaaacaaacctgagtttagcattccagataattttggtgatttgcatgggaacatatttaaacatttcataaactcaaatgaatacaaagagcatttcaaaaaaccacctgtgatatgcctcagcgtgtcaagtaacgatatctatcatcggactggaaatcagcatcctgtattgggtatcgaataccagccaggtggttcttcgttaactgagaaatacttcaaaaaaatggatttgcaggttcgctattttatgccccaaaatagcgttgcacctttagccttttatttttctggtgatttacttagtgattacacgaatcttgaacttatcagcaccatcagcacgatggagacgttccagaagatttaccgacctgaaatttacaatgctaacgccgcagcaggtcaatgctatcaaccaaatctgaaccaccaggatcattcattaacaaaaattgtttatgatcgggaagaacgcagccagctggctattgagcaaggaaagtttacagaagagcacttcatcaaaccatacaaggatattcttgaaaagtggtctgctcactacgctctctga

SEQ ID NO: 71779 - DNA, 1032 bp, Citrobacter koseri
atgaaaatattactacccacttcaacggctggcagtttacctaaaccttcctggcttgctcaacctgagacgctttggtcgccctggaaattgcaaaatgaggaattaatcgagggaaaacaagatgcgctacgtttgtccctggatgatcaactacgggcaggtattgatattgttagtgatggcgagcaaacgcgccaacactttgtcaccacgtttattgaacacctcagcggcgttgattttgagaaacgtcagattgttaaaattcgtaatcgctatgatgcgagcgtaccgaccgttgttgatgcggtagcgcgtcaaaaacccgtttttgttgaagatgcaaagtatttacgccagctcactcgtcagccgattaaatgggcgctgccagggcctatgacgatgatcgatacgctctacgatgctcactataaaagccgcgaaaagctggcctgggaatttgcaaaaattctcaatcaggaagccagagagttagaagctgccggcgtcgatattatccagtttgatgagcccgcatttaatgtgttttttgatgaagtgaatgactgggggatcgccgcgttagaaaaagccattgaagggctaaaatgcgaaaccgctgtgcatatctgctatggatatggcatcaaagccaataccgactggaaaaagacgctggggtcagagtggagacaatatgaagaagcttttcccaaactgcaaacgtctaatatcgatatcatctcactggaatgtcataactcgcatgttccaatggatctgcttgaactgattcgcggtaaaaaagtcatggtaggggccattgacgtggcaaccaacaccattgagacaccagaagaagtcgccagtacgttacgcaaagcgcttcagtttgtcgatgccgacaagctctatccttctaccaactgtggtatggctcccttatctcgtcaggtagccagaggtaagctcgatgccctaagcgcaggcgcagaaatcatccgaagagaactttcggctaaatga

SEQ ID NO: 71780 - DNA, 558 bp, Citrobacter koseri
atgaatgcccggagggggttaagatttttctgccagccacttattaaagcgcaccatatcttccagcacacattcgaccaactgttcaatcgtttcccagtcctgctcgttattgcaggcaacttcaagcgcctcacaggtctctttcagcggcgtataattcatcatccgtgcaccgccgttaatccggtgtgccatgcggccaaccttgtcacggtctcgctgttcaagtcgcagtttaagtttcccgataaattcgccctgtacgcaacggctggcgccggtgtagcgaaagtgaaagtaggtggctggcagggtaatgacacccgcgagttcgccggcaacacgcaaaccaactttacgtactccgttggcgcgggtgcttcttatgaagttattaacgatttgaccctgtacgccacttatcgttatgtcgatatgggcaatatcgaaagcggccgtaacacctttgtaaacgcccgtgctctacaggatgaaaatctgcgtggacgcctggtcaacaatgaatttgtgttcggcgttcgttacgtcctttaa

SEQ ID NO: 71781 - DNA, 1026 bp, Citrobacter koseri
gtgagaaaaacaaaacgcgtcacaataaaagacatcgcggaactggcgggggtctcaaaagccaccgccagcctggtactgaacggacgcagcaaagagctacgggtggcggaagaaacacgggatcgtgtactggctattgcaaaagagcatcactaccagcccagcattcacgcccgctcgctgcgtgataaccgcagccacaccattggtctggtggttccggaaatcaccaactacggttttgccgtcttttctcacgaactggaaaccctgtgccgggaggcgggcgttcagttgctgatttcctgtagcgatgaaaacccaggccaggagaccgtagtggtcaataacatggtggcgcgccaggtggacgggttgattgtcgcctccagtatgttgaatgatgcggattaccagaaactgagcgagcagatgcccgtggttctatttgatcgccacatgaacgacagctctctgccgctggtcatcaccgattcgattactcccacggctgaactggtggcggatatcgcccgccagcatcctgacgagttctacttcctcggcggtcagccgcggctttccccgacgcgtgaccgtctggaggggtttaagcaggggttacgtgaagccaacgttgaactgcgcccggagtggatcatccacggcaactatcaccctggttccggttatgagatgttcgctgaactttgcgcccgactgggacgtccacctaaggcgctgttcaccgccgcctgcgggctgctggaaggggtgctgcgctatatgggccagcacaacctgctgcaaagtaacatgcggctggccagctttgacgatcactatttgtatgattcactcactattcctgtcgataccatccgccaggataatcatcagctggcatggcactgctttgatcttattggcaaattgattgaaggggaaaacccggaacctctccagcgtaagctgaaagcaacactgcaacggcgatataaaacagaaaaacagacgcaatag

SEQ ID NO: 71782 - DNA, 1407 bp, Citrobacter koseri
atgactttagcttcccgctggcctgccgtgttgcaggcagtaatgcaaggccagccgcgtgcactggcggacagccattatccgcagtggcatcccgcgccggtaacggggctgatgaacgatccgaacgggtttatctggtttgccgggcgctaccacctgttttatcaatggaacccactgggctgcgatcatcgctataagtgctggggacactggagctccgtggatctggtgcactggcagcacgagtcaattgccctgatgcccgacgaagagtatgaccgtaacggctgttattccggcagcgccgtggataacaacggcgtgctgaccctgtgctacaccggcaacgtcaagtttgacgacggcggtcgcatcgcctggcagtgtctggcggtgcaaaatgacgatggcagttttaccaagcaggggccagtgttgcccctgccggaagggtacaccgggcatgtacgggacccgaaggtgtggtgccatgatgggcagtggtacatggtgctcggtgcgcaggatctgcaaaagcagggcaaagtgctgctgttcacatccgatgatttacaccactggcagccctgcggtgagattgctggacagggcgtgaacggtcttacggactccgggtatatgtgggagtgtccggatctgtttgcgcttgatgaaacacatgtgttgatctgctgcccgcaggggctggcgcgcgaaccgcatcgctatctcaatacctatccgtcagtctggatgagcggggcatttgattatgaaacggcttcgtttgcccacggcgagctgcatgagcttgacgccggtttcgagttttatgcgccacaaaccacggtggcggaagacggaagacgcatcctgatcggctggatgggcgtgccggacggtgaagagatgcttcagcccacatgtgcgtacggctggatccaccagatgacctgcccgcgggaattgaagtatcgcgacggcaggctctggcaaacgcctgccagagaacttgaacagcttcgcgaagccgaacaccagtggcagggccgcgccagcgatgcgccagaactggaggcgacacgtcttgagtttgaactgagcacttcgtacgtgaatgccgattttgccggcgcgttgcgtctcacggtcgatgaccacggtgtgcgtctggaacgcgccagtctgaaaaccagtgaaacgttgacccgctactggcagggcgacgtcagccatttacgcgttctgtgcgacagctccagtattgaaattttcatcaaccatggcgaaggggtgatgagcagccgctattttcctgaccatccggcccgggtacgcttcgaaggtgcgtccgacatcacattacgctactggtcgctgcgccgctgcatgatagaatag

SEQ ID NO: 71783 - DNA, 1371 bp, Citrobacter koseri
atggattttgataatatcgcccgcgaactcatcccgctgctcggaggcaaagagaacatcgcaagcgccgctcactgcgcaacgcgtctgcgtctggttctgattgacgacgcgctttccgatcagcaggccattggcaaggtcgaaggggtgaaaggctgttttcgtaactccgggcagatgcaggtgatttttggtaccggtgtggttaacaaggtctacgccgcgtttattcaggctgcggggattagcgaatccagcaagtccgaagctgcagatatcgccgcacgtaagctgaacccgttccagcgtattgctcgtctgctgtctaacatcttcgtgccaatcattcctgccattgtggcgtccggtttgctgatgggcctgcttgggatggtaaaaacctacggctgggtgaatgcggataacgcgctttacatcatgctggatatgtgcagctcggcggcgtttattattctgccgatcctgattggctttaccgcagcccgggaatttggcggtaacccgtatctgggggcgacgctgggtggcattctgacgcacccggcgctgaccaacgcctggggcgtggcgtccggcttccacaccatgaactttttcggttttgaaatcgccatgattggctatcagggaaccgtgttcccggtactgctggcggtgtggtttatgagcatagtggagaaacagctgcgccgggcgatcccggatgcgttagatctgatcctgaccccgttcctgactgttattatctccggctttattgcgctgttgatcattggccctgcgggccgcgcgctgggagacggtatctccttcatcctgagtaccctgattgctcatgcaggctggctggccgggctgttgtttggtggcctgtattcggtaattgttattaccggtattcaccacagcttccacgccatcgaggccggactgctggggaatccgtcgataggcgttaacttcctgctaccaatctgggcgatggcgaatgtggcgcaaggcggggcgtgtctggcggtgtggttcaaaaccaacgatgccaaaatcaaagccattacattaccgtcggcgttctctgcgatgctgggcatcaccgaagcggcgatttttggtatcaacctgcgcttcgtgaagccgtttatcgcggcgctgatcggtggcgcggcgggcggtgcttgggtggtgtcggtgcatgtctacatgaccgccgtgggactgactgctattccgggcatggcaatagtacaggccagctcgctgcttaactatattatcggcatggtgattgctttcggtgtggcgttcaccgtctccctgctgctgaaatataagacggactctgaataa

SEQ ID NO: 71784 - DNA, 1518 bp, Citrobacter koseri
atgtataaaaaacgcagaattgccgtgatgataggcatgctgatcggcagtacctctgttcttgcccagacggatatgacgagtatcgaatcacgccttgcggcgctggagcagcgtcttcaggacgcagaaacccgcgcacaggtggctgagaaacgtgccatagcagcagaacaaaaaacgcagcagttggttgccgcccagcaacaggcgcaaaccatcacccgggaggtggcgcagcggactaccgcgctggaaaagaaagccgatcagagtagtggatttgagtttcacggctatgctcgttccggcctgctgatgaacgacgcagcctcgagcagcaaaagtggcccgtacctgacgccagccggggaaacaggcggggcgattgggcgtctggggaatgaagcagatacctacgtcgagctaaacgtggaacacaagcagaccctggacaacggcgcaaccacgcgctttaaggccatgctggccgacgggcagaaaacctataacgactggtcagcggacagcagtgatctcaatattcgccaggcctttgctgaactgggcaatttgcctgattttaccggtgcgctgaaaggcagtaccttctgggcgggaaaacgttttgaccgcgataactttgacattcactggctggattctgacgtggtgttcctggccggtacgggcggcggtgtgtatgacgtgaagtgggacgacacgctgcacagtaacttctctgtctatgggcgcaattttggcagcgaggaggagatcgacaacaacgttcagaactacatcctaagcatgaaccactttgccggaccgttccaactgatggtgagtggtctgcgggctaaagacaacgatgaccgtaaagacagcaacggtgacctgattaaaactgatgcggcgaataacggtgttcacgctatggctggcctgcacaacaagagtttctacggcctgcgggagggatctgccaaaacggcgctgctgtatggccacggcctgggtgcggaagtaaaaagtattggttccgatggcgcactgctgtctgaagctgatacctggcgctttgccagttatggtgtcacgcctctgggcggcggctggcatattgcacctgcagtcctggcgcagagcagtaaagaccgttacgtcaaaggcgacagctatgaatgggtcacgctcaacactcgtttgattaaagaggtcacgcagaatttcgccctagcgttcgaaggtagctatcagtacatggatttgaatcctgaaggctacaaagaccgtaatgcggtcaacgggagtttctacaagctgactttcgccccgacattaaaagcaggcaagatcggcgatttcttcagccgtccggagctgcgtctgttcgccacctggatggactggagcagcaaactggataactacgccagcgatgacgcctttggcagcagcggcttcaatgctggcggggaatggaactttggggttcagatggaaacctggttctaa

SEQ ID NO: 71785 - DNA, 906 bp, Citrobacter koseri
atggaaaagatctgggtgcttggcgacgcggttgtggatcttctgccggatggtaagggcagattactgcaatgccccgggggcgcaccggccaatgtcgcggttggcattgcccgcctcggcggcaaaagcgcgtttatcggcagagtcggtgatgacccattcggcaggtttatgcaaaagatgcttgcggacgaacaggtcgacgttcagtggatgcggcgcgacccgcagcattgcacatcaacggtggtggttgatctggacgaacagggtgaacgctcgtttacgtttatggtacgcccgagcgccgatctgttcctgacatctgatgatctcccgccatttcaggttggggagtggctgcatgtctgttcgattgccctgagcgcagaaccctctcgttccgctacacttcaggcaatggaaaccatcagaaagaccggtggttttgtcagcttcgaccccaacatccgccacgatctctggcgtcatgatgccgagttgcgccagtgccttgcgcaggcattgaccaaagccgatgtggtgaaactttccgtggaagagttgagctatttaacgggggagcatcaggtacaggacggtctgacggcgttaatgcaaagctgtcctgccagtctggtgctggtaactcggggtaaagagggggtgattacctggcatgagggcacgatgacccactatcccgcgacgtcagtggaatgcgttgacaccaccggcgcaggggatgccttcgtggcgggacttctctacggactggcgtcagcaggctctgccattccccatcatctccccccgataatcggactcgcacaacgctgcggcgcactcgccacaacggccaaaggggcaatgactgcactgccgtatctccacgaactgtaa

SEQ ID NO: 71786 - DNA, 270 bp, Citrobacter koseri
ttgccggcacgtcaaaaaacgtcactatttgcagtcaaagagacttactacagcaacgtggccagcgaaaagttgcgtcttcccacccacgatacatgtgacatcatcaccgccgctgtaaaggctctggatcgtatctttcttgagggccattgttacgcgaaggcaggtgtgatgctgaatgactttaccccttctggcgtttctcagcttaacctgtttgacgagttacaacctcggagggatagcgccggaatggcaaatgaatag

SEQ ID NO: 71787 - DNA, 354 bp, Citrobacter koseri
atggcttttggtgtctatccggcagtctcccttgcacaagccagggcactacgtgatgaagccaagaaaaagctggccgaaggtatcgatccatcatttgctaagaaagaagaaaagcgggttcgcgatgtgcagctcaacaacacgtttcaggccgtggcgcgacagagaaggcaaagaaggttcgccagcgttgtagtgaagtctttcgctacgctatcgtttaaacttatagttccgaaggaacgataccgcatctgtgtgaacacgttcacatacgttatcttcctcatcacgccatcgctgtactatattgatatcaagctcaatacctatatttctgtcggccggtaa

SEQ ID NO: 71788 - DNA, 1074 bp, Citrobacter koseri
atggcgactatacgcaaacgtggtaactaccaatgggaagctcagatccgtaaacgtggttttccctcccaaaccaaaacctttaacaccaaagtggaagcagaggcatgggccaaaatgatcgagtcagaaatggcgagaggtgtttggctcagccggagcgaagcggaatctacaacactgtatgaaaccctaacgcgctatgaaaaagagattgttcccggcaaaaaaggagcagtgcaagatcactccctagtgcggatactaaaaggtactcagctggcgaaaaactatatggccagcatcaggagcgctgatgtcgccaaactcagggatgaatggttgaaaatctatgctcctgcaaccgttttaaggcgtttggcgttactttctcacgtattcaacgtttcgcgtaaagaatggggcatggaaagcctgcttaaccctgtagaagccattcgcaaaccccaacccaagaatgccagaactaggcgcctggaaacgcagccagtactttcagagaaaaccggtgttacgtcaggaaaggaaatagctaacgagatcgaacatattatcgccgcaacacattccgtagtattgccagcaatcattcttctggcgttagagacagccatgcgccgtagcgagatcgcagaactacgctggcgctttatcgaccttgagaagcgagttgcacatttaccagatactaagaatgggaatgcccgcgatgtccccttatcaacgaaagcaataaaaatgctctccaatctcaaggaacacgctaaacttgggactgacaaggttttcaatatgcgtgcggacgcgataactcaagcttttgaccgagctgtaaagcgagcccgagaaaggtatgtagaaactaatccacactgtgatgacactttcctaaaagatctgagatttcatgacctgcggcatgaagccacttcacgacttgcggtaatcttccccatgcatgagttgacaaaaataacgggacataaagaccccaggatgcttatgcgctattatcatccaaaggctgaagatttggcaaaaaaattagactaa

SEQ ID NO: 71789 - DNA, 1398 bp, Citrobacter koseri
atgcaatttttgaaagatttaatctctagtatgtataaacacattgacaccagaataaatagtccaatcttaggtacattgagtgctatatttgtaattttatactgggataaattcacattgctattttggggaactggaacaatcgactccagagtcactcaatttaaatcattcttaactgggattaccacttcagaatatttattgatagcatttctgatactagcatatttatttttattacccttagtaaattatcttactgggttaattcaaggtgagatagaacacataagatattgttctagcattaatcaaaaagtaaaaaaagagaaagaaagagcacggcttattaactcaaaatataaggctgagcatgagagtgaaattgcagctcaagaaatcatcgaagaaatagcatttagcaatgaaaaaatcgaacaacaaaaaacactaactgaagatataaaggaacgctctaaagcatcctcggtaattattaaagcgatgtacgaaaaatctcagaaaatgaaaattgaactggagacttctatcaaagaaaaacaagcagcagaaatcaaactctcacgagaggctatgagcagagagagagaaaaaatgagctatgacaaactgaaatatcaaatcgaggaaaaaaagaaaatatcacaactttcttcagccttctatttaattaataaacttgacttaatacttactgctgattcaattaaaatatcgctttcgggtttaggcgcagtaatcgctagtgtttttggatacacatcttttacaaaattactcgaagatgaaaatttcaacacagattctttagaggcgattgattatataatttactcagaaagtttaataacggatattaaatcaataatcgaagacgaaaatattgatgaagatactgacagctacactttatttgaacatttacagaatatattcgaagaggatctcaatataaaaatccttacaaaagatgaggtcagtgaaaaaatacgtgacaatcttgaggaaaatggtatgtacgacttgattcattgtgatgaagtaagtggtagcatagcagaaactaacgcttactttgaatatgtagaaaacctgcaaattatagacagcgaactcactgatgaatcgtttaaagtcaagttcgagtgtatcctttcaggaaccactcatgaagacaagccttattgcggtgaagaaattgatgtctcctttacaaataaaagtaaaatcatactaggcaagtttgccataggagaagcagaaattgaagagattgggagttctgtgaaagactatcatgaagaagatgattacgaacctcaagaaatcagtagtacagttaatgaaaaaaaatacgataatgagttttga

SEQ ID NO: 71790 - DNA, 189 bp, Citrobacter koseri
atgaattcaatatatgataagcgtactaaagctttcaagaaagcggaggcgagtttatatttatcaaacaaaggtccgcgagggttaccatactatgaactaataaagagcaaggtcattaatggagaattgacttatgaagaagctagacttgaggtatttaactattacactggaaaatcaaaataa

SEQ ID NO: 71791 - DNA, 213 bp, Citrobacter koseri
atggttgattataatagcttagttttggaagggctaaaaatccttttttccgacaaaaataatgaatttgtaaaaaaactctatgatcccttgataaatattctgtgcattgaagactattattttgctaccggaatttatgattcagaagatgcgtccaaacaaattgaaaagctaaagaaagcaataaatgattataggtttaattattag

SEQ ID NO: 71792 - DNA, 1395 bp, Citrobacter koseri
atgagaatagtaagcaaactcacttttttgggaatgatttttttgttttctgtaaatgcttatgctggtcaattagatagtagcggattacttgatacgttattagataagtttcaacaagtagccagcacatggtcattagtaattggtgattatgcgaattggctcttctgggggctggtattaatcagtatggtttggacatttggtatgttggcgatgcaaggggaaggtttaatcaatgcacttgcagaaatagttcgtttttttgccgtgattggttttttttattatcttttaatcaacggcccagccatagcacaatctataattaactcaatgagacaacttgcagcaaatgctttaggaacaagtactggtatttcaccctccagcatagttgatatagcttttgtgatattaacaaaggtcagttcagcagcatcaatttggtctccaatgatttcgaccattatgataaccgtcgcgataatagtattagtagtaatggcgcttatcgcgataaatatgctaataatgttagtttctgcatgggtgttgtgttatgcaggagttattttgcttgggtttggtggctcgaaatggacttctgatatagcaataaattacttacacacagtattatcgattggtattcagttatttacaatgacattaatcattgggattgggcaatcatttatagatcagtatttttctattattaaaaatgatattcctgatcttaatagtcttattgttttacttctggcgtcaattattcttttagtattgacgaataaattaccgttgttgttatcaggcgttgttggaggagcgtccttacaagggatcggtggttttggagcaggtatggttactggcgctgctactactgcaatcagtggcgctggggcaatggcaatgagcgctacagctcaagtcagtggtggtgcttccgctctaaaagcagcatttgaatctgcacaagcggcgatggccgaagaatctggttctggtgataaaggtggtttaggtggaggatttggcggcggggaagataccggttccgtagatacttctggaggacaaccatcaggcggttccggtggttcttctgcagggagcaatacaggtagcgtcagcggaggaagccaggggtttgcttcatcattctcacgagctggccgcatggcttctcacatggcgagcgggctgtctaatggagcatcggagtatcagatgatgaagggaagtgctaattctatccgaacacaacagactgttggtggggaaatagcgaatcaaatacgtaaacacacagccgatcgtcagagtaaccacgaacaggatgagtttgagggtgatagttttactggcagtaaaaaatcttga

SEQ ID NO: 71793 - DNA, 174 bp, Citrobacter koseri
atgaaagataaacttttggtcatttttattctaatcattccattgattctatgctcttgtgataaaaaagatgaagattgtttatcgacgccagagaataaattgaacgaacatagctacgataaatgtgccctgcgcagtaataacaatcctagccctaagcgagaatggtaa

SEQ ID NO: 71794 - DNA, 795 bp, Citrobacter koseri
atgaagttaatgctcctagtatttacatcactgagagggattttagcagctaaaaaatctttagcagcttccttcctggcatccatcatggcattaccggcgactgccggtatccctgtcatcgatggtactaatgtggtgcagaccacaatcagcgcagtcaataacgttcaggctgtggctaaacagatccagcagtaccagacgcagctgcagcagtatgaaaacatgctgaaaaatacagtcgcacctgcggcatatatctgggatcaggccaattcgaccatcaacaaattattgcaggcgcaggacactcttaattactacaaaaatcaggccgggagtctcgattcatatctgaaacgttatcaggatattaactattacagatcgtcggcctgctttaacagtaatgttgaatgtactgcggatgaaattagcgcactgcgtaaagctgaacagaacaactctgaggcacgtaaaaaggcgaacgacgccgtgtttaaggctctcgatcaacagcaggaaacactgcaaagcgatgctgataacctgacagatttgcaaactcaggcaaccggcgcgcaagggcaaatggaagctattcaggccgctaaccagcttgccagtgctcaaacaaaccagctgctgcaaatccgctcgcttctggtagctcaacaaaacgctgcagcaacactggcgctggctcaggccgataaagaggcccaacaaatagtcgctgatgaaaaagcgttagctggcgagaacacaccaagcccgaagcgaatttggtga

SEQ ID NO: 71795 - DNA, 354 bp, Citrobacter koseri
atgaccgtttctcagactagaaaaaatagtacaccaattaaagtttattgtttgccagatgaaaaagcgcaaatccaagaaaatgcagaagcatctggcttaagtgtagcgagtttcattcgtaaagtagcaatgggttatcaggttgagtctattgtagatattgatcaggttgtagagcttagccgagtaaatgctgatcttggtcgacttggtgggttacttaaactgtggttagctaacgatccacgcacagttgatttttcaccctcattaataaaaacgttgcttgctaaaatagaatcaaccagacaagaactaagaaatattatggatagaatcttggataaataa

SEQ ID NO: 71796 - DNA, 1746 bp, Citrobacter koseri
atgttcataaaatctctccagatagccaataaagatgggattatacgcttaataaagtttcatgctggtttgaatttgatcgttgatgaaacgccagttgatgaggcatcaatcgagtcaaccaaaaccactggcaataatgttggtaaaacaacagtattaatgttagtcgatttttgtttaggcgcagatgctaaaggcatttatactgacccagaaactaaaaagggcgaatatacacttgttaaaaacttcttgattgaaactgaggttttaataaccctaacacttgttgagaatttagatgatccgctagctaagaccatcgtcattgagcgaaattttctctctcgtaaaaaatgtatcagaagaattaatgggctacaaaaaactatcgaagagtttgaagagacgttaacagacgtattagttcctggccattatggtaataagcctaccttttcccaaataatatctaataatataagatataaagaactcagtgtcacccatacgctgagaacactaagctcatttactcgtgatgatgaatatgagacccttcatttatttcttcttggatgtgattttggaaaaggagctcttaaacaaaatttgctagctagcatccgaatggaaacaaccttcaagaataggttggagtctaaacaaactcgcacagcgtatgagacatcactagcattattgatttcggaaattaatgatttagatctgaaaaagtctactttctatatcaaccctaactttgaaaatgatctcaatgcgttggatgatattaagtatcaattgagcactataggttcaaaattaagtaagcttaaattacggaaagaactcatagttgaggcggtaaaagatattgaaagtggcaagatggaaattgacactaatcaattgaaagatttatatactgaagccagtaataatataaagaatattcaggtgaaatttgaatcattactttccttccacaaccaaatggttgaagaaaaagttaaattcatatcaaaagaattacctgtaataactagtgagattagtaaaactcaagaagatttaactacacttcttgtcaaagaaaaagaactagttgaaaatataaataaaagcggttcgtttgatgaacttgaagaattagtcttagaattgaatgaaaaacaccgaaaaaaaggtgagttcgaagccattattaaccaaattgaaaaaactgaaaagaatatcgaagagttaaacgctcaagtagatgctattaacaataatttattttctgatgattttgagctagaagttcaatctcaggtaaataagttcaataaatatttttcaactgtatctcaagagttatacggtgaacaatatgctttgaaatatgatattgttacagcatccaaaacaggaaaaaaaatatacaaattcagttcatttaataccaattttagttcagggaaaaaacaaggagaaattgtttgttttgatattgcatatattttatttgcagatgaagaaaacattccttgttttcattttttgttaaatgacaaaaaagaacttatgcatggcaatcaactggtcagaatagctaatcttgttgaacgttacaaatctcaaattcagtatgttgcatctatattgaaggataaacttccaaaagaattgagcgacgagaaaaacttcattgtgaagttatctcaagagaataaattattccgcattgagaataattaa

SEQ ID NO: 71797 - DNA, 249 bp, Citrobacter koseri
atgctgttaccaaaggacattcatcctaaagatagcttatattataacggcggttttattatagatgcgctgaaaggtttcgatgaaattgatttaatcgatcttttttacgaaacaaagaaaaaaattgaaatgtctatatcaatttttgttttatctcttgactggttatacctagcaggaatagttgaattaaatccaaaggggaaattggaatatgttcataaaatctctccagatagccaataa

SEQ ID NO: 71798 - DNA, 981 bp, Citrobacter koseri
gtgaacagaactctttattttaatttatgtgagagaaagctaacatttttatgttgtagcattgaagtaagaggtaagttaaatatacttgactatcatcttcattgtgaagacttttatgtgcacttttttaatttgctattcggatattccctagaaaatacaaatcaagaaactcataattttgaaggcatagatctaatcgataagaatagtaagatagttttacaggtttcttccaccgcgactaaaacaaaaattgaatcggctttaaaaaaagatttaagtctatatcaagggcatcaattcaagttcatatcaatttcaagagacgctagtgatttaagaactaaaacatacgaaaatcctcattctttaatcttcataccccaaaaagatatccatgacgtaaaaacaatacttaatgtcatcctacatcttgatataacaaagcagaaagaaatacataactttcttaaaagcgaattacaagaagaacctgatgatgttctagttgagactaatatcgcagctgttataaatacgttagcaaaggaagatttttctaatattgaaactacagattttccgcaaccattcagtgtgaatgataaaatttcatttaataatttgaatgtggccgaatatcttattgatgattacaaaattcaccatggcaaagtttctcgtatttattcagagttcaatcaaatggggagaaacaccagtctttctgttttatctgcatttagaacaatctttattaaattaagttctcaatacactggtgatgaactattttttaaaataattgaagattctgtagaaacggtcagaaaaagtgcgaattttacacaaataccattagaggaattggaactatgtgttagtatacttgcagttgacgcgttcatacgctgtaaaatttttagagaccctaacggagtgaatgatgctgttaccaaaggacattcatcctaa

SEQ ID NO: 71799 - DNA, 1254 bp, Citrobacter koseri
atgctggaacaaatgggcattgctgccaaagcggcgtcctacaaactggcgctactctccagtcgcgagaagaatcgcgtactggaaaaaatagcggatgagctggaagcgcaaactgaaagcatcctgagcgctaatgctcaggacgttgccgaggcgcgcgaaaacggcctcagcgaagcgatgctggatcgtctggcattgacgccggcgcgcctgaaagcgattgccgatgacgtccgtcaggtgtgtaacctggccgacccggtcggacaggtgattgatggcggtctgctggacagcgggttgcgtctggaacgtcgtcgtgttccgctgggcgtcattggcgtgatttacgaagcgcgtcccaatgtgaccgttgacgtcgcctcgttgtgcctgaaaaccggcaacgcggcgattctgcgcggcggtaaagagacgtatcgcaccaatgcggcaacggttgcggtgattcagcaagcactggaagcctgcggcttacctgctggcgcagtccaggcgatcgacagcccggatcgcgcgctggtcaatgaaatgctgcgtatggataaatacatcgacatgctgatccctcgtggcggcgcgggcctgcacaagctgtgccgtgagcagtcgacgatcccggtgatcaccggcgggattggcgtatgccatatctttgttgacgacagcgcggagatcgagccggcgctgaagatcatcgtcaatgcgaaaacccagcgtccgagtacctgcaacacggtggaaacgctgctggtgcatcaggatatcgctgcgcgttttctgcctgcgctgagtaagcaaatggcggaaagcggcgtcacgctgcatgctgacgatgcggcgctggcccaactgaaatcaggcccggcgaacgtggtggcggtgaaagctgaagagtatgacgacgagttcctgtcgttggatctgaacgtgaaaatcgtggccggcctggatgacgctatcgcgcatattcgcgaacacggcactcaacattccgatgcgatcctgacgcgcactctgcgcaacgccgatcgttttgtgaatgaagtagattcgtccgccgtttacgtcaatgcttctacccgatttaccgatggcggacaatttggccttggcgcggaagtggctgtcagtacgcaaaaattacacgcacgcggcccaatggggctggaagcgctgaccacctacaagtggatcggcatcggtgacgataccattcgtgcgtaa

SEQ ID NO: 71800 - DNA, 1104 bp, Citrobacter koseri
atgagtgacagccagacgctggtggtaaaactcggcaccagtgtgctaacgggcggatcgcgccgcctgaaccgtgcccatatcgtagaacttgttcgtcaatgcgcgcagttacatgccgcaggccatcgtattgtgatcgtcacgtcgggcgctatcgccgccgggcgtgagcatcttggctacccggaactcccggcgaccatagcgtctaaacaactgttggcggcggtggggcagagtcgtctgattcagctttgggaacagctattctctatctacggtattcacatcgggcagatgctgctgacgcgtgcggatatggaagacagagagcgcttcctgaacgcgcgtgacaccctgcgtgcgttgctggacaacaatattgtccctgtcatcaatgaaaacgatgccgtggcgaccgctgaaataaaagtgggcgataacgacaacctttccgcgctggccgccattctggcgggcgccgacaaattgttgttactgaccgatcagcaagggttgtttaccgccgatccgcgaaccaacccgcaggctgagctgattaaagacgtgtacggcattgatgatgcgctgcgtgagattgcaggcgacagcgtctctggcctgggaaccgggggaatgggcaccaaattgcaggctgccgacgttgcctgtcgtgccggaatcgacaccatcatcgcagcgggcagcaagccgggcgtgattggcgatgttatggcaggcatttctgcgggaacccgtttccatgcgcaagcttccccgctggaaaaccgcaaacgctggatctttggcgcgccgcctgccggtgaaatcacggtggatgaaggggcgacatctgcgattctggaacgcggtagctcattattgccaaaaggcattaaaagcgtgacaggtaacttctcgcgtggtgaagtgatccgcatccgtaaccaggaagggcgcgatatcgcccacggcgtcacccgttataacagcgacgcgctgcgccgtattgctggtcaccactctcagcagattgacgcgattcttggctatgaatatggcccggttgctgtccatcgcgatgacatgattacccgttaa

SEQ ID NO: 71801 - DNA, 1053 bp, Citrobacter koseri
atgaaaaagagcactctggcattagtggtgatgggtattgttgcatcggcatccgtgcaggcagcagaagtgtataacaaaaacagtaataaactggacgtgtatggcaaagtaaaagcgatgcactacatcagtgatgatgacagcaaagatggcgaccagacttatatccgctttggctttaaaggcgaaacgcagattaacgatcagctgaccggttacggtcgctgggaagctgagttcgccggtaacaaaacagaaagcgaaggcggtcagaaaacccgtctggcttttgcgggtctgaagctgaacgatttcggttcgttagattatggtcgtaacctgggcgccctgtacgacgttgccgcgtggacggatatgttccctgaattcggcggcgacggccttgcacagaccgacaactttatgaccaaacgtgccagtggcctggcaacttaccgtaacaccgatttcttcggcgttatcgatggtctgaacttaaccctgcaatatcagggtaaaaacgaaaaccgcgacgtcaaaaagcagaatggcgacggtttcggcacatctctgagctatgacttcggcggcagcgacttcgccatcatcggcgcatacgccaattcagaccgcaccaatgagcagaacctgcaatctcgcggacaaggtaaaaacgcggaaggttgggcgacgggtctgaaatatgacgccaataacatttacctggcgactatctattctgaaacccgcaacatggcgcctatttccggtggtttcgccaataaagcgcaaaacttcgaagcggttgcccagtatcagtttgatttcggtctgcgtccttccctgggctatgttcagtctaaaggcaaagatattgaaggtatcggtgatgaagatatcgtgaaatatatcgatgtgggcgcaacatattatttcaataaaaatatgtccgcgttcgttgattataaaatcaaccagattgacgatgataacaagctgggcgtaagcagcgatgatatcgtcgcgattggtatgacgtaccagttctga

SEQ ID NO: 71802 - DNA, 399 bp, Citrobacter koseri
atgacgttaccgagtggacacccgaaaagtagattgatcaagaaattcactgcgcttggcccgtatatacgcgaagggcagtgcgaagataatcgtttttttttcgattgcctggctgtttgcgtcaacgtgaagccagcgcctgagaaacgtgaattctggggctggtggatggaactggaagcgcaggaaaaacgctttacctacagctaccagtttggcctgtttgacaaagaaggtaactggaccgccgtgccgattaaagagaccgaagtgattgaacgcctggagtacaccctgcgcgagtttcatgaaaaattgcgtgcactgctgacttcgctgaatctggcgctggaacccgccgataacttcaaagaaccggtgaagttaacggcgtaa

SEQ ID NO: 71803 - DNA, 1245 bp, Citrobacter koseri
atgtcacaggctaacctcagcgaaaccctgtttaaaccccgcttcaaacatcctgaaacgtcgacgcttgtccggcgcttcaatcacggaacgcagccgtccgtgcagtccactctggatggtaaaaacgtgccgcactggtatcgcatgatcaaccgtctgatgtggatctggcgcggtatcgatccgcgagaaatccttgatgtgcaggcgcgtatcgtaatgagcgaagccgagcgaaccgacaaagagctgtacgacacggtgattggctaccgtggcggtaactggatctttgaatggtcgaaacaggcgatggaatggcagcagaaagcctgccaggaaacagacccacagcgcagcgggcgccactggctgcacgcttcctcgctctacaacattgcggcttacccgcatcttaaaggggatgagctggcggagcaggcgcaggcgctggcgaaccgcgcgtatgaagaggccgcgcaacgcttgccgggctcgctgcgtgaaatggcgttttcgatccccggcggcgcgcctgtcactgcgtttttgcatatgccgaaaggggatggcccgttcccgaccgtactgatgtgcggcggcctggattccatgcaaacggactattacaccctgttcgaacgttacttcgcgccgcgcggtatggcgatgctgacgctggatatgccgtcggttggattctcgtcaaaatggaagctcacccaggactccagtctgctgcatcagcatgtgttgaaagcgctgcctggagtaccgtgggttgatcatacccgggtggcggcgtttggttttcgttttggcgctaacgttgcggtacgtctggcctacctggaagcgccgcgactgaaagcggtagcttgtctggggccggtggtccatgcgttgttaagcgattcacagcgtcaggggacggtgccggaaatgtatcttgacgtgctggcaagccgtctggggatgcatgatgcgtcagatgaagcgctgcgcgttgagctaaatcgttattcactgaaggtgcaggggttgcttggcagacgctgcccaacgccgatgttatctggcttctggaaaaacgatccgtttagcccggaagaggagtcccggctcatcacctcgtcatcttccgacggtaagctgatggagattccgtttaatccggtgtatcgcaattttgacactgcgctgaaagaaattaccggttggatcaatcacagattgtgttaa

SEQ ID NO: 71804 - DNA, 459 bp, Citrobacter koseri
atgagcgaaaaatacgtcgtcacctgggacatgttgcagattcacgcacgcaaactggcaagccgcctgatgccttctgaacaatggaaaggcattattgccgtcagccgtggtggtctggtaccgggcgcattgctggcgcgtgagttgggtattcgccatgtcgataccgtttgcatctccagctacgaccacgacaaccagcgcgaactgaaagtgctgaaacgtgcggaaggcgatggtgaaggtttcatcgtgatcgacgatctggtcgataccggcggtactgctgttgctatccgcgaaatgtaccctaaagctcatttcgtcactatcttcgctaaaccggctggccgcccgctggtggatgattatgtgattgatatcccgcaggacacctggattgagcagccgtgggatatgggcgtggtattcgtcccgccaatctctggtcgctaa

SEQ ID NO: 71805 - DNA, 1458 bp, Citrobacter koseri
gtgtctgaactgtctcaattatctccacaaccgctgtgggatatttttgcaaaaatctgttctattcctcatccgtcctaccatgaagagcagctcgctgaacacattatgggctgggccaaagagaaaggtttccacgctgagcgcgatcgggtcggtaatatcctgattcgtaaacctgccaccgcaggtatggaaaaccgcaaaccagtggttttgcaggcgcacctggatatggttccgcagaaaaacaacgacaccgtacacgacttcaccaaagatccgatccagccttatattgacagcgagtgggtaaaagcccgcggcaccacgctgggcgcggataacggcattggtatggcttccgcgctggccgttctggctgacgacaacgtcgcacacggcccgctggaagtgctgctgaccatgacggaagaagccggtatggacggcgcattcggccttcagccaggctggctacaggccgatattctgatcaataccgactccgaagaagaaggtgagatctacatgggctgtgcaggcggtatcgattttacctctaacctgccgctgtcccgtgaagccattccggcgggcttccagagctttaaactgacgctgaaaggcctgaaaggcggccactccggcggcgaaatccacgtcggtctcggcaatgccaacaagctgctggtgcgcttcctggcggatcatgctgaagaactgggtctgcgtctggttgatttcaacggcggtacgctgcgtaacgctatcccgcgtgaagccttcgccaccgttgccgtagcggcagataacgtcgatgcgctgaaaacgcgggtgaacacttatcaggagatcctgaaaaacgaactggcagagaaagagaagaatctggtggttctgctggaagcagccgctaacgacaaagcggcgctgactgccccgtcccgcgacggctttatccgtctgctgaacgccacgccaaacggcgtgattcgcaattccgacgtagcgaaaggcgtggttgagacgtccctgaacgtgggcgttgtgaccatgaccgacaacaacgtggaaatccactgcctgatccgctcgctgatcgacagcggtaaagactacgtggtgagcatgctggattcactgggtaaactggctggcgcgaaaaccgaagcaaaaggcggctatccgggctggcagccagatgcgaactcgccggtaatgcacctggtgcgtgaaacttaccagcgtctgttcaataagacgccgaacatccagattattcacgcgggtctggaatgcggtctgttcaaaaaaccgtacccggatatggacatggtctctatcgggccaaccattaccggcccgcactctccagatgagcaggttcatatcgaaagcgtcggtcactactggcggcttctgactgaactgctgaagtctattccggcgaagtaa

SEQ ID NO: 71806 - DNA, 1056 bp, Citrobacter koseri
atgcgcaaaatcatacatgttgatatggactgtttttacgcggcggttgaaatgcgcgataacccggccctgcgtgatattcccattgctatcggcggcagccgcgagcgcaggggcgttatcagtacggcaaattatcccgcccgcaaatttggcgtgcgcagcgcgatgccgaccggtatggcgcttaagctttgcccgcacctcacgctattgccggggcggtttgaggcgtataaagaagcgtcgcagcatatccgtgaaatcttctctcgttatacctcgcgtatagagccgctttcgctggatgaagcctatctggacgtcaccgacagcacttattgccacggctccgccacgcttatcgctcaggaaatccgtcagacgatttttaacgaactccagctcaccgcatcagcaggtattgctccggttaagtttctggcaaaaattgcttctgatcttaataaaccgaatgggcaatatgtgattacccccgccgatgttcctgagtttctcaaaaccttaccgctggggaaaattccgggggtgggtaaagtgtctgcggccaggctggaaacgatggggctgcgtacctgtgaagacgtgcaaaagtacgatctggcgatgttactcaagcgctttggtaagtttggccgcgtgttatgggagcgtagccaggggattgatgagcgggatgtgaacaatgaaagactgcgtaaatcgataggcgttgaacgtacgctggcggaggatattcacgaatgggcggaatgcgaggcgatcattgagcggttatatccagagctggaaaggcggctggcaaaagtgaagcctgacctgctcatcgcccgtcagggggttaaattaaaatttaacgatttccagctgaccactcaggagcacgtctggccgcgtttaagcaaggacgatttaatcacgacggcgcgtaaaacctggaatgagcggcggggagggcggggcgtgcggctggtagggttacacgttacgctactggacccgcaactggaaagacagcttctgctggggctgtga

SEQ ID NO: 71807 - DNA, 741 bp, Citrobacter koseri
atgcgtaaaatcgcattttttcttgcgatgcttctgatcccgtgcgtctcatttgccggtttgctaagcagtagcagcccaaccacgccagtcagcaaagaatataagcaacagttgatggggtcgcctgtctatattcagatctttaaagaagagcgtacgctcgatctgtacgtcaagatgggtgagcaatatcaattgctcgacagctacaaaatttgcaactattccggtggcttaggccccaaacagcgccagggtgactttaaaagcccggaaggtttttacagcgtccagcgtaatcagctcaaaccggacagccgtttctataaggccattaatatcggttttccgaacgcctatgaccgcgcacacggttatgaaggtaagtatctgatgatccacggcgcctgcgtctctgtcggttgctatgccatgaccgacagcggcattgatgagattttccagtttgtaaccggcgccctggtattcgggcaatccagcgtacaggtgagcatctatcccttccgcatgaccgatgcaaatatgcagcgccataagtattcgtattacaaagatttctggacgcagctaaaaccgggctacgactactttgagcaaacccgtaagccaccaacagtttccgttgttgatggccgttacgtggtcagcaaaccgttgagccatgaagtggttcagccacagctggcgtcaaactatacgctccccgagacaaaataa

SEQ ID NO: 71808 - DNA, 768 bp, Citrobacter koseri
atgtgcgaactgctcgggatgagcgccaatgtgccaaccgatatttgctttagtttcaccgggctggttcagcgtggtggaggaaccgggccgcacaaagacggctggggtattacgttttatgaagggaaagggtgtcgcacatttaaagatccgcaacccagttttaattcgcccatcgccagactggtgcaagactatcccatcaaatcctgttccgtcgtcgcccatattcgccaggcgaatcgtggggaggtggcgctggaaaatacgcatccgtttacccgtgagctttgggggcgtaactggacgtatgcgcataacgggcagctcaacggctacaaatcgcttgaaaccggtaattttcgcccggttggtgagacggacagcgaaaaagcgttctgctggctgctgcataagctgacgcagcgttatccgcgcacgccgggcaatatgatggcggtatttaaatatattgcgacgctggcagaagaactccgtaagaaaggtgtcttcaacatgctgctgtcagacgggcgctatgttatggcctattgctcgaccaatttattctggatcacccgccgcgcgccgtttggcgttgccacgctgttggaccaggatgtggaaatcgacttcagttcacaaaccacaccgaatgatgtggttaccgtgattgcaacgcagccgctgacgggaaatgaaacctggcaaaagattatgccaggcgaatggcgattattttgtctcggggagcgtatagtttga

SEQ ID NO: 71809 - DNA, 579 bp, Citrobacter koseri
atgtaccaggatcttattcgtaacgaactgaacgaagcggcggaaacgctggccaattttttaaaagatgaagccaatattcacgctattcagcgcgcggcggtcctgctggcagacagttttaaagcgggtggcaaggtactttcctgcggtaacggcggctctcattgcgacgcgatgcattttgccgaagagctgaccggtcgctaccgtgaaaaccgtccaggctacccggcgatcgctatttctgacgtcagccatatctcctgtgtcagtaatgattttggttacgactatgttttctctcgctacgttgaagcggttggccgtgaaggggatgtgctgttagggatctcaacttcgggtaactctggtaacgtgattaaagcgattgccgcagcacgcgagaagggaatgaaagtcatcaccctgaccgggaaagacggcggtaaaatggcagggacggcggatattgaaattcgcgtgccgcatttcggttatgctgatcgtattcaggaaatccatatcaaagtgattcatatcctgatccaattgatcgaaaaagagatggttaagtaa

SEQ ID NO: 71810 - DNA, 138 bp, Citrobacter koseri
atgaatgtaattgacagatgcagtgtaccggatagcgcagaaagcgagaagcacaagccacaggaatgccgctggcttttgattttttgtgccggtgaaaacggcaacaatgtgagcttcgttgtaattattttgtaa

SEQ ID NO: 71811 - DNA, 2448 bp, Citrobacter koseri
atgatgattttgagtattctcgcaacggttgttctgctcggcgcgctgttttatcaccgcgtgagcttattcctcagcagcctgattttactcgcatggacagccgcgctgggcgttgctggcctgtggtctatctgggtgctggttcctctggccattatcctcgtaccgtttaacgttacgccgatgcgtaagtcgatgatctctgcgccagcgtttcgtagcttccgtaaagtgatgccgccgatgtcgcgcacggagaaagaggccattgatgccggtacaacatggtgggaaggcgatctcttccagggcaaacctgactggaaaaaattgcacaactatccgcaaccgcatctgactgctgaagaacaggcgttcctggatggcccggtagaagaagcctgccgtatggcgaatgatttccagatcacgcacgaattagccgatctgccgccggagctgtgggactacctgaaagagcatcgcttcttcgcgatgatcatcaagaaagagtacggcggcctggagttttcggcgtatgcgcagtctcgcgtgctgcaaaaactctccggcgtttccgggattctggcgattaccgtgggcgtgcctaactcattaggcccaggtgaactgctgcaacactacggtactgaagagcagaaaaaccattacctgccgcgtctggcgcgtggtcaggagatcccttgcttcgcgctgaccagcccggaagcgggctccgatgcgggcgcaattcctgataccggcgtcgtcggcatgggcgaatggcaaggccagcaggtgctgggtatgcgcctgacctggaacaaacgttacattacgctggcccctatcgcgaccgtgctgggcctggcctttaaactctctgacccggaaaaactgctaggtggcgaagaagaattgggtatcacctgtgcgctgatcccgacctcaacgcctggcgtagaaattggtcgccgtcacttcccgctgaacgtaccgttccagaacggacctacgcacggcaaagatatttttgtgccaatcgactacatcattggcgggccgaagatggcaggccagggctggcgtatgctggtggaatgcctgtcggtaggccgtggtatcacgctgccgtccaactcgaccggcggggttaaatccgtcgcgctggcaaccggggcatatgcccatattcgtcgccagttcaaaatctctatcggcaagatggaaggtattgaagaggcgctggcgcgcattgccggtaacgcctacgtaatggacgccgcagcgtcgctgattacctacggcattatgctgggtgaaaaaccggcggtgctgtcagctatcgtcaagtaccactgtacccatcgcggccagcagtccatcatcgacgcaatggacattaccggtggtaaaggcattatgctcggcgaaagcaacttcctggcgcgttcttaccaaggggcgcctatcgccatcaccgttgaaggtgcgaatatcctgacccgcagcatgatgatcttcggtcagggggcgattcgctgccatccgtatgttctggaagagatggccgccgcacaaagcaacgatgtgaatgcgttcgacaatctgctgtttaaacatatcggccatgtcggtagcaacaaagtacgcagcttctggctcggtctgacccgcggcctgaccagctacaccccaaccagcgacgcaacgaaacgttattaccagcaccttaaccgactgagcgccaacctggccttgctgtctgatgtctcaatggcggtgttgggcggtagcctgaaacgtcgtgaacgtatctccgcacgcctgggcgatattttaagtcagctgtatctggcctccgccgtactgaaacgctatgacgatgaaggccgtaacgaagccgatctgccgctggtgcactggggcgtacaggatgcgttgtatcaggcggagcaagcgatggatgaactgctgcaaaacttcccgaaccgttttgttgcgggtctgctgaacgtggtgatcttcccaaccggtcgtcactaccttgccccttccgacaagctggatcataaggtcgcgcagattctacaagtaccgagcgcaacccgttcacgtatcggtcgtggtcaatacctgacgccgagcgagcataacccggtcggcttgctggaagaagcgctgctggacgtgatagcagcagatcctatccaccagcggatctgcaaagagttgggtaaaaatctgccgtttacccgtctggatgaactggcgcataacgcgctggcaaaagggctgattgataacgatgaagccgccattctgatgaaagcggaagaaagccgtctgcgcagcattaacgttgatgattttgatgccgacgcgctggcgactcagccggtaaagttgccagagaagcaagtgcgtaaagtcgaagccgcttaa

SEQ ID NO: 71812 - DNA, 771 bp, Citrobacter koseri
gtgcctggtttgaaaattaccctgttgcaacaaccgctggtctggatggacggtccggccaatttacgtcattttgacagactgctggaaaccatcaccggacgtgacgtcattgttttacctgaaatgtttaccaccggttttgcaatggaagccgcacttcagtcactcccgcaagaagatgcgatcgactggatgcaggccaaagcacaacagactgatgccctgattgcgggcagcgctgcgttgcaaaccgaacgtggcccggtaaaccgttttttactggttgaacctgacggcaacgttcattgctatgataaacgccatctgttccgcatggcggatgaacatcatcattaccaggcgggcgataaacgtgttgtcgttgaatggcgcggctggcgtattctgccgttagtgtgttatgacctgcgttttccggtatggtcccgcaatcttaatgattatgacctggcgctgtatgtagcaaactggcctgctccgcgttcgctacactggcaggcgctgctcaccgcacgcgcgattgaaaaccaggcctatgtagcaggctgcaaccgtgttggcactgacggcaacgggcaccattaccgtggggacagccgggtgattaacccgcaaggagagattatcgccaccgccgaaccacatcaggcgacacgtattgatgcagacctgtcgctcacggcgttacgggaataccgcgagaaatttccggcatggcaggacgccgacccgttcacattacgctga

SEQ ID NO: 71813 - DNA, 741 bp, Citrobacter koseri
atgaccgctatgagcactgcaattacacgacagatcgtcctcgataccgaaaccaccggtatgaaccagatcggcgcccactacgaaggccataagatcattgagatcggtgcagtcgaggtcgtgaaccgccgccttaccggcaataacttccacgtctatctaaaaccggaccgactggtggacccggaagcgttcggcgtacacggtattgcggatgaatttctgcttgataaacccgtttttgccgatgtggttgacgacttcctggagtatatccgtggcgcggaactggtgatccataacgcatcgtttgatatcggctttatggattatgagttcgccaagctcagtcgtggtattccgaaaacaagcgagttctgcaaaatcaccgatagcctggcgctggcgaggaggatgttccccggcaagcgtaacagccttgatgcgctttgttcacgctatgagatagataacagcaaacgtacgctgcacggcgcattgctcgatgcccagattctggccgatgtctatctggcgatgaccggcgggcaaacgtcgatggccttctcaatggaaggggaaacgcagcaacagcagggtgaagcgacaatccagcgtattgttcgccaggccagcaagttacgcgttgttttagcgactgatgaagagctgatggcgcatgagtcgcgtctcgacctggtgcagaagaaaggcggaagttgcctctggcgggcgtaa

SEQ ID NO: 71814 - DNA, 468 bp, Citrobacter koseri
atgcttaaacaggtagaaattttcaccgatggctcttgcctgggaaatccaggtccaggtggttatggcgctattttacgctatcgcggccatgaaaaaacctttagtgaaggatatagcctcacaactaacaatcgcatggagcttatggcggccatcgtcgcgctggaagcgttaaaagaacattgtgaagtcacattaagcacggacagccagtatgtccgtcagggaattacgcaatggatccacaactggaaaaagcgcggctggaaaacagcagagaaaaagccggtaaagaatgtcgatctctggaagcgccttgatgccgcgctgggccaacatcaaatcaaatgggaatgggtaaaaggccatgccggtcatcctgaaaacgaacgttgcgatgagctggcgcgtgcggcagcgatgaatcctacgcaggaagacgttggctatcaggcagaggcttaa

SEQ ID NO: 71815 - DNA, 723 bp, Citrobacter koseri
atgaaaccggcaaggatccctcaaacagtcatagctccccatcgctggggcgatttgccctggggtgaatactatcgtgaggcgctggagcatcagcttaacccgtggttcgccaaaatgtatggttttcatttgcttaaaattggtaatttaagcgcagaaatcaactctgaagcgtgcgccgtttctcatcaagtcaatatttccctgcaaggcgcgcccgtccaggttcaggccgatcccttacatcttccctttgccgataagtctgttgatgtttgtctgttggcgcatacgctaccgtggtgcgtcgacccacatcggttactgcgtgaagccgaccgggtgttaattgatgatggctggctggttttgagtggttttaacccgattagtctgatgggcctgcgtaagctggtgcccgtcttgcgtaaatcttcaccttataacagccggatgtttacgctgatgcgccaactggactggctctcgttattgaattttgaagtgctgcactacagccgttttcatgttttaccctggtcaaagcaagggggaaagctgctgagcacgcatattccggcgctgggctgcctgcaactgattgtggcgcgtaagcgaaccatcccgcttacgcttaacccgatgaaacaaaataaaagcaaagcgcggattcgccaggccgtgggcgcgacccggcaataccgtaagccagacgcttaa

SEQ ID NO: 71816 - DNA, 756 bp, Citrobacter koseri
atgaatcttaacagtattcccgcatttcaggacaattacatctgggttctgagtaataatgaaggacgttgtctgatcgttgatcctggcgaagcggctcccgtgctaaacgccatcaaagagaagaactggcagccggaagcgattttcctcactcaccatcaccacgaccatgttggcggcgtgaaagaacttcttcaacattttccgcacgtagtggtttacggaccggcagaaacacaagataagggaaccacgcgcgtagtcaaagatggcgatagcgccctcgttttagggcatgaatttagtatatttgccacaccgggtcacactttaggacatatctgttactttagccacccttaccttttctgcggcgacacccttttctctggaggttgtggacgcctgtttgaaggtacagcctcacagatgtatcaatcacttaaaaaaatcagtgcccttcctgacgatacgctgatttgttgcgcacatgagtatactttagcaaacatgaagtttgcattgagcatcctaccgcacgattcgttcataaatgaatattatcgtaaagttaatgagttacgcgcaaaaaaccaaattacactccccgtaattctgaaaaatgagcggaaaaataatatttttttgagaacggaagatcctgatttaattaatgaaataaacaaagaaacaaagttgcaacaacctgaagagcgttttgcctggttaaggtcaaagaaagacagcttctga

SEQ ID NO: 71817 - DNA, 1221 bp, Citrobacter koseri
atggacgatgggacgtctctcgcgccggatcaagacttgtgggctttcattggcgacgagctaaagatgggaattccggagaacaaccggatacgcgaacagaaacagaagtatttacgcaataagagctatctccacgatgtaactttacgggcagagccgtatatgtactggatagccgggcaggttaagaaacgtaacatgccgatggaactggtactactacccatagtggagagcgcttttgacccacacgcaacgtctggcgccaatgccgcaggcatctggcagatcattccgagcacagggcgcaattatggtttgaaacagacccgcaattatgatgcgcgtcgtgacgttgtggcttccacaacggccgcgttagacatgatgcagcgtctgaataagatgtttgatggcgactggctgttgaccgttgcagcttataatagcggcgaaggtcgcgtgatgaaggcaatcaaagcgaataaggcgcgtggcaaagccaccgacttctggtcgctttcgttacctcaggaaacgaagctgtacgtgccaaaaatgctggcattgagtgatattctcaaaaacagcaaacgctatggcgtgcgtctgccaaccacagacgaaagtcgtgcgctggcgcgcgttcgtttgagcagcccggttgagatggcacaagttgcagatatggcgggcatgtccgtcaccaagctgaaggcgtttaatgctggcgtgaaaggctctacgctaggcgttagcggcccacagtacgtgatggtgccaaagaagcatgcagaacaactgcgtgagtctctggcttcaggcgaaattgctgccgtacagtctacgctggtcgcagacaatacgccgctgaacagccgtagctacaaagttcgctctggcgatacgctttccggcatcgcggcacgccttggcgtgagcacgaaagatttgcagcagtggaatagtctgcgcggatctaacctgaaagtgggccaaagtctgacgattggcgcaggcagtagcgcacagcgtctggccaacaacagcgatagcattacctatcgtgtgcggaaaggtgattcgctttcgagtatcgccaaacgtcacggggtgaacatcaaagatgtgatgcgctggaacagcgatacagcaaatctgcaaccaggcgatcagctaacgttgtttgtgaagaacagcagcacacctgactcctga

SEQ ID NO: 71818 - DNA, 771 bp, Citrobacter koseri
atgacaacacactcccaccatgacaacgtcgaaaagcagtttggctctcaggcaaatgcctatttaaccagcaccgttcatgcttctggtcgtgacttacagcgactggcggaacggctgtcctctttttcgcatgccagcgtactggatatgggatgtggcgccgggcacgccagttttattgctgcgcagaacgtaaagcaggtggtggcttacgatttgtcttcgcagatgcttgaggtcgtcgtacaggcggcgaaagagaaaggtttagaaaatatcgcgacccgacaggggtatgctgaaaatctgccgtttgaggatcacgcctttgatgttgtgattagccgctattctgcacatcactggcatgatgttgggctggcactgcgtgaagtcaaccgggttctgaaagcgggtggcgtgttgattatgatggatgtgatgtcgcctgggcatccggtgcgcgatatctggttacagactgtagaagcgttacgcgacacttctcatgtacgtaactactccagcggtgagtggctgtccctggtgaatgatgcgaatctgattgtcgatacgttgttaacggaccgcttaccgctggagttcagttcatgggtaacgagaatgcgtacgcctgcggcgctggttgaggctattcgtttgtatcagaagagcgcatccgcggaggtaaaagcgtatttcgctttgcaggaggacggttcgtttaccagcgatacgattatggttgaggcgcataaagcggcataa

SEQ ID NO: 71819 - DNA, 780 bp, Citrobacter koseri
atgcgctatattgccggacaacccgccgtgcggattttaccgcctgggtcgtttgcgagtattggccaggcattacccgccggagtgccgttaagcagtgaagaccgcattcggattctggtgtggaatatctttaaacagcagcgggccgaatggttatcggtgctgaaaaactttggcaaagatgcgcacctggttttattacaggaagcgcaaaccacgcccgaactggtgcagtttgcgaccgctaactatcttgcagccgatcaggttcccgcttttgtgttacctcagcatccttcgggtgttatgacgctttctgctgctcatcccgtctactgctgcccgctgcgcgaacgtgagcccatcttacgtctggcgaagtcagcgctggtgaccgtttatcctttgcctgatacgcgattgttgatggtggtaaacattcacgccgttaacttcagtcttggggtggatgtgtatagtaagcagttacttcctattggcgatcaaattgcgcatcacagcggcccggtgattatggccggtgattttaatgcctggagccgaccacgaatgaacgcactgtatcgctttgtgcgcgagatgtccctgcggcaggtgcgttttactgacgatcagcgccgacgggcgtttggccgtcctcttgattttgtgttttatcgaggtttgaacgttagcgaggcttccgtactggtcacgcgcgcgtccgatcataacccgctactcgttgaattcagtcccggcaaacctgaacaataa

SEQ ID NO: 71820 - DNA, 915 bp, Citrobacter koseri
atgaaagctacatcagaagaactcgtgatatttgttgccgtagtcgaaagcggtagctttagccgcgctgcggagcaacttggacaggcgaattctgcggtcagccgggcagtcaaaaagctggaaatgaaactgggcgtgagtctgcttaatcgcacaacacgccagttgagtctgacggaagaaggcgaacgttattttcgtcgcgtgcagtcaatactacaagacatggccgccgctgaaacggaggtgatggaaacgcgaagcactccacgcggcctgttgcgtatcgacgccgccacgccggtgatactgcactttctgatgccgctggttaagccttttcgcgagcgttatccagaaatgacgctatcactggtttcctcagaaacattcatcaatctgattgaacgaaaggtcgatgtcgccatacgtgccgggacgctgaccgattcgagcctgcgcgcccgcccgctctttaccagttatcgaaagattatcgcgtcgccggattatattgcccgctttggcaaacccgaaaccattgaagagttaaaacagcatctatgtctcggattcactgaaccggcttcgctcaatacatggcctgtagcatgtagcgacggacaactccatgaaatcagcagcggtctgtcgtcaaatagcggtgagacgctcaagcagctttgtctgagtggtaacgggatcgcctgcctgtctgactatatgattgataaagaaatcgcgcggggagagcttgtggaactgatggccgataagcgcctaccggtagagatgcctttcagtgccgtttattacagcgatcgtgcggtcagtacccgcattcgggcattcatcgattttctcagcgatcatgtaaaaaaagcccccgaaggagctgtaaaagagggttaa

SEQ ID NO: 71821 - DNA, 804 bp, Citrobacter koseri
atgacaatccctgcatttggtttaggtacttttcgcctgaaagacgatgttgttatcgcatcggtcaaaacagcgctggaactgggctatcgtgcaattgatactgcacaaatctatgataatgaagcggctgttggtcaggcgattgccgaaagtggcatcccgcgcggcgagctgtacatcaccaccaagatctggactgaaaatctcagcaaagagaagctgatcctgagtctgaaaaaaagtctggaaaaactgcgcactgattatgtggatctggcattgatccactggccgtcaccaaacgatgcggtatctgtcgaagagttcatgcaggcgctgttggaagcaaaagagcagggactgacgcgcaaaatcggtatttctaactttactattccgttgatggaaaaagccattgccgctgtcggcgcagaaaacattgcgactaaccagattgaactgtctccgtatctgcaaaaccgcaaggtcgtggattgggcaaaacagcatggaattcacatcacctcttacatgacgctggcttatggtaaggcactgaaagatgaagtgattgcccgtattgccgctaagcacaatgcgacttcggcgcaggtgatccttgcatgggcaatgggagaaggctactccgtaattccttcttccactaaacgtgaaaacctggcaagcaacctgctggcgctcgatctgcatctggatgccgaagataaaaaggcgattgccgcactggattgcaacgatcgccttgtcagcccggaaggtctggcgccagagtgggactga

SEQ ID NO: 71822 - DNA, 927 bp, Citrobacter koseri
atgtcaaaaaaatatcagccattgcttataactcattatatgtcaacatgggtcactataacggaagcagttgagatcactaccaaagccataaaacaaaaaattactcctagcgatatttatcgtcatgccttgagtggcaacatcctactatcggtctatttccagtctcctgtgatacttaagaagatacaaacttttaatggaaaaataaaattcaggcagtttgagggagacctacttgataaactatgcatgcttgacagggacggttttatttatggtcaaaatttaagactctgtacagaagccagatatgtttgtcctgtgcaacaaattatagatacccccctgataggctatgaatatgttttgattcagcgcatactggcacgtgaacttaaattcccctccccaattgtgggggcaagaaaaactaaccatggtattatagtaagattttcagaggagctttttcaaattttcgaaacgatgagttggaaagaacgcgtagaaaaacaaatttccagactacctaaaaacacagcattagatgtcataaaaaaactaacagaagtgacgaccataaaatataatcacaatgggtgctttcctctttatacattaccgcctgatgcctgttttgttattcgccacaccgaagtcgaaagactaattaatttatacaaaaaaagggagagtcatcccatttcaccttcccgtatgacaacaccgttatcacgcctgttttggctggcctgcaagcacaatgatactatcagcccactgctgaatcatccctataagctcctttctatttttgaacaatgggcatcagacgatggcatcggggaaaaactggacgctgaaacactgaaaaatgcgctgaagcgtggttcgccatcttcgacatccttatccggctaa

SEQ ID NO: 71823 - DNA, 186 bp, Citrobacter koseri; identical to SEQ ID NO: 15707

SEQ ID NO: 71824 - DNA, 183 bp, Citrobacter koseri
atgaacattaatatcccggcactcataaacttcgatcctgcaggtataaaaaaaagcacctgcatgtatatttcagacctgcccggtattgtgctatatgacactataccattcactgaatattcagctgaattactgagcacttattcagttaaggagtcaatttcatgcttccatccctga

SEQ ID NO: 71825 - DNA, 582 bp, Citrobacter koseri; identical to SEQ ID NO: 15705

SEQ ID NO: 71826 - DNA, 129 bp, Citrobacter koseri
atggaagaaaagctcacagggaatgagcttgaaatgctttatgccgcagcagattatcgccgcgcagagattgtaatgaaccagtactttgataaggttcccggtaatgtctggaaatatgtcagataa

SEQ ID NO: 71827 - DNA, 234 bp, Citrobacter koseri; identical to SEQ ID NO: 15702

SEQ ID NO: 71828 - DNA, 711 bp, Citrobacter koseri
atgctttccaccacagcctttctggcgatagccatgcagtgcgccgccagcattcatccgtccacggcattcgacgtggcacgggtggaatccggttttaacccttatgccatcgctgagattgtcccgaaggccggcccctctttcggcgatcaacacattatttctcacctgccagccagccggggagatgcagagcatattctccgtcgcctgtcagcacaggatcgccgttactctgtcgggctgatgcaaatcaccagcaccaatttccgccattatggtgtgtccgccacagagctacttgatccctgtaccaatctgtccgtcttcgaacacattctcagagactgctaccggcgcggcggcacgctgaaaagggcgctgagttgttattattccggcaatttcagtaccgggcaacaacctgaaacggcgttttccggaacgagctatatccagcgaatcggttatccgccgggatcatcccgctatgcggtccccggaacccgtgaggacaaatcatcagttgccgttcccctgaaaaccgcccctgccagtgactcatcccgtcaccacgtgatctggcccggagtcgtcgtccgtggcgtccctgcgaaactccgccaagaaaaaatcttcatcgcaccgttctccgcgccgtcagtgcgccggagtttctccctgtcaccccgtgaggaggaggaataa

SEQ ID NO: 71829 - DNA, 294 bp, Citrobacter koseri; identical to SEQ ID NO: 15700

SEQ ID NO: 71830 - DNA, 2739 bp, Citrobacter koseri
atggcaaagctgctcaaggcaatgaaacgcccggcggcgctgtggggggtgccaatggtgcccctgctggctgtcacgggtgtaaccatcatcgttgctatctggacttccgtcgctctcctgttcttacttcctgtgcaatttctggtgatgaagtcccttaccagaaatgaaccgatgcggttcaatctgattgccgtatggctgagagcgaagggaaagccggtagcaaaccgtttatttggcgcaacaacatttatgcccgttgagcatgatgaggttgatatcaaggagtttctcgacgccatgaaactaaatcagtgtgccaccatcaagaagtacatcccgtactcatcgcacattcatcagcatgtggttcgttcccctaagagcgatctgtactgcacctgggaattgatgggaacgccgttcgactgcgagtctgacgagtcgctccagttcgggacgaaccagttacacgggctaatccgctcattcgaaggtatgccagttactttctatatccataacgaccgcaatacgtttaccgacaatcttcataaagattccggcaacccgtatgccgatgaagttagccgtctttactacgcttctgtcggtctgttccggcgcaaccgcctgttcctgacggtctgctatcgcccgtttgtcagccttgaaaaagcagaacgcaaacggatgaaagacagccagaaactaaaggagctggacggtgctttgctggaaatgctggaaataaaaagcacgctcgataccgcgctgtcgcgctatggtgcgcgacctctcggtacgtttaccgaaggaaacgcggtgttttcgtcgcaactggctttctatgaatatctgctaacgcaccagtggcgaaaagtgcgcgtcacccgtaccccggcctatgacgtgatgggggcggcggcgttgttcttttcggctgaatccgggcagataaaccacgccaacggtacgcaatatttccgggggctggaggttaaagagttctccgaagagaccgccacggggatgatggactcccttctttacgccccctgcgattacgtgatcacgcagtcctatacctgcatgtcacgcgaggaagcgaagaaagccattaagcgtacccgtcgccttttgatgagtgccgacgacgatgctgtttcccagcggctggatctggatgtggcgcttgacctgctgacatcggggaaaatcgcttacggcaagcaccatttttccatcatggtgtattccccgtcgctggaaagcctggttgctgatacgaatgaaatcagtaacgcgctgaacaacatagggataacgcctgttccggcagaaatatcgctttcagcggcgtatatggcgcaactgccaggcaactacaacctgaggccacgtaaaggggagctgagtagccagaactttgtggagctggccgcgctccataatttctatccgggcaagcgcgataaagccccctggggggatgcgatggctttactgcgcaccccgtcaggcgatggctactatatcaacctgcataacacactggcagataaggacgaattcaacgagaagaacccggccagtacctgcatcctcggtacgaacggttcgggtaaaaccatgttgatgacgttctttgagatcatgcagcagaaatacgggcgcgaggatagcttctccccggatgccaaaaccaaacggctgacaaccgtttacctcgataaagaccggggcgcagagatgaacatccgggcgctgggtggccgttactatcgggttatcagtggtgagtctacagggtggaacccgttctcgttgccagcaaccaaacgcaatatcaatttcatcaagcaactgatgaaaatcctttgtacccgtaacggctcgacgatctccccacgcgatgaacgacgtctgagtgatgcggtcaatgctgtgatgaatgacgagccgcaatatcgcgtctacggcattacccgaatgctggaaaatttgcctgagccggctacgaaagaagcccaggaaaacggccttagcattcggttgtcacagtgggcgcagggcggtgagttcggctgggtgtttgataacgagtctgacacgttcgatatcagcaactgcgataacttcggcatcgacggaacggagttcctggacgatgcaagcgtatgtgcgccaatctcgttttatctgctgtaccgcattaccagcctgcttgacgggcgacgcctggtcattttcatggatgaattctggaagtggttacgcgacccggtgtttaaggactttgcttataacaagctgaaaaccatccgtaagctgaacgggatgctggtcgtcggtactcaatccccggcagagatcatcaaagatgatatcgccccggcagtgattgagcagtgcgggacacagattctggcggcgaaccccaacgccgaccgcgcacactatgttgacggtatgaagtttgaaccggaagtgttcgacgtggtgaaagggcttgacccgcaagcccgccagtatgttgtggtgaaaaatcagttcaagcgcggcgataccaaacgttttgccgctcgtgtcacgctcgacctgtcgggtatcggcagatacaccaaagtcatgagcggcgatgcccccaacctcgaaatattcgaatcgatttaccgggaaggaatgcagcctcatgaatggctcgatacctacctggctaaagcgctctga

SEQ ID NO: 71831 - DNA, 708 bp, Citrobacter koseri; identical to SEQ ID NO: 27078

SEQ ID NO: 71832 - DNA, 243 bp, Citrobacter koseri
atgttatcaaaaaaaattattttaatttcgacgatcaccctgtgcttttctattgttggatgcaaagaggaagctaaaacaacaaaatggtatagggatcaccctgacgaattaaaactagtttatgaaaagtgccaaaagagtggtgacgcttctgaaaattgcaagaatgcaaatgaagcccactatcaaatcaagcagctaaacgcaccaactccagacttaaataatttagaggagtaa

SEQ ID NO: 71833 - DNA, 1074 bp, Citrobacter koseri
atgagtggcggtctttttgttggggttgaaaaatacctgataggaggaattacagacgccacaaagggattgatgatgtcgtactcttctatgatgatggggctggcagcagcgtcagctaccatctacatcatgtggcgtggataccagactttggctggtaagctatctacgcctatggaagacacgatgtgggacatcatgaggatggcgatcatcctgtcctttgtggctaatttaggcggctacctcgatggcgttattgatgccataaacggaataaaggagggtttttctggtagtgataatatatggcagttattagacaccctatggaataaggctaaagtgttagggaaaacgctacatgacatggataattctacatatgtaaaagatgagggaatgactgctcaattttgtgtatggcttggaatattcgcacttatgattctagcgggctttgtttcaatggttgccgaagtaatgattctactattaggaataactgcacctattttcatattctgccttatgtatggtttcctccgccccatgttcaataactggttgcaaaatatatttgcaggaatattaacaattctatttgccgctctctcattgagaattgtagtgaattacttgaatctcgttcttaataaggcgacgaaggtagcagacagttcaacaattgttgaacttggtgctcaagtctgccttgcaggtattttcgctgcaatactggtgtatatttccgctaaggtagccgcagctctggccggggcaagcgctaccgtatccatgcaggggctggccgctgtaggtatcggtgcggctgcttttggtgccgggaagctagccgggggtgcagttaaagaaaccaaacgttccgcccaggacaacattcagggctggaaggatgcgaatgcaggtaagcccggcaagcccggaggtgagttaggctataacgcatctaaagcgcggaagtacgcgattgagcagatgatagcccggaacgaagcgcggaggctggcacagtcgagagaatccgcggttaagaagttcaacagctag

SEQ ID NO: 71834 - DNA, 138 bp, Citrobacter koseri
atgaaacgcttgattgcgctggctttgctgtgcgcgctttctggctgcgcccagaacacgcctccctctgcctttagcggtaagggagaacccgtaaacacccctcaaattatggcggagttaaacagtcatgagtga

SEQ ID NO: 71835 - DNA, 684 bp, Citrobacter koseri
atgagtgaacagaaattaatagctgaatcccgcacttttgagcagcaaatgattgagcgggataaacgcgccacaaaagccggttttgttgttggcggtatgggtctgctgattgcggtactggcgctcgtcgccgtggtcgtgatgttgccgctgaaacagacggacgttgagctgtataccttggataaccacacaggacgggtggaacacgttacccggacatcgaaaaccagcctgaccgcaacagaagcctatcaaaaggcgatggccgcaaactacgtcaaagtgcgtgagcggtatgtctatccctctttgcaggacgactacgagacggtacaagtctacaacgctccccaggtaaacgatgactatctggcgctttacgccggaaaaaacgccccagacaaggtttataagaacggggcgcacaccgtgaaagtggagatcttgtccaaccagatcaccgatgcgacagcccctgatagggtcgccaccatccgctacaagaagattatccgccgtctggctgataacagcacccgcaacgaatattgggatgcccggttcacgttccattctaaccctgacaaggaaatgagcgatgcggaacgcgagatcaactacttcggctttaccgtcaccagttggcagaccgaccgcgaaatccggggaggtgaatga

SEQ ID NO: 71836 - DNA, 906 bp, Citrobacter koseri
atgaaaaagttaacgtttaccgcactggcactgatgatgtgcggcgcggcatgggctgcggccataccgcaggcaagccgctatgactcccgcgtgcagcaggttatctataacccgcagaacgtcactgtcgttaacaccaaacccggctttatgacaacgctagtctttgataacgatgaggcggtcataagcgccaaacctggctttgatgaggcgtgggaagccacgccggatgcaaaccgggtcaacgttcgcccggtcgcgctcacgcagggagcgcccggagaagatggcaacacaacgcaggtcgtgatccccccgaacagccgggactggcataccaatatgctggttgtcaccagtaagcgcctgtacaacgtcgagctgaacgtcatcgatgataaatcggcacaacaacccgctttccaggtgagctatcgctatccgggcgaagaacgggacaaagcgagccgggaggcgacggccagacagcgcgagtgggagcagaaacagcaacaggccagcgtccagaaagcgctgaactcggcgcagacgccccgcaactggagttacaccaaatatccgggcaaaggcagtttcaacattgttcccgattttgcttacgacgatggccgctttacgttcgtgggcttctccccgtctaagtccattccttccgtcaccaaagagctgaacggcaaagagcatgtggttaacagcagtatccagaagaaaggcgatttcaccgtactggtgattcaggaggtgacgccacgcctagtactgcgttccggtaatgccgttgtgggtctggaaaatagcggatttggcaaggtacacgccgccgatggttccaccgtatcccggcaggtggaaagagtggaaaaaccggaatccaattaa

SEQ ID NO: 71837 - DNA, 1245 bp, Citrobacter koseri
atgaacgacgaaaacaaaatgcctgtgccggatgaagcgcaggcattcccggcacacgctgaggatgatattgccacgcttgagcgggaagcccgcgctaaaagggaggccgagcttctcaatgcgcaggacgacgaagagaaagacccggtacaacccgccgttaacaagctgaaaaagcgcaaacggggcaaagcaaccgcctttcttgccattgtcgcggtcacgcttatcttcctggcatggggtggtaactgggtttatcgcaatatcctgtggcagcctacggaagaaaagaaacaggacacagccccgcagacgaacaaaaccgattaccggcagcgtaacgatctcggtatgtccaccgatacagccgaagaagagccagagcaacaggataacggccagagcagcacggggggaacagggcaggtggctccggccgccccgccagaactcaacaaagccagcttccttattcgccgtgatggttcggccaccacacagaacccggtaaaaacccggcagcaggaaatgacgctgacatcggcaacgaccaccggacaacaggacagcagcgcggccacaaataccgccgcaccgccgccgggacaaagccccgcaccagtgcgccgcataccctataaccctgacctgtacatcccggaaaatacctcgatcccctgctcactggatcgccgctttgtatctgaccgggcggggaaacttcgctgcacggtcactactgacatctggagcgccagcggcaacacgaagctgatagagaaaggcaccacggcatcattactttaccgcgccatagcggaagaaggtatgaagcacgggcaagggcgggcattcatcattgcgacgaagctacgcacccgccagccgccttatctcgatatcccgttggttgataccagcgcggctggcgatctgggcgaggctggcgttgatggctggatagattcgcacttctgggaacggttcggcggcgcgttaatggtcggcatgatccccgatattggcgcatgggcatccaacagtgcgggtaaaaaagaccgcaatacggactatacggaaaacagccgccaggctatggcagatatggcgcgtaccacgctggagaacagcatcaatattcccccaacgctctataagaatcagggcgagatcatcaacctgatcacaggcgaggatattgatttttcaaacatttacacactgaaaatcaaacaataa

SEQ ID NO: 71838 - DNA, 321 bp, Citrobacter koseri
atgacgagagcaaacaagaaacgcatagccattctggttatgtacattgcacgtattgtcggccagagcctgcgtgatgcaccacttgcattacttatcgcgggttttctttttctgctgtttgcaccgccctcggcgtggatggccatcaatcaaatctggtatcacctgcgccctttaactgaccgtgaagcgatcatgttaggaaaaagtgtgtctggcttactccagcttgcctggctggtagcagtcagttctctcttcattctttctgttgatgaagtcttttcccggatgaaagaggtaaaagatgaccgctaa

SEQ ID NO: 71839 - DNA, 1026 bp, Citrobacter koseri
atgaccgctaaaaatatctccctcgaccgctataaacagcgtttctttggcgactttctggagcttcccggcctgacggaaatcgccgtcaaccgtccaggtgagctgtataccaaaatcaacggcatgtgggaacagcatgccgttcctttgagctatgaggattgctacaactttgcccggtgcctggcaaagcaccacggcgacaatatcgaagatattaagccgggactgtcagccacgctggaatctggcgaacggtgccaggttattgttcctccggcctgtgagcgcgatacggtgtctgtcaccatccgtaagccctcgaagatacaaatcccgcaccagggatatatcgatgcgggattttataaccgggtaacaaacgacgagaagacggagacacacgacgaagaattaattgcattgtacaacgccagaaatattcctctgtttatggagaaatgcgtggagtatggaaaaacattagccgtcgcaggtgaaactggttcagggaaaacaacattcatgaaaatgttgatacagtatatccctgtccatttacgcataacgacgatagaagacaatccggagataatattttttaaacacaggaactacgttcacctgttttatccttctgagtcatccgatgaaaaagggtctgtcgttactccggcgagccttttacgctggaattaccgcatgaaccctgaccgcattctgttgacagaagttcgcggcgcggaagcctgggattttctcaaaattacaggttccggccatgaaggaagcatgacctccattcatgccgggtcagcaaaagaagcaatagatggatttattacccgttgctacgagaacccacagtgcgcccagctcccctatacatttatgttgcgtaaggttctggacagtctggacgtgatagtgagcattgatttggacggagatgtccgccgtatgaatgacatttatttccgcccggcccatcgcaatcaatattttgaggagatgaaagcatga

SEQ ID NO: 71840 - DNA, 399 bp, Citrobacter koseri
atgacaaataaaatgacagtcatcatcctggcggcaataattaccggatgttcatcgccgccgcctcccgttcctgtagcgtgggataaagccgctgagccattaaacacccgtttaccgcaatggcgtgacaataacgttacagtcccgtccccgacagttaacggtaaatggacattatcagtcagcacacatagtttccacgacacaacatggacgccagcagtattttacgctgccgcccactcaacacgaattgtcgtctctgcacaatccggtactgatttctttaatgccagaaactggcttcgccagaatggcgcaaaaggcgtcattgaataccagcctgtttttaattgcctgacgtgcagggaaaccaccatttatttctctcgctaa

SEQ ID NO: 71841 - DNA, 303 bp, Citrobacter koseri
atgaaaaaaaccgttatcgcggtggccgcactatgtctggcagcaggaaccccagtttattcctttgccgctgacccgtgcgaagttgttctttgtatgtacggaaaagctacgggtaatagtggcgggcgtgaatgccgttctgcagaaaaggctttttttaaaatagtcaaaaagaataaacatggtttcttacccaaccatactttgaaggcgagaaaagcgttccttggtgaatgtcccgacgcagatccggaggccgtaaataaaatactgtccaggtacggtaaggtcagaggatag

SEQ ID NO: 71842 - DNA, 306 bp, Citrobacter koseri
atgccaaaagaagacttattcatccgaaatatatactcccgcaatcaggacagaatatcggtagccctggtatatgacacgttatcaaaagaagcccacagaggttgcgggctgtattacgaaatatacgcaagcagattaatcggccttttgcgcgctcatctttcagaacttaatgaagctgacgcaaacaaattaatgaggtatgcagaaagtaaaggcacaaaaattgatgatacaacctggagtgaggtgctggaagcggaaatggaatgcagagctgaaatataccgcgaacagatgtaa

SEQ ID NO: 71843 - DNA, 1740 bp, Citrobacter koseri
atgggatcacatcttatgcaaaggctgaatgcttttgctgacgccttttcctttttcctgttatggctgcaaaacagccctgtcatattatccctgttcgcaggtcttacattaccgtttatagtcaaccttccccgagaggaaagaaagaacgctccgttctggttaaaatcggtggcgtgtgtgtctattttcttttttatattcggtaccatatcaccgctaactattcaggggctgagctacttttttaaattactcgacaacaacatactgttcagaattccactatggatcatgacagtcacatttacgacagcaggattattctttcatattgcagcccgacgacttctggcgggagaaattgacaacctgaaacatcgaatgattaagaaaaccaagctggagagaaataccagaacggatgtacgtaaagtaaaagagctgttgcccgagagcatagaatacaacccactcgattacattgatttaaagaaaggtgctttcattggcttaaacaaaaatgaccagccgcaatacataaccataaaagaattcaagacccaacacgcagcaattatcggcacaactggttcagggaaaagtgtcactgcagccattctactttatcaggcaattcttgcaggcgaggctgtttttgtagaagatccaaaagatgatgaatgggcaccacatgtactcagggaagcatgtaaaaaagcgggcaagaaatttacacttataaatttgaacaagccaaattttcagcttgatttactggctgatatctctcatgaacaactggaggaactatttaacgctggctttagtctggctaaaaaaggggaagcttcagatttttatcgaatctctgaccgccgcgcagccagaaatacatcagcaatttatgaaaaaggaatgacactttatgatttatttaacactgattttgttcagtcattacgtcaagctgctcccgcattttttggtgagctggaagaagttgctttagttaactcaattaatgccacaaatggattttcattaaaggaggtttttgatgaaggtggttgttgctacattattggttcaacacgaaatcaaaaaataatatccgcacaaaggatgattctgacccgcctgatacaaatagcagagaccagggacagaataaacagcaccccgcgtactgttgctatttttctcgacgaattgaaatatcatctatcccgccccgcccttgaggggcttggaacggcacgagataaaggcgtgcatatattcatggcttttcaggcgatagacgatctgcgtgactgtccgtctgatttaaatggtgatgcagttattggagccatcattgaaaacgccaaattcaaattgatttataaaattcaaaatccagaaacagcagaatgggcggcaaaaatgacaggttcaatcctggtcgatgatgaaatgaggaaagtaaggactgatttatcattaacggaaaaaatggatacagaccgtatgataagacaggcagaaagttactacgttgacagtaatatgtttttaaatctccctgaaaaggtcggctttgtatttacaacaaaagaactggcgaaggcaacaaagatgtcccctattctggttaaaaagaaacatattgaattgctgtcatttgaaaatcctcaatctgaacaaccacaaaccgaaatcaatgaacaaaataagccatctattaatttgtaa

SEQ ID NO: 71844 - DNA, 765 bp, Citrobacter koseri
atgcttatacataacgtatcagagagaaaaaaagcctctgctgacaaaatgctctcccttctaaattttctgaaagaagaaacttattctgattttaacacactaagacgtgttctcggctttagcaaaaattctcacagcccattatataaggtactaaatagagcaattaaagctggcttcatcatcaaacacgaaatgcctggggtaaaacaaaaaataacgatttgggggataactatgcaggggttagcaatggtggtcatgcctgacgatgctgttttccctggatactttgaacccggcaaactcaaatactggactctggaacatcgtctactaaatcagagggtcagaattgcactggaagagaaaggcgggcaaggctggcttaatggtgatcggggggagtttatggcgcgttatcctggtgttcgccatcgccctgacgggattatcacgttagatagcggcgcaatcgtcgccgtcgaaacggagcgctcaatgaaaacccgcgcacgctatatcaacatcattaacagtcatctggcggccagcgatgccggacactggcactacgcgatgtatgtcatgccggatgacaaaaccaaaacatcgttaatccggctgtttgactccatcaaaacggtaatgaggaacaacgttccggtgccgttcgacacgaggaaccgcgaaatgtttcttttccgcaccattgatgaactggagcaagcaaccgccagcggtcgaagcaaaacctgttaa

SEQ ID NO: 71845 - DNA, 513 bp, Citrobacter koseri
atggctgttccatcatcaaaagaagagttaattagagctattaatagtaatttttctttattaaataagaagctagaatctattacgccccaactcgcctttgaacctctattggaagggcacgcgaaggggactacgattagcgtagcgaatctggtttcctatctgattggctggggagagctggtgttacactggcatgaccaagaggcaaaaggaaaaactattatttttcctgaggaaggatttaaatggaatgaattggggcgtttagcacagaaattctaccgtgactatgaggatattacagagtacgaagttttattggcacggttaaaggaaaataagcagcaactcgtggctttgattgaacgattcagtaacgacgagctttacggtaaaccttggtataataaatggacccgaggtcgtatgattcaatttaataccgcctcgccttataaaaatgcttcggggaggttaaataaactgcagaaatgtcttgcagaatag

SEQ ID NO: 71846 - DNA, 723 bp, Citrobacter koseri; identical to SEQ ID NO: 4885

SEQ ID NO: 71847 - DNA, 1506 bp, Citrobacter koseri
atggaacacgttagcattaaaacattatatcatctcctgtgctgtatgctgctctttatttccgctatgtgcgctttggcgcaagaacatgagcctatcggggcgcaagatgagcgcctgtcgacattaattcaccaacggatgcaggaggccaaggtcccagccctttccgtaagtgtgaccattaagggggtacgtcagcgatttgtctacggtgttgccgatgtggctagtcagaaagcgaatactctggacacagtttacgagctgggatcgatgagtaaggcgtttaccggacttgtggtgcaaatactgattcaggaaggcagactccggcaaggggatgatatcattacctatctgccggaaatgcgcttgaattatcagggaaaacctgcttccctgaccgtggctgatttcctttatcatacatcaggattgcctttttcaacactggctcggctggaaaaccctatgcctgggagcgctgtggcacagcaactgcgcaacgagaatctgctgtttgcgccgggtgcgaagtttagctatgcctccgccaattatgatgtgttgggcgcggtgattgaaaatgtgacgggaaaaacctttacagaggtcattgcggaacgactcacgcagccgctgggcatgtcggcgactgtggcagttaagggggatgagattattgtcaacaaggcaagcggctataaactgggattcggcaaacccgttctgtttcatgcgcctctggcccggaaccatgttcctgccgcctatatccatagcactctgcctgatatggaaatatggatagacgcctggttgcacagaaaggctttgccggcaacgctgcgtgaggcgatgagtaacagttggcgtggtaatagtgatgttccgcttgccgcagacaatcgtatcctctatgccagcggttggtttatcgaccagaatcaaggcccttacatcagtcacggtgggcagaatccaaacttttcttcttgcattgcgttgcgaccggatcagcagattggcattgttgcgctggcaaatatgaattcgaatctgatactacagctttgcgcggatatcgataattatctgcgcattggcaaatatgctgacggcgctggtgatgcaattacagccaccgatacccttttcgtctacctcacgttgttgctgtgtttttggggggcggtggttgtagtgcgcggtgctttccgtgtttatcgcgcaacggcgcatggccctggaaaacagcagaggttacgtttacgcgtacgtgactatatcatcgccttggcggttcctgggctcgtggccgccatgctctatgtcgcaccgggtatactatctccaggacttgactggcgttttatcttggtatggggtccatcgagcgtgttggcgataccgttcggaattatcctgttagctttcgttctgacattaaatcatcaaattaaacgaattctattacacaacaaggagtgggacgatgagtaa

SEQ ID NO: 71848 - DNA, 2460 bp, Citrobacter koseri
atggcaaaggatgattttacctgtggctcactggatattgccattattggcatgagcgggcgtttttccggtgcggaatcggtgcccgagtggtgggataagttgctggcgggtgaggagttcactcaaccgacatgcacagaagacgataatgggaacccttggattaggctgcgcaatataatcaccgctccctatgacttcgatgctgcatttttcaatattccgcctggcgaagccctgttgatggatccgcaacaacgaatatttcttgaatgctgctacaacgctcttgagcatgcgggctatattcccacgcaacttaagcgagtcggcgtctatggggcgacctacgccaataactattttatcgatcgcgtctatccatacctgaagatgagcggcgatcaccattatcttcaggcgcagattggtaacgaaaaggattacttgtgtgctcaggttgcctacaagttggggtttaccggacccgctgtgagtgtacagaccgcctgttccagttcgttggtggcagcatatttagcatgcgaggggttattgacttttcaagccgatgttgcgttggcaggtggggtcaccttgggttttttacaggcgcacggctacagtccgcaaggtgataagctggtatcgcaagacggacactgcgccccgtttagcgctgaggcgaccggcacggtatacagcagcggtgcgggagttgtggtgctaaaacgtcttgaggatgcactacgcgaccaagacagagtgtatgcggtgattaaaggaggtgcggtaaataacgacggcgggcgtcggctggggtttgtcgcccccagcgtagaaggacaggtagaagcgatcaatacggcgcttgccgccgcagaagtcgtaccgactgatatcgcactgatcgaaacgcacggtaccggtaccccgttgggtgatgagattgagcttgaagctctgcaccgggttttcgcaccggcatgtgcgccgcacagcattcaattgggtgcggtaaaagccaacttgggtcacctgggagtcgcttccggtatcgtcagcttaatgaaaaccgcactgacgctatatactggtttagttcccccgcagatcaacctagtaaataaacataaaaaactgttgcagccagcctcgccattttatctcagtgatgtagtgacttctgtcccacaaacgaaaaggatccatgccaccgttagttcgtttgggctgggagggaccaatgctcatttggttctgcaaaactggtgcgagacgcctgcgcaagcggtgcaagaaaatgagcgccgcctgtttttcttcagcgccaaaacgccattagcccttagacaacagttggatgctcattatcacgctctggcgacctatgcggaagcagataaagatcgtatcgcctatactctcgcgcaacgccgggcacatttcccgtatcgctgtgcgctggcggcagacagtgtggtagcgttgcgtgcaagtttggcgaaactgcgggatgctgacatgtcttttacccctatcaatatggaaactaccttggtgttcctatatccggaccgggacgataagctggagagtgccctgacgcatttgctggcttgtcaacctaacttgcgccagcggcaccagcgcctgtctcaggatgttgcacaaatctgcgaaccagccgattggacgccagcattgcgtcagtttatccagcaggtgagtcttagtgaatggctgatcgaacaaagtatctcgcctgtgcagcacatcggttacctgacgggggctgcagcagcgcagtatgttgcgcgcatcatctcactggaaaacgctgttcagcaggtgattgtggctgaaacgacaccggagcagacgctggccggcaacagtgaactgagcgaaatattggctaatctggcggtgacggagggaacgctgatgctggaaatcggtcgcgcggggacgttttccatattgtatcaccagcatgcgcagtgggttgggcaaacagtattttcccccatgctgaatacggatacgcctgaggacatcctgccgctgttgggcactctttggcaacgaggagtgactatttgtttaccggaaatgccagccgtgcagactataggcttacccggttattcgtttgatcgcgtccggtatgaaattcagtccagtgatgcgagagagaacgctatgttaccagtgagttatttgtcggtcagcgactttgtggagaaaacctggcgttcattgttatgcatcgatcattatgacgaacacgcggttattttcgaatacggagcgacctcgatgcacgttatctctttcgtcgacagctgtaaccacatttataaaatcggactgactgccgccgatatttatgccagacccgctatccgtgagcacagtgaatttatctccgaatgtgttgatggtattttatga

SEQ ID NO: 71849 - DNA, 4368 bp, Citrobacter koseri; identical to SEQ ID NO: 4882

SEQ ID NO: 71850 - DNA, 1440 bp, Citrobacter koseri; identical to SEQ ID NO: 4881

SEQ ID NO: 71851 - DNA, 1464 bp, Citrobacter koseri; identical to SEQ ID NO: 4880

SEQ ID NO: 71852 - DNA, 6465 bp, Citrobacter koseri
atgacttacagtgaaagcgatattgccattgttggcatgaactgccggtaccccggcgtgcacagcgttgcggcattcgaaacggtgcttcgcaccggatgcaacattttggaccccaaagtgaccccgagcaacggccacaatcacattacgctgaacaacgtctatgagcacatggcggagttcgatgccaacttttttggctacagccgtgcagaagcagaaatcatggatccacagcagcgcgtatttctgacctgtgcttgggagatgtttgaacaaagcggttacaacccgaagcagcacgatgcgcgcgtcggcctatatgcgggcgtgagtaccagcttctatttgcttactcacctgatgaacaacccagacaagcttgcacaactcggtggtctccaaatcatggtcggcaatgacaaagatcatttgacgtcccaactggcttaccgcctgaatattaccggcccttgcgtgacggttcaggccagttgtgccacctcgctggtggcagtgcatctggcctgcgaagggctgctgagcggtcagtgcgatatggcgctagcgggtggcgtcacgtttcgcatggaggagcagcgcagctatgaatcgcacggtgatgggctgcaagcagaggatggcctgattcatacttttgatgcgcaggcgagcggtacggtctacagcagtggtttgggcatggtgctgctcaaacgggctacagacgcgcaggtgcaaggggataacatccttgccgtcatcaagggaagcgccatcaacaatgatggcggtgcgcgcagtggttataccgtgccgggtgttgatggtcaggaagctgtgatgattgaggcgcatagcttggcggaggtgacgccgcagcaaattcagtatctagaactgcatggcagcggcacgccgttgggtgacgctatcgaattcgcggccatcaaacgtgtgtttgggacgccagcgccgaatgcgacaccgtggcgtctgggggctgtgaaacctaacgtgggtcacgtagaaatggcatctggcatcaccagtctcataaaaacggtgctgagtcttactaaccgggtgttttaccctacgctgaattttcaacgggctaatccgcaactggggttggaggacagcccgtttgaagtggtgtcccgtttaacgccttggccggagggcaccacgccacgcaccgctggtgtgagtgcgttcggattgggcggcaccaacgcacatctggtggtacaagcgccgttatcgacgccgcaggcgagggcgcagcagatggggccttgtgtcgttgtactctcggcaaaaaaccacaatgccctggaacagatgcaaaacgccctgctggcgaaactggccgcacatccagagatacgcttacaggacgtggcttacaccctgcgtcacgggcgtttctccgccccggtacgtaagtgtgtcatcgcagagaattgcacccagctagcccgacaactccgcgacgcaccgatggtggaggcaaccacgggttgcacgatctactggagattggggcaccgtttcgttgttgcactcgagacgcttagtgactggctggcgtgctctgaggtgttgtcacaggcggtgggacaactgctcgagcattttccgctcgaaccagcctgtctgcaagatctctcccctgcgcaacggacgtttatcagccagtatgcgctgatcgcgttgattgacgaacgggaaacgttgaatgtggtgctatgcggcgacggtgatggtggctatgctgccgccgtactacgaggagactgcacactagagcaagcatggcacaggttgaatgcgggccaaccgtttgatgatgtgccgacgaatcccctcttgcagcccgatgtctgctctttgatgctggacgacgcggcgagtgatgccaatcgcaccgcgctagaggcgttagggcagttatggttggctggcgtcagcctagattggcgctgggtggatgcggcggagcgtatgttgggcagtcaacgcatcgccctgccggggaccgtttttacaccgcagcgctattgggtcgaggccgtacggcctgccacgttctcccacgaatcgtcgaataatctcttatcccgcgcaacaaaatccgatattattgcagtggtgacggagatatgggaacgcacgcttggtgtcagcattgatgatcaccacgccagcttcttcgaactgggtgggcattcgctgttagcgtcaaccattttatatgatattcagcaacgttacggcatcacctgtacgctaagcgcattctttgccgatcccaccatcgagggattaagttgctatctgctcgaacaaggcggcagtgagacagcggtttcagcattgcctgatacggtctttgcccctgaccagcagcacctaccttttccgctgactgacgtgcaacaggcctattgggttgggcggcgaaaatccttgggattgggcaatatttccacccatatctatgtggaatatgaactacaggggctagatgaaacagcgttcaaccgcgcgctcaatgcggtgattgcgcggcacagcatgttgcgtgcaattgtcaacgatgacggtatgcagcagatattgccaaacgtgccggaataccacgttgccttctataccacccagtgcgaggatgcgtttcaacagcgttgccgtgagctgcgtgacaccctctcacatcagatgattgattgtagtcgctggcctctgtttcagatggaggtcgtggttgatccgcagcaaaaagcccggctacatgtatctatcgacctgctgatagccgatgcatggagtctggagttgttcattcgggaactagcttatcactaccgccatccgcaggcggcattgcctacattgacgtacagtttccgcgactatgtgctgaccttaaaatcctacgagaaaacgccgcagtttgaacgggcacgtgactactggcgcgcccgcatcgaaactctgccgccggggccacgattgccgctgcgtaccgaccccacgaagctggaaaaccccacattcgtgcgccgtagctattgtctatctcgtgctatctggcagcgcttgaaaacgcaggcgggtcagatgagtatcacgcctactacactgctgctcacggggtttgctcaggtgttggcgcgctttagttcctcgccgcactttagccttaacctgacgctgtttaatcgtctgccgttgcacgcagatatcaatcacttaattggcgattttactgcactgacgttgctggagattgatatgtcgcagggagaaaccttgcaggcgcgggcaaacgtgatccactctcaactgtggcgcgatttggataaccgcttgtttggcggtatccaggtctctcgactgctggtacaaactcaccgcgatccggcgaaatcggtgattcctatcgtgttcaccagcttgctcaatcaatatgaggcgagctgggaaacggatgatacgctgttcaaccaaccgcaggatgatctgtacagtatttcacagacaccgcaggtgtggctcgatcatcaggtaatggagcgtaacggggaattgcactttaattgggacgtggtggaacaattgtttgaaccggcgctaatggatcagatgttccagtgttattgccaactcctgcacgccctagcccagcgaccacagctctggcatgagactcaagatgtgctggcgctgcccaccgttagtgcaccggtcacgcaggctcctgcacctacggccttgttgcaccatgggttactgcgtcaggcagcactgacgccacaggaaactgcgctgatcagtcctatccgtgaattgacctatcgccaactgtcgacggcggcggatcatgtggcccgcgccctgttagcgctgggcgtgcagcatggcgaccgcgtggcggtggtgatggaaaaaggctggcagcagattgccgccgtacacggcattttacgactgggtgcggtctatctgccagtggatccggtgctaccgccacagcgtcgccagcttttgctgacggtgggcgaggtgcgggtacaagtaacgcagccgggtctcacgcaattggagccgtcgctgcccgtgctgatcatcgacgacggaatgctggacacgcctgctgcgccgttgcctgaagtggctggggatgtcacggatctggcctatatcattttcacttccggctccaccggtaccccgaaaggagtgatgatcgaccaccgtgcggccatgaacacgctggaagacatcaacgaacgctttggcctcaatgcgcaggatagggtgttcgggctgtcatcattgagctttgacctgtcggtttacgatgcctttgcgccttttatggtgggtgcagcgctggtactgccggaagcaggacgggaaaaagatccgcgtcattggcagacagttatggtacacggtcatgtaagcgtctggaatgcagtgcccgcactgatgcagatgctgtgcgaataccacagcggcgatcggatgagttatccgacgttgcgtctggcactgttgagcggcgactggatcccgctaacgttaccggagcagatgcgcgagcggctcaatgaaacgatggacatcatcagtctgggtggagcgaccgagtgcgccatctggtcggtctactacccgataggtgaggtggaatcgacgtggaccagtattccctacggtcggggcctgcgcaaccagccagtatacgtgctaaatgcgcaactggaggaatgtccggtcggggtggaaggagagatttgcattggcgggatggggctggcacaaggctacctgaacgacgcagagaaaacggcggcgagctttgtctggcgcgaagcgagtggtgagcgaatttaccgcactggggatcgcgggcgctactttgctgacgggcaagtcgcctttttggggcgcaacgatacccaagtgaaggtgaatggttaccgtatcgaactgggggaaatcgagcgctgcattgcgcgacatcccgatgtggagcagtcagtggtggtggcagtgggtaattctcaacatcgtcggctggtcgcttttgccaaactgcacgatcgccaccaggcgcaggcattgcaagctaaggaagcggaggcggcggcactggcgcagggtattattgtgaatccggcacagcgtctagcgttcaaactcaaggagccacatattcgcgcgctggatggtctgggcattgcactgacggcaccggcggatagcacacgttacatcaaacgccgcagctatcgtcatttcagcgcgcaaaaaaccacgctggcacagttggggcaattgctgtcgggcttggggcagatgcgtctacccggtctaccttttgccaagtatgcctatgcgtccgccggggggctatacccggtgcaaacctacgtgtacctgcatccagacaagatcgaagagggagtatccggtatttactacttcgacccgcgacagagctgtcttatgccggtagcaccagaagtcgagctgaacagtggttttcatgccggacctaatcagtctattgccgatcgggcggcattcacgctgtttatggtggctgatatggcggtgatctcgccattctatgggcaagaggcagcttggcacttctcggtgatggaagcaggtactctctgccatttactggaagaagatgcgccgcgctacggattggggctgtgccaacttgggatggcagacttttccgctgtggcatcgcattttcaattgtcgccacatcatcgctatgtccattgcaccgtggggggcgtgatagggcaagaggcggcaagtgctgcagcattgctgcgcgatttctccacctatgagaaaccgaaggaaaccgctgcgccgctggacatgcagagctacaaagatgccatgctgcgcggcctgcgtcagcaactgcctgactatatggtgccgagtgatctgatgttagcgaccgattttccgttaaccgctaacggcaagctagatcggcaaaaattacagctgcagggcgaacaaattgcccaccagcgtgacggcgtgggtccaatccaggtggacagtgcgttacaacagcggctggtggcgctctggcaggaggtactcggcgtgagccacgtgtcggccgaagacgatttcttctcgctggggggcagttctatagaattggtgcgtattcagcaggcacttgaggcgattatcgggcaggagattcccattgtcgatctgttccgtctgccaaccatcgcggatgtggcgcgttaccttgatgagcaactgcacaatctacccgccgcccacgatatcgtattagcgcaggctgaggtttcgcaggtcagcgctgcgcgcgagaatctggcgttgcggcgtaaacgtgcccaacagggagaaaagggcgatgagtga

SEQ ID NO: 71853 - DNA, 6501 bp, Citrobacter koseri
atgacgatacatcatgccgcattggcgcgaatgttaccggcggaaaaaaaggaaaagctattacgacagttggcgcaatcaggcgtgtcgcccagccgcattcccatcatcaaagcggatccggcgcaggcaatcccgctgtcgtttaatcaggagcggttgtggtttttgcaaaaatacgacagtaccgccactaactacaacctttatgtggtgtatcgtttgcatggcgtggtggatatgccgatgctcacggaggcattgcgccatgtgcaagcacgccacgccatcttgcgtacccgtatcatagtacgtaacgatcggccttgccaggtgatagatgatgcgtcttcgttagttctcgatacggtcacgctggcagcgcaggccccaacttcagcgctagatgcggtaattcagcaggtgataaacacccggttcgatctggcacgcggtcctctgtggggggtaactcagattattcaacccgatcaaggttgtcatttggtgttttgcgcgcaccatatcatcatcgacggtatctcgttacggctattgttcgatgagttacagcagcagtatgctcgattgcatgctggtaatgaaacgtcgctgcctccgccgccgctgcaatatgccgattatgccttctggcagcgcgaatggttccaggataccttgctggcgaacgaacttgcctactggcgtgcgcgtttgcaagacgcgcctctgctgtcgacatttccatcgctgcacccgcgcccggcacaaccctctacacatggttcccggttcagcatcaccctggatgaaacattaagcctcgcgttgaaacacgtagcccgcacgcaggaaacaacgccgttcgtgctgatgctgactgccttccaactggtgctgatgcgttacgctcagcaacagcgattggtgataggcatgccagtatcggggcgcattcgcccggaattgcagagtagcattggttattatgccagcactgcggttatctacaccgattttaatggggttgaggtagggcgcgaggcgctccagcgtgtgaaggccagcgtgaaagagacgcaggggcgccagcaactgccgtttgaaaacttggtgaatatgctggatctccctcgcagcctttcccattcaccgttgttccagatcctctatatctaccataaccacgtgaccccacgcgcttttaccttggctggtgcgtattgggagcaggtgacgtatcacaatcagaccgtcaaatacgacatgacagtcgaggtgttccaaaacgacgccacgttcgacgtctcctttgagtacgatttggggttatacgatgctgatgtggtgaagcagattgccgaggcgctgcgtcagcactgcttatcgttgacatcatcactggagaccccgataggggcgatccctctgcatgcaccggagaccgcaacgccgcggcgtgatccgctcaacgccactaacgtcccgtggctcgggccgcaggatgtgctgcgtatcattgaacagcgctgtgtgcagcacccaaagcaactggcaatacagcagcatgacggcacactgacctacgctgagctctgggcgcgtgtgcagttcatcgcgatgcgttttcgagcgcatggcatacaaccgggcgatcgtattggcgtgctgttgccacgtcacagggatgtgattgcaaccatgttggcgacgtggtttgtgggggcgtgctacgtgccgttcgatattcatcagcctgccgcgcgtttgcaacgccttatgcaacgcgcgcgtttggtctgtctggtggtccgtcagccgggagagtggggtgaaattgtacaactgtcgttgccggaattgatgcaggacatgtcgaatgcgatccggtattctacaccttgcgcgctgttgccggatatgcaggcctacctgttgtttacctccggcagtaccggtgaacctaaaggcgtgtgcgttgttcaccgcgggttgctgaacttgttgttggatatgcagcgtacctttgcggttggctcgcaagaccggctgctctcggtgacgacgccaacatttgatatctcattcttggagtatctgttgccgctgatctccggtgcgagtctctatctgacagaggcggaacgcgccgcagacagcttccgtatgattccgctgattgccgactatcgaccaacgctgatgcaggcgacgccctcgttctggcacgggctgttgatggcgggttggcgtggcgacccggaactatgtgtgctggcaggcggtgaagcgctgccaacgaaagtggcggaagaactgttgcgctgttgtggttcattgtggaacctctacggtcccaccgaaacaaccatttggtcgctgaaatcgcagataacccaagcggaaaacatcaccctcggcgctcccattgccaatacccgtatatacattctggacaatgagggccatccagtgccgcaaggcgttgacggcgagctttacatcgccggggatggtgtggcgcaagggtatgatgggcagcctgagttgaacgcacagttcttcttgtcagaaccaggggtccccggtggcaggatgttccgcactggcgatctggtcaggagtgatgcgcaggggcagttgttttttgttgggcgcaaagatagccagatcaaactgcgcggttatcgtattgagttaggcgaaattgaacggacgttggcacggcatccgcatgtggacgccgcggtggtggcctgtattgaaagagcaccgttacacaaagcactggcagcattcatcatcaccagtgagcctccctcgctattcgagcaactgaaaaacgagcttcggcagcaactgccagactatatggtgccaacgctgtggcagagggtggccgacttcccgaacactgacaacggtaaaatcgatcgtaagcggttagcggaaaatttcgttgccgatagctcccttgtgtcgccgcagacgcaagcgctgagcgacacggaacagatgttgctggcgctgtggatgcgctatttgccgataaaaaacgtcgatcctgagtgcgatttctttcgcttggggggacattcgctgttggcggtaacgttggtagcagagatcaaccgcacttttcactgcgccttgaccctgaaggacattttccactactccacactacgggcactgagtgcgcgtattgcacagcaatctatcacggacgctgccgcgtctcaggatgactgggtgatagtgcacgaccctgagcatcgtcatcaaccgttcccattgacggatgttcagcgcgcctactggcttggacgacagacgggtgctacctcgatcgcgacccacatctaccatgaatttgacgtagaacactttaatgttacgcattttacccatgcggtgaatgcgctgatcgctcgccatgaaatgctacgtgcgcgggtactccccgacggtactcagcagattctggcgcaagtgccggcgtatcagttagagcagcgcgatctgagtgctttgtcccctaacgcacgaaacgatgccttgatggcgatccgcgatcggctgtcgcatcatgtgcatcccgcagatcgttggccgctgtttgatttcagttattcggcttgcacggcgcaacatggccgcttgcatttcagtctcgatctgctgattgccgatgctctgagtatgcgcacgctacagcaggagttgatgatgctgtaccgtgagccccatgtgtcactgccgttgctaccgttctcttttcgtgactacgtgcaggcgctgttggtagagcaggcgagtgaagcctatgcacgcgatcaggcctattggcaacgggcgctgccgcagctgtatggcccaccaacgctgcccgtacagggcgatttggcgcaactgtctgcgatcaggttcgtacgtcgccgtcatcggctgtcagcccacaactggggagtgctgagcgcgctggcccaacgcacacgtatcaccaagacggcattgttgttgacagtctttagccaagtgctggcacgttggagccttagcccgacgtttacgctcaatctgacgttgttcaaccgcccgcagggttaccccaacgcagaggcagttattggtgattttaccgctgtcagcttgctgaatgtttgttacgacagccagcactcttatgcccacaacgctcagcgtattcaggtgcaactgtgggaagatctcgaacatcgtcgtttcagtgggatccgcgccagcgaggcgctgatccatagcggtcgtttccatgcgccgatgccggtggtattcactagtatgttggatatcgacggggagacgactgcgcaagaccctcgggacacaacccgttttactctgtgtccggacgccaatattacccaaacaccgcaggtgtggctcgatcaccaggtgatcgagttggctggggagttgcatttcaactgggacgcggtcgagcaactgtttgataccacgctgctggatcagatgtttggtgcttattgtcatgcgctgcaggcgctggttgccatgccgcaaagttggtggggggtaaatagttctctggcgctgcccaccgttagtgcaccggtcacgcaggcccctgcacctacggccttgttgcaccatgggttactgcgtcaggcagcactgacgccacaggaaactgcgctgatcagtcctatccgtgaattgacctatcgccaactgtcgacggcggcggatcatgtggcccgcgccctgttagcgctgggcgtgcagcatggcgaccgcgtggcggtggtgatggaaaaaggctggcagcagattgccgccgtacacggcattttacgactgggtgcggtctatctgccagtggatccggtgctaccgccacagcgtcgccagcttttgctgacggtgggcgaggtgcgggtacaagtaacgcagccgggtctcacgcaattggagccgtcgctgcccgtgctgatcatcgacgacggaatgctggacacgcctgctgcgccgttgcctgaagtggctggggatgtcacggatctggcctatatcattttcacttccggctccaccggtaccccgaaaggagtgatgatcgaccaccgtgcggccatgaacacgctggaagacatcaacgaacgctttggcctcaatgcgcaggatagggtgttcgggctgtcatcattgagctttgacctgtcggtttacgatgcctttgcgccttttatggtgggtgcagcgctggtactgccggaagcaggacgggaaaaagatccgcgtcattggcagacagttatggtacacggtcatgtaagcgtctggaatgcagtgcccgcactgatgcagatgctgtgcgaataccacagcggcgatcggatgagttatccgacgttgcgtctggcactgttgagcggcgactggatcccgctaacgttaccggagcagatgcgcgagcggctcaatgaaacgatggacatcatcagtctgggtggagcgaccgagtgcgccatctggtcggtctactacccgataggtgaggtggaatcgacgtggaccagtattccctacggtcggggtctgcgcaaccagccagtatacgtgctaaatgcgcaactggaggaatgtccggtcggggtggaaggagagatttgcattggcgggatggggctggcacaaggctacctgaacgatgcagagaaaacggcggcgagctttgtctggcgcgaagcgagtggtgagcgaatttaccgcactggggatcgcgggcgctactttgctgacgggcaagtcgcctttttggggcgcaacgatacccaagtgaaggtgaatggttaccgtatcgaactgggggaagtcaaaagccaccttgaacagctcgacagcgtagggagtgccgccgtggtgtgccaccagggacagctgtatgcctttatcactgccgcagaaaacctgcatcctgacgatactgacgccctgttagcgcgtgttcgtgctcagttagccgtgcagttgccgtattacctgctgccccaacatttctttcttctcaaggtgctgccgatgacaggcaacggcaaaattgatcaggcggcaatggttcaagaggttatccaacgtatgtcgcaatctacatcacagaagtcgagggccctcgcgcacgcctcgccctatgaacagcaggtggccgctctctggtgcgaggtactacaacgagaacagatcggactgaatgacaacttttttgaagcggggggcggctcaatccagatcgtgctgttgcatcgccgtattgaggagatttttaaggttacggtacctattgctgagctatttcgcttaaccaccgtgaaaagaattgccggttatttgcaggctatgcaggacaatgcacgggcggtgaatcaaacacagcagcgtgatgcttcccgatcccgcgcccagcaacgacttgtacgtcgtcaccagcgtcagcgttaa

SEQ ID NO: 71854 - DNA, 3033 bp, Citrobacter koseri
atggcagagaatgattttggtatagctatcattgggatggcggggcgtttccctcaagccgatacggtacaggcgttttgggaaaatcttctggcaagccgagagtgcatttccttttacagcgatgaggaactgctggcgatgggaatcagtcctgaatttgttcagcacccagattacgtcaaggccaaaggggaggtagctgacatcgataaatttgatgctgctttcttcggtatcgcaccccgagaggcggagctgatggatcctcagcaccgtgtcctgttggaaaccgcgtgggcagccttcgaagatgcgggctatgtggctgccgattatccgggggatgtgggtatttttgctggcaaaagcatggattcctatttgatgctgaacttgatgccgcactttaaacgcgttttctcttctggcagtttgcaggcggccattggtaacgacaaagacagtatcactactaccatcgcctatcacctcaacctgcgcggcccggcgatcacggtgcagacttcctcatcgacatccttggtggcggtgtgcgtggcatgccaaagtctgttgacttggcagtgtgacatggcgattgctggcggagtaacgctggggccaccagcaaaaaccggctacttgtcgcaggaaggtgggatcaccgccgccgatggccactgtcgggcgttttccgataacagcagcggatttgtgcccggcaccggcgcggggctggtggtgttaaagcgtgttgatgaagcgctgcgtgatggcgataacatctatgcggtcatcaaaggatttgccgtcaacaacgacggttcggagaagatcagttataccgcgccgagcgtggatgcccaagcgcgcgccattgctcaggcacagcggttggcaggtttgacaccgcaggatatcacttatgtggaagcccacggtaccggtacgcgtttgggcgatccggttgagttttctgcgctaagccaagcctttgcgggcgcgtcacaaaagcagtactgtgcgctggggtcggtaaaaaccaatatcggccatttggatacggcagcgggcgtcgcagggttgataaaaaccgcgctggcagtgcagcagggaataattcccgcaacattgcactttgaacggcccaatgcacagatcgatctgaccaatagtccgttttacatcaacactacctgtcaaccgtggcaaccggaaagcggcatccgtcgcgcgggcgtcacctcgcttggcatgggcggcaccaatgcccatgttgtgctggaacaagcgccagccgttgacttgcaagcgcgagcgcctgtacctgcctacagtattttgccgttttctgccaagaccgacagtgccttatcctcggggctggcgcgttttgccgattttctgcaacatgaatcgctgccggataggcgggatctggcgtggacactctcacagggacgtaaagccttcgcacatcgcgccgcgctcgtaaccagagatctacatgctgccgggacgctgttgcagcaggccgcgacagcgccgtttgctcgtggtgtagcgcagacacagctcgggctggggctgttgttttccgggcagggtagccaatatcagcgcatgggccatcagctctatcaggtttggccggcctacgccgatgccttcgaccgttgcgcgacgttactcgagcgtgaataccaactggatatccgccatgagttgttcagagcagaagtctcgttagcccaaggcgaacgccttgcgcaaacctgcctcacacaaccgctgctgttcagcgtcgagtatgccttagcccaattgtggctcagttggggaatcacgccaacggtaatgattggtcattcgctgggcgaatgggtggcagcgacgttggcaggcgtgttctctttagaggatgcgttgcgcttggtggcgcgtcgagcagagctgatgcatcaggcaccaagcggtgccatgttgatggtggcgctgcccgaagcacagattcgcgcactgattaccgccccgctggcgattgccgctgttaacgcccctgactattcggttatcgccgggcctacgtcggagatcctcgccgtcagccagcgtctgacggagcagaacatcatcaacaaacgattgcatacctctcatgccttccactctagcatgatgcaagatgcggcgcaggcgctacgtcaggcatttgagaatgtacgactgaacccgccgacgctcaccatcatctctaccgtaaccggcgcgcacgtcagtgccgacactctcaccacaccggactactggattgaacagatgctgatgcctgtgcagttctccgctgcactgcaagaggcgcaagctacatttgatgtcgattttctggaaatcgggccaggtgccaccctgacccaactgaccaacggtcatgcattaggtgatcgtctcgcgttcagctcgctgccagcaggtgcccgcagcagcgatgagcacaaacatatcttagataccgtggcagcgctttgggtgcgagggcataacatcgatttgtctgcgtttgcaggtgagcaaccgcgccgtgtctctctaccgacctacgcctttgacaaaatccgttactgggtcgacagtccagaagaacagaggagcgccgtaacgccggtggcggacgcgggaagtgtcatccctagcgaaccgtcggtgcgccgtcagccgcgtccggcgttttcggtgccttacgcggctccagagagcaaaacgcagcgcggcttagtggcgatttgtgaagcattgctgggaattgacggcttgggcattgacgacaacttcttcgaagctggcggacattcattgatgctgggcatgttgctggcgcaggtacaggaacggttcgccgtcactctttcctttttcgacgtgatggaggatgccagcgtgcgcgcgttagcgcagttggtcgagcaggagcagcaggatgatggagggtccgcacttgccgtgctagttaacgacatgattaatgagtga

SEQ ID NO: 71855 - DNA, 4797 bp, Citrobacter koseri
atggaacagcaagggattatgagacagttgcctaccgacgaccaaacgatagtcgactatttgtatcgtatcgccggagaatatggggaaaaagccgctgtattgatgggggacgcggcgctgagctatcacgatcttaatgcacgctctaaccaactggcgcattatctgcgtgggctggggatcggcgaggatcgtgtggtagctatccgcctgccgcgcggcatggcaatgctgattgccattttcgctattgtaaaagctggtggtgcctatttaccgctggcgtacaatgcaccgcgcagccgcattgaaaatatactgagcaacagcggcgctgtttgtctgatcggtactgacgatggtgatcgctggccgattcctcgcgtcgaaatcgacagcgcggcggtcagtgccatgccaacgacggatctgcgttaccgaccacatgcgcggcaactggcgtatattatttacacctccggttccaccggtgtccctaaaggggtggcgacggaacatgcagcgctgctaaaccgaattgtctggatgcagaacgcttatcctatcagttctcaggacgtgctgtttcagaagacggtgtacacctttgacgtctctgtctgggagatgttctggtgggcgatgtacggcgcatctgtagtgctgttaccgtccggactggagagcgatccgcgaaccttggctcgactgattcagcgtcaccgcgtgtcggttgtgcactttgtcccttcgatactgaacctgtttgtcgagtatctggagatgaaacaggatcctcgtttgaccgcctcattgcgattagtgttttccagcggtgagaaactcacggtccacagtgtggctcgcttttatcaatcggtggcgcagggtgatcttataaatctctatggcccgaccgaagcagcaatcgatgtcagtcatcaccgctgcctgcgcgggtacgactacgacgatatccctatcggtcaagcgattgacggttgccgactctatgtgctggatgaccatggtaatccggtagcagacggcgaagagggcgaactgtatctcgctggtatcgggctggcacgtggctatctcaacaacgtggcgttaactgatcgctgttttactatacatccaactttgcgccatttagggaaaccggagcggctgtataaaactggagatctggtgtggcgcgacggggaaagccaacaaattcattacattggccgtaatgattttcagattaaaattagagggttgcgcgttgaattgggagaaatcgaagcccatgcgatgcgtttcccgggggtacagcaggcagtcgtggtggcggatcaggatgatcccgacaatcagttgatttacgcttttgtcgtcagtagcgtgccgctcaatttggcggccttaatggacgcactgtccaaaaacttgcctgcctacatgctgccgaaccgtttgttggcaatgtcagagttaccactctccgacaatggcaagtgctgtcgtaaaacgttgctcgacttggcgcgggcgtactcagccagtcgcgtcgatttacgtgaaactcccgccgtgcgctacctaccgttgtcatcggctcaatcgtcgatgtggtttatgcaacaattggcgccgcatactgcactatacaataaccccaccgccttgctgcttgaaggagaactggatcgcacgcggatggacggcgcgattcgtcaattgatgagtcggcatactctgttacgtgctatggcggaaacccacaatggacaaccagtattggcggtgcctcagtgcgtatcgtcgcaggcgttgctgaccatagtgccactcccctcggtgagtgatgataacgcgctacaggcgatgatcaaccagcgtgcggcacaccccatgcccttaacgtcaggcacaccgctgtgccggtttgaactgttgacgatcgatgacgatcgtagcgtattgttgattcatctgcaccacatcatcagtgatggctggtcgaaaggcgttttgttacgcgaattgcaggccgcatataacggtgaatcgctgacgccagaaccgttgttggagtatgccgactacatggagtaccaagaagagtggcgtcagagtgacgcctatcaggacgcgatgcgttactggcaaaataccctggcggggacgttgccgattcttgatatccccaccgatcaaccgcgtcagaaggtggcacgttaccaaggcgcgtttgttgccttcgcattgtctgccaacacatgcgagcgagtgttagcggcggcgcgtgcgcagcgcgtgtcgttgtataactatctgctgaccgccttcgtcctcctgctgcatcgtaatgcgcgtcaacaggaatacatcgtcggtatgccgattgctgcgcggctgacgaaagaacaggagcatatgatcgcgccgctggtcaacgtactaccgctgcgcttacctcttgacgaagcggcatcgttttccgagttagtacagacgatcagaggtattctgtttgccgctttcaggcaccagcgtctcgaatttaccgacatagtgcgcgcagtgaatgtggatcgcagcgccggacatttcccaatatatcagtgcatgttccaactcgacaatatgcctctggcgagcccgacactaaacggtgtcaacgttacaccattattgttggataccagtgcatctcaggtggatatttcgctaagtatgcagcatatcgatgggcgcatcaccggcactttcgaatacgacgctgggttatacagtgcggatcgtattcagcacctggtggcgcagtggagagaactgctagatgaggccagcagccaacccacgcagttagtccgcgatttgattcgtttcacccctcgagagcacgcttggctggcgcggcacaacgccactgaagttgctctgccgcccgtagataacctgctggcgctagtgttaccgcactgccagcagcgccctacacaggtggctttgcgccacgctgacgacgccatgacctatggcgaattgcaacaggccacgatgcagatgtgtacttggctgcgtgcgcaaggcgtaaaacgcggagaatctgtcgcactgcaactgcctttttgtttcgaattgattatcgcacaattggcgatcctctctttgggggcgagctatgtgccgctggatggtaacgcgccagcggcccgcaatgccctgatcttggcgcaggcaacgccgtgcatgctgctggtggcgcaaccgctggaatcccctcatgggctgacgataccttgggtgctagtgcctgactggcgtagcctgctgacagaaataccgaacctgccagttagtgttgcgccagatgctttagattgcgatgcggtggtgatctttacctccggtactaccgggcagcccaaaggcgtccgactcagccaacgtaatctggtcaacttaaccgcatcctttatatccagctatcaagtgacgcatcaggatgttctgctacccattacctcagtcgcgtctgctagctttgtcggggaggtactgccgctgctcgccgctggcggtaccttagtattggcgcaaaaagcgcagagtttggatagtgatgcgctcattgcgctgctggcatctcagcgggtgactatcctgagcaccaccccatcgctttctgccagcctctctgtgctggctcagtcgatgggatcgctgcgcttgtttctgtgcggtggtgaagcgttagagtatgagcagatagcgccgcttctgccgcacatggcagtggttaacggttatggcctgaccgaaagcggtatctgctcgacctactttcctgtcgcaaagcgtagggagcaagaaacgggagcattgcccattggccgcccgattcagaacacccaagcttatgtggtggatgcatataatcgtttggtaccgccaggtgcctgtggagaactctgtttctctggtctgggcatttcgcccggctaccttgatgcacgacaggatcccgagcgctttgtcgagttgccggaataccctggcgttcgggtgctgaaaactggcgatcgtgctcgttgggcaaccgacgggatgttgttctatctcggcagacaagatcgccaagtgcagatccgtggataccgagttgaactgggcgacatcgaaagcctactgaaacagcatccggatattgctgatgcgtgggtcgatgtgcgacgcaatgcggcggcaacgccgctactagtggccttctattgcagcgtcaacggcgttgcgctggatgctcagcaattgcgcgtatggctcagcctgcggcttccgttgcatatgctgccgttgctctacgtgccgctgagcgccatgccgctaggtgtaaacggcaaaatcgatccccagtgcctgccgctggtcgatctgcggcagttggaagggccgggcgagtatgtccctccggcaaccgaactggaacagcgtctggcggagatctggcagcagttgcttggcctggagcgtgtcggcaccaccacaaatttcttcgatctcggtggacactcacttctgctagtacagatgcagcaatacatcgggcagcagtgcggtcagcacgtggcgttggttgacctgctgcgcttcactaccatcaaacgcttggcggaatttctgctggccccggacgcagcgcaagggaccacaggagatcagacacaactgcgtgcggcgaagcagcgtttggcctttggtcacacgcgctgggcagccacaaccgacagtcatcactga

SEQ ID NO: 71856 - DNA, 1269 bp, Citrobacter koseri; identical to SEQ ID NO: 4875

SEQ ID NO: 71857 - DNA, 1131 bp, Citrobacter koseri; identical to SEQ ID NO: 4874

SEQ ID NO: 71858 - DNA, 249 bp, Citrobacter koseri; identical to SEQ ID NO: 4873

SEQ ID NO: 71859 - DNA, 867 bp, Citrobacter koseri
atgaacgtggcggtaataggtgcaggagtaatgggaactggcgtcgctcataacatggcgcaatacggcatatcaactaacgttgtggatatttctcaatctcagttggataaatgccgacagatgatcgaagcgaacttacgcttatataattttcacccgcagcataaaaaaaagacgcatagcacagcggagataatggaaaatatccgtttcacaactgagttggacgacattgtagaatgtgatttggtgattgagaatattactgaggatatagagaaaaaaaatgcactatacacacggatgaatacgatctgcggcgcgtcgacagtgtttggtgttaatacgtccgccatatctatcactgcgttgtcaaaattaatgcgacatccggagaatgtagtcggcgtccattttatgaacccggtaccgctgatgcacaccgtcgaattaatccgtggtgtacatactgcagagcgtacactgaacatatttcaccacttatttgctcagttgaataaaaccggcatcgtggtcaatgattctccgggctttgtcactaatcgtgccatgatgatttttgttaacgaagccatatttatggtgcaggagcagatcgcccgtgctgaggatatcgatacgttgtttaaaacctgcttcgggcacaagatggggccactacaaactgccgatttgattggcttggatacgattttgcaatcgttgcaggtgctatatgaaagttttaatgatgataagtatcgccccagctttttattaaagaaaatggtcgatgcagggtatttgggcgtgaaatcagggcaggggttttatcgctatcaacagacgtacgccgagcagtga

SEQ ID NO: 71860 - DNA, 2601 bp, Citrobacter koseri
atggaatacgcaagcgaaatgaacggcatggaaatcgccattattggtatggcggtccgtttcccgcagtcccggacgttacacgaattctggcataacatcgttcagggtaaagagtgcgtcaccttctttagcgaggaggagttgctggccgaaggcgtcgaacagagtactctggacaacccggcctatgtacgggccaagccctatatcgagggcatatgcgactttgatgctgcatttttcggttacagtcacaaagaggcgcagactctggatccgaaatcccgcgtattacatgaagttgcctaccatgcgctggaagatgcaggctatgcccaacgtaccagcgatctgatcaccggggtattcgtgggggcgtcagaagatgtggattggctacggcgttcgctgtcacagattggcggcgatgcgctgaatcgttttgagtctggcatctatggtcataaggatctgctcgcacatctcattgcctacagtctcaatctcaacggtccggtgtatagtctctacaccagttgttcgacttctctgagtgcaacgcatatcgcttgccgcagcttgttgtttggcgaatgtgatctggcgttggcgggtggaattactatcgatttaccgcagaagtcaggctacttctgtcaacagggcatgatccactccaccgatggccactgccgtccttttgacagtcaggcttctggcaccctgtttggcgatggcgcgggtgtggttgtgcttcggcgtttggaagatgctctggcagcgggcgatcgcatctatgcggtgatccggggtagcgcggtcaacaatgacggtaaacaaaaaatcggttttgtcgcgcctggtcatgagggacagaaggcggtcatttgtgcggcctgtcatctggcagaagtaagcccagaaagcatcggctacgttgaaacccacggtaccggcacccgtattggcgatcctatcgagttcgctgcgttgacggaggcgttcgatacttcacaccgccaatactgtgcactaggggctgtaaaggcgattattggccacacccacgcggcggcgggcgtggctgggttaatcaagacggcgctggtacttcatcaccggaccattccgccgctcgccaactatcaaatgcctaactcgaagctggatctggcgcattcaccgttttatatcccgatacagccgcaggagtggcccgcatcgcggatgccgccccgcgctggcgtcagttcttttggcattggcggtactaatgtgcatatgattttggaagggctgaatcctgcggtgcgcgatgaccatgaccaagtgcgagcaccggtgtttatccctctctccgcgccgtctttcgagcagttggatgagctgacgcaacagcttaccccgttgctggctacccttgatgcgtcaacgctagcctacacacaacaagtggcgcgccccgtgtttgattgccgccgagtgatacaagtggaaaacgatggtacgcaagcgatgctggcatcgctggataacctaatgcccgacgctccttggggcctacactgtccagatctacgtactacgaacgattgtacttacgcacagtggctggcgcattcggcacattatcaacgcgaagcgactgctctgacggcattactcgacggcatgaatattccacccgcttattgccacgctgaaacgtgggcggcacaagcgaacagcagcctgctaatcagaggctgccagactatcgccgcgctaaaaacctggatgaacctgctaccgacattaacactgctgtcgggtgctggaacaggccttttgcctgccgctgcagccagtggcatgattgcgacgcaagacgtgttgcatttgctgtgggaaatggagcaaaaggcgcttcatctctggcttcctgagcgccatgaacctatccccggctacgtgctggcttggcaaggaaatcccatcaccgatgcacagcgtaacgacagagggttttggagtgaagcgctgttggcagatacccgagaactgggggagggcgttcacagtatcaactgggttaggctgccgccggaaataagagaagacgttgatgtattgcgctacgtggcgcaactgtggtgtgcaggtatcaatgtggattgggccgtgtggtacggcactccgctgccgcaacgcgggagcgcatcagcatatcccttcgcacacaaccactacccattgcctggacgggtaatgggtagtgtggagacccaacccgaagcaggacccgaaacgcaccacccttatcaggcacgtcccgtgttaagcgtacctttcgtagccgcacactcgcggggtatgcagtatatcacaggtctgatggaactgttgctggaaatatcgccggtcggggtggacgacgacttttttgaattaggcgggcattcgctgctggtgacgcaattgacctcccgtttagaacgcgatttcaacgtacatatcgatcttttgaccctgatggaaaaccccaatccgcgcaatatctacgcgcatatcgcggcgcaactggggggcgaagacaacctcgaaatagcctgtcagtaa

SEQ ID NO: 71861 - DNA, 9621 bp, Citrobacter koseri
atggataatacctctggagattttccatgtaataagatggacacgcgtaagcagttaccgctaacaccaagtcaacaggggtttttattccattccttaaaggataagaaaaggagtaactaccatgagcattttacatgcattttttctcagcatgtagatagcgcccacttcaagtgggcgctggaaacgttatttcgaaagcatgagtgttttcgcactgattataactgggagattgatgagcgcccttgtcaggtggtgaagaccgatgtgttgccggatatatatgtgttagactgtgagcaagaggaaatacgttttctactagctaatgatgacattatcattcctgtcccgcaggatgacggtattgatgctataattcctcaactgctacaggctgatttaaaatacccattttccttgaaaacgatcccagtccgggcctaccttattcagtcaacgaaagaaagtgcttttatactatcataccatcatattgtgatggatggctggagcttatcccttttcattaaacagttgctccaactctatggagcggctgtggtcagtggtgtgagggatgatagcgccattatcccctcatctctgaaaccccttgtagacacactgtcggcccgacgtcacacctttcagcacgactattgggctgcatatcttcgggagggaacaccaacttgtatcgtgccgctgtcacaatatcacacagatactgaagccgagaacaattcttacgttaatcaaacaaatcatgtggagatcaatttgtctccggatgtgtgtcagaaaatacagacgctatgcagcgattatcgtatcacccccgcagtaatcttctatgtggcctggggcatcctgctacaacgttggtgctatgctgacgatgtgttattcggcgcgacaatatcagggcgaaatataccaattgatggtatagaagaaacactagggctatttattaacacgttgccgctgcgtctgcgtgatgatggggcgacactgttgcaacacttacaacgtatgcaccaaacactaatagctcactacagcaatgaacatgatgccttagccagcatacaacggttggtacataaagaaggtcatgctggggatctttttaataccttagtggtgttggagaattatcccgttgatatgacattattgtcatgcgcgtcgcccgtggcaattcgccatctcagtgtacatgaacaaacgcactatccgctgaccttgaccatcactcaacagaagggattccgtttcagtattgcatatgcccttaactacctgaccaacaacatggcgcaagcgttgctgatgcacctgagttatctgcttgaacaactggtggacaatccgcagcgccccattgctgcgttggtaaacttgtccccatgccagcaggcgcaggtacttcaaccctatctggaacgcatggcatgccgggattgggatagtcaatccaacgtcatcgaacaatttcatcaagttgctgcgacttcgccagcacaggtcgcagtggttgatgaattgtgcgcgttgacctattcggagttggcagcacaagctgagcagctcgcggcttatttggtacagcagggtgttatggttggcgatactgtaggcataattagcgaacgccgggtaaacaccgtggttgccatcatcgccatcatgttgatcggggctgcttatgtgcccatcagccccgactacccagtgggtaggatgcaggaaattattgatgacagcggcttggcgctgttgctggtacatggcaaaccgctagatgcattaaacgttgcgcagagtgacctctgtgcatttcccgtcgcgccctcggtggtatttccggttatcacaccagattctcgcgcttatgtgatttattcatcggggtcgacgggtaagccaaaaggtatcgcggtggcgcaccgcggtttattgcgcctgatacaaggcgacagcccgctgaaggtggagagcggtgagacaacgctgctgacctgcccatttgagtttgatgtttcggtgtttgagatgtggtctaccttgctcaaccacggcaaactagtattactcagcaaacaggcattacttgatatcaatcacattcgccgcacgatcgctgatgaacaggtggcgcgcgcctggtttacctcatccttgtttaactcctatgtggcagaaggtgccgatttcttcggtatgttacaacacattacggtgggcggcgaagcagtatctgcgtggcatgtcaacgacgtgatgcaaaaatacccgcatctggtggtgacaaacggttatgggccgacggaaaacactatttttaccaccgcatatcgtttcaacgggttgcaacccgcccgagtcccgataggatacgcggtaccgggcacctcgctctacattaccgatctccatgggcatttgttgcctatcggtgccaccggtgaactagtggcgggtggagtgggggtcgccatcggctatcagaacaacccggcgctaagtgcgacggtttttgtccctgatccttttattcccggcggtatgatgtacaaaactggcgattatgcccggttgctggatgatggctgtgttgactgttttgggcgtaaagacggtcaaattaagatcaatggacaacgaattgaaaccggagagatcgagcagcgcctgctggagtgctccggcattatcgaggcggtagtggttccttaccgcgtacgtgaaacgctgcatattgcggcagtggtctgcgtcaatgatagctatgatgaggtggaagttcgagggcaattggctgacagattgccgccattcgctattccggaatccttggtggtggtgacggagattgcaaaaagccatagtggcaaggccgacttggcgcagttgcggtatctcctgcccgcaactcagtgcaacgccgtgtccaccacgatatcagaggtgcatagtgacatggaacatgcgctgcatgctatctggcaacgcgtacttgatagacaagacattgatagcaatgcctcctttttcgccctcggtggcacctcattggataccatcagggttaaaggggatattaagcggcaacttggcttggagattgatattaccgatctctttaagtacccaacgctcacggcgttagcacattttctcgatactgccgtatcgccggaggatgcaattccaacgcgtgctgttgtctacagcgacatgccggtggcgattgtcggtatggcgggacgtttccccggtgcggcgaatattgcagcgttgtggacgctggttgtaggaggggaatcgggattaacactgttcagtgatgaagagttgcgcgcgcatggtgtgacacctgacacgcttaaacaagcgaattatataaaaaccaaagggattgttgatgatcacgaatggtttgatgcggatttctttggttatactcccaacgaggcggaatgtatggatccgcaaattcgcttattgcatcagtgctgctggcaaactctggaacacgctgggtgcgatcctgccacctttactggtgcgattggcatttatgccggactgctgacatccccccactggcttaatgcggtaatgcaagacactaccgactctaccgccctgtacaaggccagtatcctgaatatccattccgtcacagcattgattgcccatgcgcttaacctcaccggccctgccgtgacgcttgacaccgcctgctccacttcggcagtggctatccaccaggcctgcatcgcactacgtaaccgggattgcgatgcggcattggcgggcggcgtttctatcgagatgcctgcgtaccggggctatgaatatcatgaaggcatgatcaatgcgcgagatggtgtctgtcgtcctttcgatagccaagcctctggcacagtcaccggtgatggcttaggaatgctgctgctaaaacgtctggacgacgcgctggcggatcgggactgcatctatggtgtgatcaaaggttcggcggtcaataatgatggcaataacaaaatcggctataccgcgccgagtgtgatcgggcaatcaacggtaatccgcaccagtttgcgccgtgccggttttgatagcgacagtatcggattggtggaagcgcacggcaccggtacggtgctgggtgatcctattgagttacgtgcgcttaatgaggtgtttggcccaacacctgttccgttttgtgtggtttcagcgctgaaaagtaatattggccacctcaactccgctgcgggagtggcgggcgtcatcaaaacaacgctcgccctgcatcatcaagtgttgccaccaacagcgcactttcgccaactcaatcctgctatagatctatcgcgttctgcattgtacgttaaccagcaagtccaaccgtggccgtcgacgcgtcctcgtcgtgcactggtgagctccttcggcatcggcggcaccaatgccagcatcgcactagaagcacatcaacatgaggacgacccttcagcgacgggggtacgcgacagctatctgttgttgttctccgctaaaacacccgctgcgttagagttgcgcgtggcctccacactggaatatgtcaagcatggagtaggggtgcgcctgccggatgtggcttatacattgcaaactggacgcacagcctttgaccatcggcgggcttatttggtgagtcgtgggtcgaaaatcgatctctcctgtgccacgatattgcaagcggaaatcttcaatggtcagcgcacgacagcggagatctgcttcatgtttcctggtcaaggtagccaatatcacggcatggccagcgcgctctatgctcatcaacccatgtttcgccagcacatggatcgctgctttgctgcattccaacgctattcgacggtcgatctcaaggcgttgttgtttgacgatgaggatacgcgggatattgatcaaacgcagttcacacaaccggcgttgttctgtgtcgaatacagcctagcgcgcaccttgattgatctggggattacgccggacagtatgatcgggcacagtctgggcgagtatgttgcggcctgtattgctggcgtatttactcttgaggatgcgctgcacgtcattgaggcgcgcggacgtttgatgcagtccatgcgtcccggtagcatgatggcggtctaccttagtcgcgaacagttgaccccatggctagctgcagaccggggtattgaactggcagctaataatagcgcgcatttttgcgtagtcgcgggcgagcaggcggccatttcccgtttgagcacacgcttagtcgagggcgggatacagcacaggcgcctgaaaacctctcacgcattccactcggccatgatgacgccgatgctgcacgattttgcacagttgctggggcaaatcccgatgcacgcgccgcacaagcgctttatatctaatgtaagcggtacatggattactgaggagcaagctacctcgccggattactgggtgcagcaagtgcgcaacgcggtgctgtttagcgaaggtgcggcgcaactgttggtacaacccacgctgtttatcgaatgtgggccgggtaatacgctctctacctttattcaaggacataaccaatacagcgatcagccgaccctgttgacgctacgcaaagccaacgcggcgatcgatgatgagcacatgttgcatcgtacgctggcggcgctgtgggtcaggggggagaatattgattggagacgctttaaccagacggcactcggcaagcacattccattgccggattaccccttcgaacagacttattactatcgctatggtgctgcactttccggttatcgccagtatccaaatcctctgcgccgtccgcaagatgagtggctccagcgtgtgctgtggcggatgcacgacacatccttgcgggaggcgttctatgcgccgggcgaattgatcatcattattagtgctgacggcgacaagttacagcagacgctgatgagtagtggtgtcgacagcatcacaatgccgctgccgatatcgtcagaggacgacgtgtgggataatgaccgtattctgacgcatttccacgacatctgcgcacttttagcacacaaaacctaccgacagttacattgcttgtatgctcccggtgcggaggcaggatcatcgttgacacagtcgctctcgggactttatcgtgttgctcgctggtgtatgcacagcaccacgccgctggcgtccttaacagtattgacccatggtgcgtttcgcgtacaggaagaggataatcccgaaccgacgctggcagcgttgtcgggcgcagtaaacgtgtttgcccaagagctgcacccgaccgaagtacgattgatcgatatcgatgcgcagagcagtgatgagaatctgaacttgctaacccagcgtctggccccgaaacaagaaacggtaatggcgctcaggcaggggatgctttacctgcgacgctttatcccgacacggctgttggcgcacttaccccctcaaacagggtgtataccgggcaacgtactgtggattatcggcggtgaaaaggggattggccgcatgatcggcgaagcgcttgctcagcgtgagggagtccgtgtggtactgagcagccgcacaggttatcaccatgaagcggtgcagcaggacgcattagacgttatccactgcgacgtgacgcaggcggaggcggttagagcttgtctggcaactctgctcgaacgctatggacggttggatggcgtgatttttgctgccgacgctaccaccacattgacactgcatcaattgagcgaatctgcgctacgcgacacgctaacggtgaaagaacggggtactgctaatgtgctgcatgcgttagcgcaacggaatctgctggatgagcgtctgctactgctgttctgtaactcgttggctgccgtgaatgcggagattggccagacaggctatgctaccgccagcgcctatttggatgcactggcacagcaactgcgtacccgctacaaggtgaatgcgctcagtatcgggttggatgcattgcgtgagcagggcatgttgttggatgctataaacggcagtgaatacgatgtcttgcgtggactgcgcccattgatgacgggaacgttgctacaggcttataaacaacaaggggctgacaccagctactacgcgcgattatcccccgagtccgattggctgctggatgagcaccggatatccggtatcgccacgctgccgggaaccggctatctggcgctggcgtatgaagctctgcgccattactttgtgcaagaccaaatctgcattgatgaattggtctttttggcaccgttgactgtgatggacaactgcagtgttgacgtttttgttgacatttcacctaacgggcaaggagttagtgtcgaggtgaaatcaatgacggagcgctttagtggcacgttaacaacccatgccagaggcagggcgacgcgtctgatggtagacgataatgttgtgtgcgatctcacggggctgatgcgcgagatgcacactatcactcctccaacaaaggaattatcgagcacgcacttccactatgggccgcgctggcacagcgtacaacaactgtatggcaataccgcccagactcaggttttcgcaacgctggccctgcccaccgttgccgctaatgatacgatcgcactgcaccctgcgctgttggacatcgccagcagtgttgtcgaacaactgcctggttttcatactgattcggtacctttcctttatcaggatttacgcctgtaccgcccgttgccgaacaccttacatgtggcgctgactgtcaatcggcacgatgaggagggtgacagctacgctttcacgctctacgacatggcaggcgagatggttgcccgctgtgcggcaatggtgaagcgcaaggtacagctccacatacaagatgtcgatgacgacacgcgactgcgcgtgcccagtgccgataactaccaactgcggctggccgctgagggggagggggcaggaaagctagcgttgtgccctacgccgcgcttagcgctgggggattcacaagtagagattgaggtactggccaccggactgaactttaaggatgtgctgttcaccacgggattgctccggcagcagccgggtgaggctccgctgcaattgggactggagtgcgccggacgcattactcgcgtgggtaaaaatgtcactgaatttgccccgggagaggatgttatggcggtgctaaacggtggttttgtccagtacgcacgggtagaaagcgattgcgtagtgagaaaaccagcccattgtcgcatcgaacaggcggctgcgctgcctatcgcatacctcaccgcctattacgcactggtggtgcgcgctaatttgcaacccggagaacgagtattgatccacagtgcggcggggggcgttggcttggctgcgctacatattgccaaacgctgcggagcacagattttcgccacagcaggtagcgagcagaaacgcgattacttgctttcgctaggcgtacatgccgtagctgattcacacgacgaacagttcgctgccactctgctgaccgcatcggacggacaggggatggatgtgatccttaactccctcacaggccgtctgcttgacgctagcctcgcgctgctggcaccgctgggccgttttcttgagctgggcagcaaggacattgtggaagacaaagcgctaccgatgcgtttcttcgcccaaggcggcacctttattccgattaattttcacgcggcgcatggtgcgtttagtcgctacctgcaacagattgtcgcttggatagatgataacacgctaccgctccttccatgcaaatccgtaccattgcccgaggttgcacgcgccttcgccaccctgaccacgccgcagcatattggcaaggtggtggtaacgcatcgcactgcggcaggcatggaccggctgaacgccatgatagcagaaaggcgcctcggcggctatgcgctcagcatgagcaatgccgaggtgatgcgccaattgtggccgatactgaacactcgcagtccgtgggcgcaactgctgctctcacctcgggcgatcgatagattagcgcggggcaaccgggtggatcgcggtgtaccgtctgccgctaacgatacgattactcagcagacagtgaaaaagcggccccgtccggaaattggcgtgccttacagccccgcgacacgtgaagtggaacgcgtgctctgccaaatcctggaagagtatctgggtctggatagagtaggcattgacgacaactatgccgaattaggggcaacctcactcgatatggtgcaactgagtgggcaaatggcgcgtcactatccgcaagtgagcgtggtgtcgctgtacaaccacgccaccgtgcgccagctggcgacgttttgccagcccccggagggcgagtcaaatgcgccatcaccacagcctgcagtacagacgaatacgcgcgcgaatcagatagcaaaacgtgctttgcaaattgcgaaaaatactgcgcgcagtcacacgtctttgcattaa

SEQ ID NO: 71862 - DNA, 213 bp, Citrobacter koseri; identical to SEQ ID NO: 4869

SEQ ID NO: 71863 - DNA, 735 bp, Citrobacter koseri; identical to SEQ ID NO: 4868

SEQ ID NO: 71864 - DNA, 267 bp, Citrobacter koseri; identical to SEQ ID NO: 5180

SEQ ID NO: 71865 - DNA, 480 bp, Citrobacter koseri; identical to SEQ ID NO: 5181

SEQ ID NO: 71866 - DNA, 2088 bp, Citrobacter koseri
atgaaacttaagccttctttgatagctctcgcagtagcagtaaatacttcacctctggcctatgcagcagatgaaaccatcgtcgtcaccggcagtgacgtatccgactattccgccgaatccgactcggcacgtctttcatccggttcagcctcacgtctcggtctgaccgataagcaaacgccacgccatactgaaaccatcagcgccagaaccattacggctaagggaaaacgcacgctcaccgaggttgttgagaccgccccgggcatgtccggcaccagctcacctacgctctcaaacagcgtttcactgcgcggcttctccggcgtttcctggctgctaaacggcgtggctgtacccggtagcaccattcaaatcgccgacccggttcattatgaaaacgtggacatcctgtatggcacaggctctgttttaaatggtctgagttctgccggtggcagcgtcaacctgatatcacgtaaagcaacctttggtcgacagccagtagaagctgactatagctggtcaagctataacagccatcgcgcccacatcggcgcgggcggtacgcttgttgagggtatagctgctggccgcgtggatgtaagcgcatcaaataccggcactcaggttgataaagagcgcagtcgcccgaagcgcgtcagcgcacagctcctgctgacgccgaccgataacacacaggtcacttttgacatcgatcgtagcttaacggatatgcgcaatccctatttcgggacgcctgtcatcaacggcaaagttgatcgcgacttgcgccatgtaaactacaacaacattcaggatgcgcatatccgcagccaggcaacctcattccagtcaacccagtcctggtatgcaacgcctgatgtaacctttgataaccagttctactattacaaaggtttccgcgaatggcagaacgttgaacgctattacccgtcaaacaaagcgggctatgttacccgtgattcttatggcgatcttgctcatgatgacaagctgacgggcaaccgtacaatggtcacctgggatcacccgattgcatcattcgccaaccgcgtgactgcgggtgtcgatttttcaaaacgcgaattccagtactattctaacggcttcccggggggcgaagatgttctgctgaccaaccccgcctccaatgactttcgcaccggtgcgggtggcaagatgcgctcacctgttcgtcacatcactcagaaccagtatgccttgctgctggaagacaatctgaatatcactgatgctgtcgccctgttaagccagttgcgctataccaacctggacatgcactggaattaccagcaggacaataaaaccatcaatcatagctatagctttatgagcgttggtattgggccgagctgggccattaacgaaaactggacggtatatgccaactattccacaggtaaagagcccggcagcgatatcttctttatcagccctgaacaaacgtccctgccacttacagaagttcagcaatatgaagccggagtaaaagggacattcgaccacggcgaaatgaagctggccgtttacgatctccagaaaaaaaatctttatcagcaatcggctgtccaggctggtgtatggaatgcggttggcaagcagacttcgcgcggcattgagttcagcggattgattaaaccgctggatagcgtcacgctggcggggaatgtggcttatacccatgcgcgctttgacaatttcaaacaaggtacgcaggacctttccggtaatcagccgcgctatatcccggagtggacggctaacctttctggccgttatatgccgattagcaaactggggctgggcgcgcagctccactatgttggcagtagctataacgatgatgccaacaaaaacaaaatgggcgattacacgactgtcgacctgaacgccgattatgaagtgattaaggacgttaccgtaggcacccgcgtgcgtaacctgacggatcgcttctacacctggcagcgtacttatacagggcaagaaatgattgcgccaggtcgaacttacgaagcctatgtcaacatgcgcttctga

SEQ ID NO: 71867 - DNA, 1014 bp, Citrobacter koseri
atgaaacgcctggcctccctcgcattgctggcaaccttcaccagctttgcgcatcccgttacgttgcagaattgcggaaaatcctggacgtttgagcatgtaccacagcgggcaatcgtctatatgccgaccgcaatggaaaacatgctcgcattacgtctgggagattccgtgatcagtgctgtcggttatcggccagatgaagataccgcgccctccccctggtacaaaccgctaaaagcacgtctcgacagttcgccctggtcgggagaggccttgctgagttcccggccagattttatctattctggcagctactactggtttaacagcccggagaccgccggtcgtgaaaggatggctgaatggggaattggaagctggctcattgaagggatgtgcaatggcctgcaaagtgggcctcctgcgcctgtaaccttcgacagcatctacgacgagttgcgtaatattgcgcgcatatatggcgtggagccgcgcgcagaggcgcttatcaatgaactgaagcaacaggtcgcggctgacagccgcataaaactgccacgcagaacgctcatgtggtggtattccggtacggcaacaccttatgtggcgggcggttatggcgcttctgagctgttaaccaaaaccatcggcagtaaaaacatctttgataacagtgctgaactgtggcccgccatgagctgggaggtcattgccgaacgggaccctgactacctgatcctgggcgatctgcaaagagggggagatggcgacagcgcccggagcaaaatcgattttcttgaacgtaatcccctcaccgcaggcatgaaggcggttaaagcaaaacgttacatcattttacctggctatgacatggacgcatctgcgcgttcagttctggcccttcaccgactagtcacacaaatacacgctaaggaacaacatgacctttccagcccgcgaattactgaaaaactgggacgaacaacaaagcgcctacatcgctcaccgtga

SEQ ID NO: 71868 - DNA, 645 bp, Citrobacter koseri
atgctatatggcgaagaattccatgtggtggatctggcctgtggtccaggctcattcagcatgcgtcttctgaatcgctttccagcgataagagtaacagctattgacctcgacccgcttctgcttacgctggccaaagaagccttatctgaatacagtgaccgtattcagttcttcagcggcgatattgcaacagcggattgctttgccgctattaccgacaaaccgcaggccgttgtttccagcacggccatccactggctgctgccggaacagcaggtcgcgctttatcgcaacatctttaacctgctggatgaacatggcttattcatgaacgccgatcatcagcgatttgataattgcaatccatgccagaaacggattgcccagcttcatgacgaagatacgcagaaaaaagcctggacagcgggagtgcaggactgggatagctggtttgcatcggccacccgtcatcatgagctggctgatttgatggacgcgcgcaccgctatctttaaagaccgcccgacaccgctgcccaccacggtcgaattccagctcgccgctctgcgccaggcgggttttagcgaaacgggtactctctggcaattcctggatgattatgtgatcgctggctggaaataa

SEQ ID NO: 71869 - DNA, 1008 bp, Citrobacter koseri
atgctgcgttctcctgtttttcgcctttccattctgtttccggccctgatgctggcgttttgcattgccattatgtatggcccggtgaccttttccatgaaggacgtggcaaatgccatactggcaggctactggcatagcgatacagcgggaacgcttcatcagcggatcgtatggtctctgcgtatgccgcgcaccctgcttgctgcgctggcgggtgccgcattagcgctggccggaacggtgctccagtcgttgacacgtaatcctcttgccgacccctgggtgttggggatctcatccggcgcagggtttggcgcggtactggtcattgcgcttggtctcagtgcgggctgggccgctgtacctgccggggcgttctgcggcgcgatgctggctttcacactggtgcttttcatggcgcggaaatcgctatccggccagtccagccgttttatcctgaccggcgtcgccgtgacacagcttctctccgccgccacatcattaaccacgctctggaaaacggatgcagacaccacgcgaggggtgatgttctggctactgggaagctttgcacaggcatcctggcttcaggtactgctttgcgcactggtgctgctgccgatatttctgctctgctggtggcgggcaatagagctggatgtgctcacgttcggcaatgtgacggcggcgtcgcttggtgtggacgttggcgcaatcaggctcgccctgtattgtttattgaccttattgactgcggtcattgtggcatgttgcggagcaataggttttattgggctgaccgtgcctcatatcgcccgcatattcattggtcatcgccatcgatcgctgctgccggcatccatgctgtgcggcgcgacttttaccgttctggctgatacgcttgcccgaacgctgtttgcgccccgtgaattacccgtcggcatcctgacggcgatactcggggttccggtatttctgttcctgatttcacggacttcccgataa

SEQ ID NO: 71870 - DNA, 564 bp, Citrobacter koseri
atgagcttagctatcactaaagttgattatccggtcagtcaggttcgccggtatttagaaccgggcccggttgtgttggtgtcatccaaatggaacgggaagaccaatatcatgacgctgggctggcataccgttctggagttttctccctcgctggtcgggctgatgatttcgggcggcaaccacagttttgagatgatccgtcatagccgggaatgcgtgatcaacgttccgctgacggatttggccgagacggtcgtgcgaatcggcaacacgtccggcgctgacatcgataagtttgccgaatttaatcttacggcacaggaagccgatgaggttgatgccccgctgatccagcaatgttatgcgaattttgagtgctgtttgtatgatgatgtgctggtggaacgctacaattttttcattttcgaggtcgtgaaggcgcatgtggccacatcaccggaacaccctgagacgattcactatacagggaagggggagtttatggtgtcgggcaagacaatgaatctgagcgcgctgttcaggccggaaatgcttatctga

SEQ ID NO: 71871 - DNA, 1125 bp, Citrobacter koseri
atggtatctctaccttttacccgctcactgcggtttacgacgggcaccgagctggaactccagttaatcgacagaaacgataccaggctggtggataaagcggatatcgtgctggccgatatggcgcacactcagcaaataaagcatgagctaaccaagtcaatgattgaactgaacagctcagtacactcttcggtgtttaaactgcatgaagaattatctttattagcctgtaacgtcagggaagtcgccagaaaacacggctgcgatgttaccggcggcggccgccatttagatggcgactggcgagaacaggtgataagcgatttacaacgtcatcaaaatctggccgtacgctatggctacatcaccaaaatggcctgcgtatttgggcagcatattcatattggcgttcaggatggcgatgacgccatttatctgtgtcatgcgcttattccctacctgccccatttagttgcactcagcgcctcttcgccgtggctggatggcgtggatacctctttttcaagttcccgctttaccgggcaaaacgcctttctgaacagtgaactgattgaaaacatctataactgggacgagttcgtcgtattttataacgagatggtcgatgtcgggatcattaaaagtatcaaagatatttactggtacgtcaggccacagcctgctctgggcacaattgaaatcagaatatgcgatatgccgctgacaatatttcatgccgcaatgctcacaggctatagcaaaatactggctcagtatctgttagccaaccggacgaatatcgtcaaaaaacatcatgctattgaaaaatacaatatctttaacgcccggcgcgatggcttacaggccagctacgtcaacacgttaaccaggcagcgtcagtcgctggcgagtcagatattgcagaccgtagagaacctgtcattacgcacccacagtgatgaggacaagtacgttctgcaatatattgcccggtatgtcaaaaagggcatcaatgattcagacagaatacgcagtatgattaaacgcgcggtggacttaaataccgtcatggaacgtatgcgaaaaatgctgttatcagcgccaaagaattataaaaaatga

SEQ ID NO: 71872 - DNA, 369 bp, Citrobacter koseri
atgggatgggacacaagaagcgccggaaactgggcaaaacatcacgccgaaccggggccaacgaataactgtgcatcgtatgtgcgcaaggccataaaggcagggggcgtgaccgtaacaaacacgcaaaacgccaaagattacggcccaatgctggagtctgcggggtttagaaaaatatcttcaacgcaatcccccagagctggcgacgtggtagtgattcagccttacgcgggaggacacgccgccggtcacatggctatttacgacggccaggattggtattcagactttaaacagcgggatttttggggcggtcctggataccgttcgtcaaagccagcgcatcaaatgtacaggaaggattga

SEQ ID NO: 71873 - DNA, 504 bp, Citrobacter koseri
atgaaagccctttatgttgttctcatgatatttgcaattaccgcgtgcagctcaggacgcgataacgcagaacggcgtgtttcagatttctatacttactatctaaacgtgtttgcaaatagtgaagggaaaataaagcctgcgcctgaaaagatggatgaatatatttcgaaggatacgctagcccaactaaatactatctctcatatttatgagcaggagattatcgacaccgattactatacatatgcgcaagattattcagcagattggatccccttattgaaagttggaaaagctaaaaactgttttggtggtgaatacgtcgatgtttggttgggtcgacaaaacaatcagacgtatcaaattggagtctacctaaaaagagagggcggcaagtggaaaatatacagagtgaagaatgttaccgccggttatgagcattacatatttgacgcgcacgccattgagaaagcgaagcaacatgctgcaaccaccaattaa

SEQ ID NO: 71874 - DNA, 273 bp, Citrobacter koseri
atgattcagcagtcatttaaggatataagagcccactcccgccagcgtcagtcgctggcgggtcagatattgcagaccgtagagaacttgtcattacgcacccacagtgatgaggataaatacgttctgcaatatattgcccggtatgtcaaaaagggcatcaatgattcagacagaatacgcagtatgattaaacgcgcggtggacttaaacaccgtcatggaacgtatgcgaaaaatgctgctatcagcaccaaagaattataaaaaatga

SEQ ID NO: 71875 - DNA, 1056 bp, Citrobacter koseri
atgctcaccactataccaggacgaagatgcatcgccgttctgtttgcgatgctaatgtttcccggtgcggcttcggctgcgcaaaccctaatctacagcgaccatgaaccgctgggtggaatgcgcactcgttttatcaatgacgtatttttccccgcaatcgaaaaagagtcgcgtggtcgcctgaaggtagaggcgcactggggaggtgagctaagtgatggttatacggctctggctatggtgggaaagggggacaaagcggatatggccgttgttgtacctgaatatgcggctaaggtattaccattgcagcaaatctttaaaagcttccccgtcggccctgccggggaaaagcaggttgctttctttcgtcgcgtttatgcggatatcccggatttttcggcagaactcaagaaagaaaatgtggtgaatgttttcattgcgaccggctatccgctggctttttttagcactaccgcgctgaataatcctgaaggacttaaggggggaacgtggcgctccgccagtttctggcaccaggggtttctgaaaaatgtcggcgctaaagccgtgaccatgccctggggagatgaaacctacaaggccttacaaagcggaagtctcgacggattaatgttgaatgtggatagcggctatgcgttaaatgctcagcgattcgcgcctgatgtgctggtttcgcgggatctctggcttgggcatgtttacctgctggtgatgaataaaaacacctgggataacctttcccgcgacgatcgggcggcgattcaacgggccgctgacgtcgcttatcaatccctgggttccgtaatggataaaagtttcaccacacaagtcgccgatctggaaaaaagcggtgcgacggtcagaatcctgcactctgaagacgttgcgcaatggaaagccgccacccgataccaggagattcagtctgagtgggtgaaggagcaggaaaagaacgggcttaccgaggcgggaagggtgatgaaccaggtcagtagcattctggacgagatgatgtctccggccccttaa

SEQ ID NO: 71876 - DNA, 591 bp, Citrobacter koseri
atgcacaatcacctggcggatcgtcagcaaattaccgatcttctcactggctggatgcatcgcgatctgggcgagtgggagcaacttcgcgggctgtttcacccggatggcaccattgagataacctggtttgaagggctggcgagcgattttgttgacggctcaatgcgtatgggcgcctctgatatccgcaccaagcatttgattggcacgccggtagtgaccttcaatagcagcgtcaaccgcgccattgtagaaaccaatgccatgatcatcggcgagaatgtgaagctgaatctggggatggtgacccataatcgcttttacgatatggcggaaaaacgcgatggcgtgtggaaactcttcagacgccagagcatttatgacatggggagttttaccttcccgctgggcgtggtcgatattgatcaaagcacggtagcaaaatacccgcgagaatacgccgcgctggcatacctgctggaaaaaagcggatttccggtcatgcgtgtattcgcaacgcgcggtagtgcgctcgaacagcaaatgaaaaccgaagggcagcgctggctgtctgaacccgttgtttaa

SEQ ID NO: 71877 - DNA, 903 bp, Citrobacter koseri
atggatctgcgccacttacgctattttcttgccgttgcacaagaaggacactttggccgcgccgccgaaaaactcaatattgttcctcccgcgctgagcatgcagatcaaggcactggaagaagagttaggcggcccgctgtttattcgtaccagccggaaagttgagttaaccgaagcgggaaaattgttgcagactgaagcgcaacgcacgcttgagcaggcggaacatgcccgtctgacagtacaacggtcgatgcgcggagaaacgggtcttgtgcgcgtcggctttgctggcaacgcggtgttcagcggcaaattgacagaagatctgcgcgcctttcgccaggcctatcccgatgcggaactggtcgtgtgcgaaatcgcgccgttgctacaagcggatgccattctgagcggccagctcgacattggttacacacccgatcaccataacgtacgccagccagaattagcggctgaaaaaataggcctctggggccggatggtcgccatcgccgacgatcacccgctggcttgtgaaacccatttgacggtagatatgctggctgaagagcccctcattttctacgacacccaccgtgcggatgagccgctttatatgatgctcacagagattatgggtcatgttccgcacgtcgcccattgcacctccagcacgctcagcgtactggctctggccgccgccgggcaagggctggcgctggtgcctgaaccgctgatgcacatcgccattcccggcctggtctatcgccctctcgacgcgcctgagttatcggccaatctgatgctgctcagcagaaagaacgacaataacggcgcggtaaaggcttttctggagattgcgcggagaaacgtcagaaccccgtcagacccgcgctga

SEQ ID NO: 71878 - DNA, 933 bp, Citrobacter koseri
atgatgcctcgtgtgaaattgttttgttcttttattctgctgttcgcaagccagagcgcgctggcggtaagttatccactaccgccagaagggagtcgtctggtcggcaacccgctgacgataaccgtcccggacaataatactcaaccgctggaagcgtttgcggcgcagtacggacaagggctgagcaatatgctcgaagcgaatcccgatgtggacgtctttttgccgaagtccggttcgacgctggtggtgccgcagcagcttattttgccggataccgtgcgtgaaggcattgtggttaacgtggcggaaatgcgtctttactactatccgaaagggggtgataccgttgatgtcctgccgattggcattggcgaggcggggcgagaaactccacgtaactgggtgactgcggtagagcgtaagcaggaggcgccgagctggacgccgacggcgaatacccgacgtgaatatgctaaacgaggcgaaagtctgcccgcgtttgtccccgccgggccggataacccgatggggctgtatgcaatttatatcggtaagctgtatgccattcatggcacaaatgcgaacttcggtattgggctgcgcgtgagccaggggtgcatccggttgcgtaacgatgacatcaaatacctgtttgacaatgtaccggtgggcactcgcgtgcagattatcgatcaaccggtgaaaaccaccgtcgaagcggacggcagtcgctggattgaagtgcatgagccgttatcgcgtaatcgcactgaatttgaatccgacaaaaaagtaccgctgccgatcacgccggtgatgcgtacttttatgaagggcgacggcgttgacattcatcgcgtcaacgaggcgctggagcgccgctccgggatgccgacaaatatcagcgcgggtctgacggggttctga

SEQ ID NO: 71879 - DNA, 1059 bp, Citrobacter koseri
atgcagacgttaacctctttactccgtgatattcccaaaccagacagcgacgcaatggcgcgcgcccggcagcacattgacggcttgctcaagccgccgggcagcctcgggcgcctggaagcgctggccgtacagttagcggggatgcccggtctcaacggcactccgcatgtcggtaagaaggcgatgctggtgatgtgcgccgatcatggcgtgtgggatgaaggggttgcggtctcgccgaaagttgtcaccgccattcaggcggccaacatgacgcagggaacaaccggtgtttgcgtactggctgctcaggccggggcaaaagtccatgtgattgacgtcgggattgatgccgacccgatccccggcgtggtgaatatgcgcgtggcgcgtgggtgcgggaatatcgcgacaggcccggcgatgagccgcgttcaggccgaagaactgctgctggaagtgatgcgctacacccgcgaactggcgcaaagcggcgtgacgctgtttggcgttggcgaactgggaatggcgaataccacccctgcggcggcgatcgtgagtgtactgaccggtagcgatgccgaagatgtggtggggattggcgcgaatcttccgctctccagaattggcaataaagttgaggttgtgcgccgcgctattgcggtaaaccggcccgatccgcgtgatggcgttgaggtgctggcgaaggtgggcggttttgacctggtcggtatggcgggcgtgatgctgggtgccgcatcatgtggattgccggttgtgctggatggttttctctcctattctgcggcgctggcggcgtgtcaggttgcgggggaaattaaaccgtatctgattccgtcgcatttctcggcagagaagggcgcgcggattgcgctggagcacctggagctggagccgtatctgcatatgggaatgcgtcttggcgaaggcagcggcgcagcgctggcaatgcccatcgttgaagccgcctgcgcaatgtaccgcaacatggggcaactggcggcaagtaatattgtcctgccggatggtaaataa

SEQ ID NO: 71880 - DNA, 744 bp, Citrobacter koseri
atgagtaagttgttctgggcgatgctcgcttttatttcgcgtttgcctgttccgacccgttggtctcaggggctggattttgaggagtattcccgcggtattgtgacattcccgctaatcggcatgctgctgggcgcgattggcggcctggtgtttgtggcgcttcagtcctggtgcggcattccactggcggccctgttttgcgttttgacgctggcgctgctgaccggcggttttcacctcgacggtctggcggatacctgtgacggtattttttccgcccgccgccgggagcggatgctggaaattatgcgtgacagccgtctgggcacccacggcgggctggcgttgatttttgtcctgctggcgaaagtgctggtgattagcgaactggcgctgagaggcacgccgatgctggcggcgctggcgatggcctgcgcggcggggcgcggtgtcgccgtattgctgatgtatcgtcatcgctatgcccgtgaagaagggctgggcaacgtgtttatcggcaaagttaccgggcgacaaacctgcgtgacgctgggattaaccgctattctcgcggcgatactcatgccggggatgcgcggggtcgctgcgctggtggtcactctggcggcaatttttattcttgggcaattattaaaacgcacgttgggtgggcaaaccggcgatacgctgggtgcggcgattgaacttggcgagttgatcttcctgctggctctgctgtga

SEQ ID NO: 71881 - DNA, 546 bp, Citrobacter koseri
atgatgattctggtgaccggcggcgcgcgcagcgggaaaagccgccatgcggaggcgttaatcgcggattcgccgcaggtgctgtacatcgccacgtcgcagatttttgacgaggagatggcggcgcggattcagcaccatcgggatggcagaccgccgcactggcggacagcggaatgctggcggcatcttgatgcgctgattacgccagataacgcccccgaagaggccattctgctggagtgtatcacgaccatggtgaccaatttattgttcgcgatgggcggcgatactgacccggataactgggattacgcggcgatggagcaggcgattgaagatgaaattcgcacgttgatcgacgcctgtcagcgctgtccggctcaggtggttctggtgaccaatgaggtgggcatgggcattgtcccggaaaatcgtctggcgcgacattttcgcgacatcgccgggcgcgtcaatcagcgtctggctgcggcggcggatgaggtctggctggtggtatcgggtattggagtcaaaattaaatga

SEQ ID NO: 71882 - DNA, 1521 bp, Citrobacter koseri
atgacgcaggcagtaatgttgcagggaacggcatcagatgtaggtaaaagtgtgctggtggcggggctgtgccgcatcttttatcaggatggcctgcgcacggcgccgtttaagtcacagaatatggcgctgaattccggcatcacgccggacggcaaagagatgggacgcgcgcagattttccaggcggaagcggcggggatttcgccggatgtgcggatgaatccggtcctgctgaaaccgaccagcgatcggaaagcgcaggtggtgttgatgggcaaagtcgccaccgatatggacgcggttagctaccatgaatataagccgcgtctgcgtgagcagatcctcacggtttacaatagcctggcgcaagaatatgacgttctggtgctggagggcgccggtagcccggcggaaataaacctgcgtgaccgcgacatcgtcaatatggggatggcggaaatggcgcaatgcccggtcattctggtggcggatatcgatcgcggcggcgtttttgcctctatctacggtacgctggcgctgctgcatgatagtgaacgcgccagagtgaaaggggtgatcatcaataagtttcgcggtgatgtgacgctgctctactccggcattgaacaaattgaagcgctgaccggcgtgccggttctgggcgtgatgccctggctggaggtcgatcttgaagatgaggatggcgtggcgctgcaaaaaggcaaatacctgcgtaccgataagcgtgatatcgacattgccgttgttcaggtgccgcacatctcgaatttcaccgattttaacgcgctggcggcgcagccggatgttcgcgtgcgctatgtgcgccatcctgaagaactggcgggtgcggacctgataatcctgccgggcagcaaaaatacgcttggcgatctggtctggctgcgtgaaagcgcaatggcgcatgccgtgttgcaggcgcatcgtcagggcgtaccggtggcaggtatctgtggcggctatcagatgctgggcgacaccattattgatgaggtggagtccgggctgggcacgctccccggtcttgggctgcttaataccgtcacgcacttcgcgcaggataaaaccaccacgcaggttgaagggcagatggcctctgcgctgccgggatggctggcggcggcgtctggcctggcggtgcgcgggtatgaaattcatatgggcgagacgacactgaatgcacaatgccagccagctatgacattacgcaaaggcgaaaacgctatcgctgacggcgcggtaacggacgacggactggtctttggcacttatcttcatggcttgttcgacagcgatgcgttcacgcgggcgctggtcaatggcctgcgcgtgcgtaaggggctgacgccgctggatcacgccttccattacgcgcaatataaatcgcagcagtttgatctgctggcggatgcgatgcgacaacacatcgatattgagaaaatttataccatcatgcagcagcaccgggagcccgtatga

SEQ ID NO: 71883 - DNA, 816 bp, Citrobacter koseri
atgcttgccacctccggtctctggtttcgctatcaggatgagcaggtgctcaaggggctaacgctggatttctccccccatgcggttaccgggctggtgggcgcgaacggctgcggaaaatcgacgctatttatgaacctgagcggtttactgcgcccgcaaaaaggcgaggttttgtggcagggaaaagcgctggattacagtaagcgcgggctgctggcgctgcgccaacaggtggcaaccgtttttcaggaccccgatcaacaaattttttataccgatatcgacagcgatatcgcttttagtctgcgaaatctaggtgtggctgaggatgagattgcccgccgcgtggacgatgcgttgaccctggttgatgcgcagcatttccgtcatcagccgatccagtgtttaagtcacgggcaaaaaaaacgcgtggcgattgcgggcgcgatggtgttgcaggcccgctacctgctgctggatgaacccactgccgggcttgatcctgccgggcgcacgcagatgattgcgatcatcaagcggattgtggcgcaggggaatcatgtggttatttccagccatgatattgatctcatttatgaagtcagcgatgccgtttacgtgctgcgccgtggcgaggtactggcatacggtgaaccgggggaggtgtttgcacgcactgaactgatcgaacaagccgggctgacgcaaccgtggctggtcaaactgcatgcgcaactggggttgccgctgtgtaaaacggaagaagaattttttgggcgtatgcgagagaacgcgctgaaggaggcgtcatga

SEQ ID NO: 71884 - DNA, 678 bp, Citrobacter koseri
atgaccgggcttgatcgactcagctaccagagccgctggcttcatgttacgccggtgcgtaagtttttgctctggttgctgatgatgattctggcctttaccctgcctcctttggggcagggtattgaactggcgctcatcgccgggctgagctgctggctgctgcggatttcgttctggcgctggtgtcgctggatggcgataccgtttggctttttaagcgtgggcgtggtgacgattttattcagcgtgagccgcgatcctcactcgttactggcaagcgttccggttggcgattactggctgggggtgacttcgtcagggttgaataccgccaatgaaaccttctggcgcagcctgagcgcactggcggcgacgttctggctggtgttgaatctgccgtttccgcaactgattattttgcttaagcgcgcgcatgtgccacggctgctgaccgagcagatcctgctgacatggcgctttatttttatcctgttagacgaagcgctggccattcatcgcgcgcaaacgctgcgttttggctatcgtagtttgccgaaaggctatcgttctctggcaatgctggtgggtttgctgtttacgcgtgtgcttatccgctatcagcaaatgaccaccgtgcttgatatcaaactgtatcagggtgattttcacctgtaa

SEQ ID NO: 71885 - DNA, 282 bp, Citrobacter koseri
atgaaaaagacgctgatattgttagctatggtgattgccctggtgatcctgccgttttttatcgatcatggcggtgagttcggtggctctgacggcgaagcggaaagccaaatccaggtggtggcgccgcactatgaaccgtggttccagccattgtatgaaccggccagcggtgaaattgaaagcctgctgtttacgctgcaaggttcgcttggcgcggcggtgattttctatattctcggttacagcaaaggcagacagcgccgtgatgaccgggcttga

SEQ ID NO: 71886 - DNA, 738 bp, Citrobacter koseri
atgaaacttgaacaacagctaaaacagctgtctttcagcgggttagctgcggcgttattgctgatggttgtcccggaacaggcgttcgccatgcatatcatggagggattcctgccgccgatgtgggcgctggcctggtgggtgctgtttttaccgtgcctgtggtacggactggtgcgcctgcgccgtatcgtgcaggaagataacaaccagaaggtgctgctggcattgtgcggggcgtttatcttcgtgctgtcggcgctgaaaattccttctgttacaggtagttgctcgcacccgacaggggtagggcttgcggtgattttatttggcccaggcgttgtggcgatcctcggggcgattgtgctgctgtttcaggcgctgctgctggcgcatggcggcctgaccacgctgggtgcgaacgggatgtcgatggcggttatcggccccgttgtcgggtatctggtatggcaaatggcctgccgcgccgggctgcgccgcgatgttggcgtctttctttgcgccatgctggcggatctggtgacgtacttcgtgacgtcggtacagcttggggtggcgttcccggacccgcaggcaggggcaatggggtcagtgattaaatttatggggattttctgcctgacgcagatccccattgcgatcgcggaggggctgctgaccgtcatgatttacgaccagttgaccaaacgccggttgattaccgcacaaggacattaa

SEQ ID NO: 71887 - DNA, 714 bp, Citrobacter koseri
atgagtggaaagctgtatgcgttaagcaccgggccgggcgcagccgatctgatcaccgtgcgcgcggcgcgaatacttggctcgctcgatatcctttacgctccggcagggcgcaaaggcggcgacagtctggcgctctctattgtgcgtgaatatctgggtgagcagacggaagtccgctgctgccactttccgatgagcgccgacagcgcggaaaaagaagccgtctggaatgaggtagccgcagcgctggttcaggaagtggaggcgggtaaacaggtggggttcatcaccctcggcgatgccatgctgttcagcacctgggtctttttactccagcggatcggcaacccggcgtggctggaaatcgttcctggcgtcacctcgtttgccgccattgccgcccgcgcgaaaacgccgctggcgatggaacaacaatcgctggcggtgatctcctgcactgcggcggaagagacaattcagcaggcgttaagacagcatgacagtctggtgctgatgaaggtctacggtcgcttcgcgcgcattaaagcattgctgcaacaggaaggtttgctggagtgcgccctgatgatggcggaagccacgctgcccggtgagcagtgctggcgtcacctgaatgaggtcagcgacgagcagccgctgccctatttttcgaccattctggtcaacaaacagtgggagtatgcagaatga

SEQ ID NO: 71888 - DNA, 795 bp, Citrobacter koseri
atgaaaaaagcgcttctggtggtgagttttggcaccagctatcacgacacctgtgagaagaacattgtggcctgcgaacgcgatctggcagccagctgcccggatcgcgatctgtttcgcgcgttcacctccgggatgattatccgcaagctcaaacagcgtgacggcattgaaatcgatacgccgcttcaggcattgcagaagcttgctgaacaggggtatcaggatgtggcgattcagtccctgcacattattaacggcgacgaatacgaaaaaattgtgcgtgaagttcagactctgcgcccgttatttacccgtcttacgctcggcgtgccgctgttgagtagccatgccgattacgcgcagctgatgcaggctttacagcagcagatgccaacgcttggcgcgacggagaaagtggtgtttatggggcacggcgccagccatcacgcctttgcggcctatgcgtgtctggaccatatgatgacggcgcagcgttttccggcgcgtgtgggagcggttgagagttacccggaggtggatattctcatcgggagcttacgtcaggaaggcgtaacggcggtgcatctgatgccgctgatgcttgtcgccggcgatcatgccattaacgatatggcttccgatgaagaggactcctggaaaacgcagttcaacgccgcaggcatcccggcgacgccgtggctgagcggtctgggggagaatccggcagtacgcgccatgttcgtggcgcatctgcaacaggcgctgaatacggccatggaggaagcggcatga

SEQ ID NO: 71889 - DNA, 786 bp, Citrobacter koseri
gtgagttacggcgacgtgctggttatgggcggcaccagcgatgcccggatgctgtgtcagcaactggatgcggcaaaggtggcatacaccctgtcggttgccacgccgacaggaaagcagctggctggcgacattaaaggtcagatccgctgcgggcgcctggagccagaggagatggtggcctggctgaaagcgcaccgcacgcgttgggtcattgatgcgtcgcacccgtatgccgaggtcgtcagccgcaacattatgcacgcctgtgaacgcgcgggggtgttgctgagccgctatcagcgcccggaacagctcagcgagcttacgcacccgctgttgcaccatgtccacacgattgctgaggcttgcgatgtggcgcagcgctttggcgaacgcgttctgttaacgaccggaagtaaagatctggcgacctggcgagccgggttgccgcacaaaaaactgctggcccgcgtcttacctgttcctgaggtcattcagcaatgtgccgacctgggatttggcgttggtgagattttcgccctgtgtgggccgttcagcgctgaatttaacgcggcgttttatcgtcagtgccaggccgatgtcgtggtgacaaaagcatcgggggcggagggcggttatcaggaaaaagttcaaccctgtctggatgccggtatcccctgcatcgtgattacccgcccggcaacgcttgtaacgggtgatgagttactggaaagtcaggccgcatttgcgcagcgtttggcgcgctggctggccgctgcttaa

SEQ ID NO: 71890 - DNA, 726 bp, Citrobacter koseri
atgttaagcgtaattggaattggccctggctcgcaggcaatgatgacgatggaagccgtagaagccttacaggcggcggaaattgtcgttggctataaaacgtacacccatctggtaaaagcctttaccggcgacaagcaggtgatcaaaaccggaatgtgcaaagagatcgaacgctgtcaggcggcgattgaactggcgcaggccggacacaatgtggcgctgatcagcagcggcgatgcggggatttatggcatggcggggctggtgctggaactggtcagcaaacagaagctggatgttgaagtgcggctgatccccggcatgaccgccagtatcgcggcggcctccctgctgggcgcgccgttgatgcacgatttctgtcatatcagcctgagcgatctcctgacgccgtggccggtcatcgaaaaacggattatcgccgccggagaagcagacttcgtgatctgtttctataacccgcgcagccgtggccgtgaaggtcatctggcgcgtgcttttgaactgctgtccgccagcaagaacgcgcaaacgccggttggcgtggtgaagtcggccgggcgtaaaaagcaggaaaaatggctgaccacgctcggcgatatggattttgagcctgtcgatatgaccagcctggtgattgtcggcaacaaagccacttacgtacaggatggtctgatgatcacgccgcgaggttacgtactgtga

SEQ ID NO: 71891 - DNA, 1056 bp, Citrobacter koseri
atgaataccgtaaagcctgaatctatagccctgttttgtctgacgcccggcggcgtacagcttgcgaagcggctggcggcgatgctgccgttaacctgctttaccagtgagaaactgctggaagacgggtttatgcccttcgaaggcggatttgcacaatcggcccgcgatgcgtttgctaactattcggcgctgatttttatcggtgcgaccggcatcgcggtacgcgtgctggcgccgctggtaaacgacaaattcagcgacccggcggtggtggtgatcgacgagcggggccagcatgtgatcagcctgctctctggtcatgcggggggcgccaatgcgctgacccgctatctggcgggcatgctcggcgccgatccggttatcacgacggcgactgacgttaacgatatggcggcgcttgatacgctggcatttcagctcaatgcccggatgaccgacttccgctcggcggtaaaaatcgtcaaccagatgctggtcagccaccagcgcgtcgggctgtggtgggatgaggaactggcagacgatgtcagtcactgcgatcgacgcgggttcatcaccgtgaccgacctgcaccaacttcctgagcttgatgcgctgatttgcatcactttgcgcaatgaattgccagaaatacccgtccgacactggaagctggtgccgcagcgggtggtcgccggaatcggctgtcgccgcgacacgccgttcccgctgctggcagcgctgctggcgcgacagctggaggcgcagaaatttgatccgctggcgttgaaagcgattggcagcgtctcgctcaaaaaagatgagcaaggattaatccagcttgcctcctgctgtcgcgttccctttgaaacctttaccgctgacgcgttgcgtgagcatgaacatcgcttcccggcctccagatttgtgcggcaaaccgtcggtgtgggcagcgtatccggcccggcggcctggctgttaagtcacggaaaactgtctggcgaaaccctgcgcgaacagggcgtcactattactttgggagtttcacactga

SEQ ID NO: 71892 - DNA, 774 bp, Citrobacter koseri
atgtctgagacatttgatccccgctgtgtatggtttgtcggcgcaggtccgggcgatcgtgaactgatcacgctcaaaggttatcgcctgttgcaacaggcgcaggtcgttatttatgccggatcgctgattaatactgagctgctggactattgcccgccaggcgctgagtgccacgacagcgccgaactgcatctggagcaaattctggatctgatggaagcgggcgtgaaggccggaaaaacggtcgtacgcctgcaaacgggcgatgtgtcgctgtacggctccgtgcgtgagcagggcgaagaacttacccgacgcggcatcgactggcaggtggtgccgggcgtcagcgcgtttctcggcgctgctgcggagctggggggggagtataccgtcccggaagtttcgcaaagcctcatcattacccgcctggaagggcgtactccggtgccggaacgtgaacaactggagtccttcgccagccaccagacgtcaatggcgatttatctctccgtgcagcgtattcaccgggttgccgagcggctgattgaaggcggctatccgaccaccacgccggtggcggttatctacaaagcgacctggccggaaagccagaccgtgcgcggcacgctggcggatatcggcgacaaagtacgtgaggcgggtatccgtaaaacggcgctcattctggtcgggaatttcctgggggatgagtatcactactcaaaactctatgcggcggactttagccatgaataccgtaaagcctga

SEQ ID NO: 71893 - DNA, 570 bp, Citrobacter koseri
atgaaagatgagctttttctacgtggcgagaacgtgccgatgaccaaagaagcggttcgcgcgctcgcgctgtcaaaacttgatttgcaccgtgccagccatctgattgacgtaggcgccgggaccgggagtgtgtcgatagaggcggcgttacagcacccttcgctgcacgttacggcgattgaacgtaacccggcagccctgcggttgctggatgaaaaccgccagcattttgcctgcggcaatatcgacattctgccgggtgaagcgccgatgacgatgactgaaaaagcggatgcggtgtttatgggcgggagcggcggccatctgacgacactgattgactgggctatgcggcaattgcatcccggcggccgtctggtgatgacctttatccttcaggaaaacctgaatactgcgctggaatatctgacacagattggcatccatgaggtggattgcctgcaagtgcaggtgtcgtcactcactcccctcggcaatggccactatttcaaaccgaataatcctgtttttgttatcgcctgtcagaaggaagagaaccatgtctga

SEQ ID NO: 71894 - DNA, 606 bp, Citrobacter koseri
atgctaacggtagtgggcatggggccggcagggctgcatttgatgacgccagcggcacgcgaggtcgtggcggatgccgatgtgctggtgggaggaaagcgtcatttattgcagtttcctgcgttcaccggcgaacagtttgttctgggcgccaatattgcggaattgctcaactggattgccgggcagcaggacaaacgcattgtggtgctggcgtccggcgatccgctgttttacggcatcgggacgcgcatggtggcccattttggcattgagcgggtgcgcattattcccggtatcagcgcagtgcaatatctgtgcgcgcaatcgggtatcgatatgaacgatatgtggctgaccagcagccacggtcgcagcgtctgttttgatgagctggcgcgtcatcgcaaggtcgcgatggtgacggatgcccgctgcgggccgcgagaaattgcgacgcagttaatggcgcgcgacaaggggcatcgctggatggtgataggcgaaaacctggcaatggaaaacgagcggattcactggctgcgcgtcagtgaagtcaatgccgactatgacatgaacgcagtggtgatccttgatgaaagatga

SEQ ID NO: 71895 - DNA, 1140 bp, Citrobacter koseri
atgagcgatcaatccttcgacgcgcctgtctggcacaacggcaaagcgttgcgaaaagggtataccaccggatcgtgcgcgaccgcggcggcaaaggtcgccgcgttgatggtgttacgccagcatctgattcatcaggtctccatcgttacgccgtccggggtgacattgtgcctgaacgtcgagtcgccgcacatcgaagggcggcaggcgattgccgcgatccgtaaagacggcggcgatgatgtcgatgccacgcacggaatgctgatttttgcccgcgtaacgctgaacgatagcggcgagattacgttgcagggcggggaaggcgtgggaaccgtgacgcgtaagggaattggactgccggtgggcagcgcggcgattaatcgtactccgcgccataccattgagtctgtagtacgcgaagcgataggcccggcgcggggagcggatattgaaatttttgccccggagggggaagaacgggcgcagaaaacctataacgcgcgcctcggtattctgggcggtatttcgatcattggaaccaccggcattgtcactccgatgtcggaggagagctggaaacgctcactgtcgctggagctggaaatcaaacgcgccgccggtctggaacgcgttgtgctggtgccgggaaaccacggcgagcgttttgtacgcgaacagatggggatcgacacgcaggttgtcgtcaccatgagcaatttcgtcggctacatgattgaagaagcggtacgtctgggatatcgccatatcgtgttgatcggccatcccggtaagttgattaaaatagccgcggggattttccacactcacagccacatcgcagatgcccgcatggaaaccctggtggcgcatctggcgctgcttggcgcgccgcttgagttactgactcgggtcagcgactgcgacaccaccgaagcggcaatggaacacattgaagcatacggttttcaacatatttacaaccatcttgcgcaacgcatctgtatgcgcgtgatgcagatgctgcgcttcacgaaaacgccacctacctgcgacgccatcatgttctcttttgataaccagatcctcggtagcaatcgtccgatcgaagagattgtggaggagatgcaatgctaa

SEQ ID NO: 71896 - DNA, 633 bp, Citrobacter koseri
atgcaatatattcagcagccccaggcgattgaggccaaaagtttcgacatcattggcgagatcattcgcgagacacgcccggagtatcagtttgccagcccgcttcacgaagcgatcatcaagcgggtgattcacaccaccgccgactttgactggctggatattctctggttttccgatgacgcgctggagcgactctgcgcggcgctgaatcgcccatccattatctataccgataccacaatggcgctttccggcatcaataaaacattgctggcgacgtttggcggtgaatgccgttgctatatcagcgatccaagagttgtggcggaagcaaaagcgcaggggattacccgatcaatggcggcggtggatatcgccgtgacggaagagagtgaaaaggtgtttgtattcggcaatgcgccgacggcgctgttccggttgcttgagcatgacgttgctgtgagcggcgtggtaggcgtaccggtcgggttcgtcggggcggcggagtctaaagatgcgctgacgaaaagcgcgttgccagctatcgcggcgctggggcgtaaaggaggaagcaacgtcgccgccgcgatcgtaaacgccatgctctattacttgcagggggtgcgatga

SEQ ID NO: 71897 - DNA, 960 bp, Citrobacter koseri
atgaccgtgcttgcgtggtgtatcgcctggcttctggatttcgttattggcgatccgcagaactggccgcatccggtacgctggattggcaatttaatctcagcaactcaacgtgttgtgcggcgttactgccatagcgacatatcgctgcgcattggcggagcggtgatgtggctggtggtggtcggcgtgacgtgggcggtttcctggggcgtgctggcgctggcgagcgagatccatcccttgtttggctggctggtagagatctggatgatttttaccgtgctggctggccgctgtcttgcgaatgctgcccgcgatgttgaacgcccgctgcgggcgggcgatttagctgaaagccgcgagaagctgtcatggattgtcggacgggatacctcacagttacagcctgaacaggttaatcgtgccgtggtggaaacggtcgccgagaacaccgtagacggcatcatcgccccgctttttttcctctttttgggcggcgcgccgctggcaatggcgtacaaagccgtaaataccctcgattcaatggttggctataaacacgaaaaatatcgcgccattggtatggtcagcgctcgtctggatgatattgcgaacgttatcccggcgcgtctgagctggctgctgctgagcattgccgcgacgttgtgtcgttacgacggctatcgcgccctgcatatcggctggcgggatcgctacaaccacagcagtcctaactgcgcgtggtcagaagcctctgttgccggtgcgctgggtattcgtcttggcggcccgaatgactactttggcgagcgtgttgaaaaaccctggataggcgacgcgcagcgcggcatttcagtagatgacatttcccgaacgattcgattgatgtgggtagcctcgaccctggcactggcgctgtttatcgccgtacggtgcctgctggttggcgcagcctga

SEQ ID NO: 71898 - DNA, 1380 bp, Citrobacter koseri
atggcggcaaagcttcacgcatttattctcgcaggaaccggaagcggctgtggtaaaaccaccgtcacgcttggtctgctgagtctgctgaaaagacgtggaatgcgtgttcagccatgcaaagtcggccctgattatctcgatactggctggcatacggcagtatgcggcagtgcgtcccgtaacctcgacagctttatgctcccggagcccgtgcttaacgcgctgttttgtgaacacatgcagcaggcggacgtcgcggtgatcgaaggcgtgatgggactctatgacggctatggcaccgacccgaactactgtagtacggcggcgatggcgaaacagctgggctgccccgtgattttgctggtggacggtaaagccgtttctacctctattgccgcgacggtaatgggatttcagcactttgatcctgacctcaatatcgctggcgtgattgttaatcgcgttaatagcgaaactcactaccaactcctgaaaacggcgattgaacgctattgttcgctaccggtgcttggctatgttcccggagtggaaggcgtggcgttgccggagcgtcatctggggctgattaccgcgcgtgagtccgtcgttaatcaacagccgtggcaggattttgccgatacgcttgaacgaacgctggacattgatgcgcttctttccctgagtcagctaaccgcgctgcctgctggcgagtggccggcgttacccgacccgcaggcgggaaaaggacttaccgttgccatcgcggatgacgaagcgtttaacttttactatcccgataacatcaaactgctggaacgtactggcgtaacgatgacgcgttttagtccactgcatgacagcacgctgccggaatgccagatgatctggctgggaggcggataccccgagctacacgccgccgcgctggcggcgaacaccccaatgctggcgcaaatgcgcgccgcccatcagcgcggcgtggcgatttatgcagagtgcggcgggctgatgtacctcggcagtaccctggaggacgccagtggagagatccaccggatggtggatgtgattccggggcacagcaaaatggggaaacggttgacccgcttcggctactgcgaagcgcaggccagagagcaaacgctgctggcggcggcgggcgaagtgctgcgtggacatgagttccactattctgattttctcccggaaaacccggcggtgatggcgtgccgtaaagtccgcgatggtaagacattgcaggaatggtctggcggctggcaggtgggaaatacctttgcaagctaccttcacgttcatttcgcacaacgccctgcaatgctgaaccactggctggcggcaggaagggaggcgctatga

SEQ ID NO: 71899 - DNA, 912 bp, Citrobacter koseri
atgatttctgcgagtgccctgaactcagaactcattaataaaatcgcacaggattttgcacaagccaccagtctggcggtcgtggttgtcaatattcacggtgatgaaatttctgagttattcaatttcacgcctttttgtcagctaatgcgtcaacatcctcaacacagtattcgttgccgtatgagcgatcgctgcggggggctggaagcgtcaaaatcagatcagccctgtatttatcgttgccatgccgggctaaccgatttctccattcctttggtgattgccggtcatctggtggggtttgtgttatgcggtcaggtacgtttaagcgatgatgtcggactggttgatattcttaatgtcgatgatcgctggcaggccgatcctgaactgttgaatgagttccgaaacgtccccgaaatggactacgcgcgggtgatagcctctgcggatctgctgaagctgattgtggaaaattgccttaaaaaacaacttaattttgttgttattaaagacaatccgccgcaagcggaacctgctcgttcgcaacgtgggcccaatccccacgacagcaaaatgaagaaagcgttacgctacattgatgcgcatttatcggacgatcttcgccttgaggatgtcgcttctcacgtctacctcagcccgtactactttagtaagttattcaagaaatatcagggaatcggttttaatgcctgggtaaaccaacagcgcatggccagcgccagagagctgctttgtcacagtgactggagtatcgccagcattgcacgtaatttaggcttttctcaaaccagttatttttgcaaagtgttccgtcagacctatcagatcacgccgcaggctttccgtcagcaaataaatgataattcgtccgccgagtctgcataa

SEQ ID NO: 71900 - DNA, 810 bp, Citrobacter koseri
atgaacgattcactaaaagcacaatgtattgccgagtttttgggcaccgggctgtttttgttctttggtatcggttgcctgagtgcattaaaggttgcgggtgcgagtctgggattatgggagatctgcatcatttgggggcttgggatctcgcttgccgtttatctcacggccgggatatcgggcgcgcacctgaacccggcgattaccattgcgctgtggttgtttgcctgtttccctgggcgaaaggtcttgccttattccatcgctcaggttgccggagcgttcggcggcgcgctgttggcctatctgctctacggtagcttatttaccgagtttgaagcggcgaaccatatggtgcgcggcagcgtggagagtctgcaacttgccagtattttcagtacctacccggcagccgcgctgagcgtatggcaggcggcgctggtcgaagtggtcattacctcgattctgatggggatgatcatggcgctgaccgatgatggcaatggggttcctaaagggccgctggcgcctttgcttatcggtattttggttgccgttatcggggcatctaccgggccgcttacggggtttgcgatgaatccggcgcgtgattttggtccaaaattattcgcgtggtttgccggttggggagacattgccatgaccggggggcgcgatattccttattttattgtgccgattattgcgccgattgtcggagcttgcgccggagctgcggtttatcgctacctgattggtaaaaatttaccgtgcaatgcctgtaagctggaggaaaatggacgttaa

SEQ ID NO: 71901 - DNA, 285 bp, Citrobacter koseri
atgcaacaagaagcattaggaatggtagaaaccaaaggcttaaccgcagccatagaggccgcagacgcaatggtgaagtcagccaatgtgatgttagtcggctacgaaaaaattggctccgggctggtaacggtcatcgttcgcggtgacgttggcgcagtaaaagcggcaaccgatgcgggcgccgctgccgcacgcaacgtgggagaagtgaaagccgtacacgttattccacgccctcataccgatgtagaaaaaatcttaccaaagggaattagccaatga

SEQ ID NO: 71902 - DNA, 813 bp, Citrobacter koseri
atgagcagcaatgaactggtggaacagatcatggcgcaggtgattgcccgtgtggcaacgccagaacaaacggccattcctgaagaaacccacccaatacgagagacggctatggcagagaaaagttgcagtttaacggaatttgtcggcaccgcgattggcgacaccgtctgtctggtgatcgcaaatgtggacagtgccttactggaagcgatgaagctggaaaagcgctaccgctccatcggaatccttggcgcgcgaactggcgcaggcccacacattatggccgccgatgaagcagtaaaagcgaccaataccgaagtggtcagcattgagcttccccgcgataccaaaggcggcgcaggccacggttcgctgattattttaggcggcaatgatgtttcggacgtgaagcgcggcattgaagttgcgctgaaagaactcgaccggacgttcggcgacgtatacgccaatgaagccggacatatcgagctgcaatacaccgcccgcgccagctatgcgcttgaaaaagcctttggcgcgccaattggccgcgcctgcggcgtgattgtcggtgcccccgcctccgttggcgtactgatggcggataccgcgctgaaatccgccaatgttgaggtcgtggcttacagctctccggcacacggcaccagcttcagtaacgaagccattctggtgatttccggggattccggtgcggtacgtcaggcggttatttcagcccgtgaaatcggaaaaaccgttctgtcgaccctcggcgcgacgccgaaaaacgatcgtccgtcctacatctga

SEQ ID NO: 71903 - DNA, 1665 bp, Citrobacter koseri
atgagatcgaaaagatttgaagcactggcgaaacgccctgtgaatcaggacggcttcgttaaggagtggatcgaagaaggcttcattgcgatggaaagcccgaacgaccccaaaccgtcgattaaaatcgttaacggcgcggtcaccgagctggacggcaaagccgccagcgaatttgacctgatcgaccactttatcgcccgttacggtattaacctggcgcgcgcggaagaagtgatggcgatggactcggtcaaactcgccaatatgctgtgcgatccaaacgtcaaacgcagcgacatcgttccgctcaccacggcgatgacgccagcaaaaatcgttgaagtcgtctcacacatgaacgtggtagagatgatgatggcgatgcaaaaaatgcgcgcccgccgtacgccttctcagcaggcgcatgtcaccaacgtgaaagacaacccggttcagattgccgccgatgccgcagaaggcgcgtggcgtgggtttgatgagcaagagacaacggttgcggtcgcgcgctacgccccgttcaatgctatcgctctgctggtaggctcccaggtcggtcgcccaggcgtattaacgcagtgttcactggaagaagccaccgaactgaagctcggtatgctgggccacacctgctacgccgaaaccatttccgtctatggtactgaaccggtctttaccgatggcgacgataccccctggtcaaaaggcttcctcgcctcttcctatgcctctcgcggcctgaaaatgcgctttacctcggggtcgggttccgaggtacagatgggctatgctgaaggcaaatcaatgctctatctggaagcccgctgtatctatatcaccaaagccgcaggcgttcagggtctacagaacggttctgtcagctgcatcggcgttccttctgccgtaccgtcaggcattcgcgccgtactggcggaaaacctgatctgctccgcgctggatctggaatgcgcctccagtaacgaccagaccttcacccactccgatatgcgccgtaccgcgcgtctgctgatgcagttcctgccaggtactgacttcatctcctcgggttattccgccgtaccgaactacgacaacatgtttgccggttcaaacgaagatgcggaggacttcgacgactacaacgttatccagcgtgacctgaaagtggacggtggtctgcgtccggttcgcgaagaagacgttatcgccatccgtaacaaagccgcgcgcgcgctgcaagccgtgtttgccggaatggggctgccgccgattaccgatgaagaggttgaagccgcaacctacgctcacggctcgaaagatatgcctgaacgtaacatcgtcgaagacatcaagttcgcgcaagagatcatcaacaaaaaccgtaacggtctggaagtggtgaaagcccttgcaaaaggcggtttcaccgacgtcgcgcaagacatgctcaacatccagaaagccaagttaaccggagactatctgcatacctccgccattatcgtcggcgacgggcaggtgctctctgcggtgaatgacgtcaacgattatgccggtccggcaacaggttatcgcctgcaaggcgaacgctgggaagagattaaaaacatccctggcgcactcgatcccaacgaacttggctaa

SEQ ID NO: 71904 - DNA, 675 bp, Citrobacter koseri
atggaaattaatgaaaagctgctgcgccagataatcgaagacgtgctgtccgacatgcaaaccagcgataagcccgtctcctttcgcgcaccgacagcatcaacttcgccgcaaaccacagcgccgcaaggcgacggttttctgacggaaattggcgaggccagacaaggtacacagcaggatgaagtgatcattgccgtgggcccggcatttggcctgtcgcagaccgtgaatatcgtcggcttgccgcacaaaaatatcctgcgtgaagtgatcgccggtattgaagaagaaggcattaaagcccgcgtgatccgctgttttaaatcctctgacgtggcgttcgtcgccgttgaaggcaaccgcctcagcggctccggcatttcaatcggtattcagtcaaaaggcactaccgttatccatcagcaagggctgccgccgctctccaatctggagttattccctcaggcaccgctgctgacgctggaaacgtatcgtcagattggcaagaacgccgcgcgctatgcgaagcgtgagtcaccacaaccggttccgaccttaaatgaccaaatggcgcgcccgaagtaccaggcgaaatccgccattctgcacattaaagagacgaagtatgtcgtgacgggcaaaaacccgcaggaactgcgcgtggcgctttaa

SEQ ID NO: 71905 - DNA, 519 bp, Citrobacter koseri
atgaataccgacgcaattgaatcgatggttcgggacgtgttgagccgtatgaacagcttgcagggcaacgcacctgctccggccgcagcaagcgcatcaacgcataccgcaaaagtgacggattatccgctggcgaataaacatccagaatgggtaaaaaccgccaccaataaaacgctggatgaattcacgctggaaaacgtcctcagcgacaaagtgaccgcacaggatatgcgtatcacgccggatacgctgcgcattcaggcggctatcgccagagatgccggacgtgaccgcctggcgatgaactttgagcgcgcagcggaactgaccgccgtaccggacgatcgaatccttgaaatttacaacgccctgcgtccataccgttcgacgaaagaagagctgatggctatcgcagacgatctggaaaatcgctatcaggcgaagatttgcgcagctttcgtgcgtgaagcggcaacgttatacgtcgagcgtaaaaaactcaaaggtgacgattaa

SEQ ID NO: 71906 - DNA, 1833 bp, Citrobacter koseri
atgcgatacatagctggcattgatattggcaactcatcaacagaagtcgcgctggcgcggctggatgaggctggcgcactgaccattaccggcagcgcgctggcagaaaccaccggaattaaaggcacattacgaaatgtgtttggtattcaggaggcgcttacgcttgcggcaaaaaacacaggcatcaatgtcagcgatatttcgcttatccgcatcaacgaagccacaccggtcattggcgatgtcgcgatggaaaccatcacggaaaccatcattaccgagtccacaatgatcggccataaccctaaaaccccaggcggggtcggtctgggtgtgggagtgaccattacgccgcaagagttattaacccgcccggcggatacgccttatatcctggtcgtgtcatcggcgttcgatttcgccgatgtcgccaccatgattaacgcctccgtacgtgccggatatcaactcaccggcgtcattttgcagcaagatgacggcgtcctggtcagcaaccgtctggaacagcctttaccgatcgtcgatgaagtgctctatatcgaccggattccgctgggcatgctggccgctattgaggttgccgtaccagggaaagtgattgaaacgctctctaacccttacggtattgccacggttttcggccttaatgccgaagaaactaaaaatatcgtccctatggcgcgcgcgctgattggcaatcgctccgccgtcgtcgtgaaaacgccgtcaggggatgtcaaagcgcgcgccattcccgccgggaatctggaactgctttctcagggacgcacgctccgtgtagatgttgccgccggtgctgaagccatcatgaaagcggtgggcgaatgccgcaagctggacaacgtgaccggcgaagcaggcaccaatattggcggcatgctggaacatgtacgccagaccatggcggaactgaccaataagcccagcaacgagatcttcattcaggatttgctggctgtcgatacttccgttccggtgagcgttaccggcgggctggctggcgaattttctctggagcaagccgtgggcatcgcctcaatggtgaaatccgaccgtctgcaaatggcgatgatcgcccgcgaaatcaaacagaagctgagtgttgacgttcaggttggcggtgctgaggctgaagcggcgattttaggcgcgttgacgactcccggcaccacgcgtccgctggcgattctcgatttgggcgcaggttcgacagatgcctccatcatcaatcccaaaggagagatcattgccacccacctcgcaggggctggcgatatggtcacgatgattattgcccgtgagctgggtctggatgaccgctatctggcagaagagattaaaaagtatccgctcgcgaaggtggaaagcctttttcatctgcgtcacgaagatggcagcgtccagtttttccccaccccgctgccgccagccgtatttgcccgcgtatgtgtggtgaagcccgatgaactggttccattacccggcgatttagcgctggaaaaagtacgcgccattcgccgcagcgccaaagagcgggttttcgtcactaacgccctgcgcgcgctgcgccaggtcagcccgaccggcaacattcgtgacattccttttgtcgtgctggttggcggatcgtctctggatttcgagatcccgcaactcgtcaccgatgcgctggcgcactatcgcctggtggccggtcgcggaaacattcgcggcacagaaggcccgagaaatgcggtcgcgaccgggctgattctctcctggcataaggagttcgcgcatggacagtaa

SEQ ID NO: 71907 - DNA, 351 bp, Citrobacter koseri
atggacagtaacgccagtgccccggctatcgttatttcgaccatcaatgacggtatcacggtctggaaagaggtgcttctcggtattgaagaagaaggtatcccctttgttatccagacgcagactgacggtgacgtgacccattgcgcctggcaggcggcgcgtcggtctccgctactcgtcggcatagcctgcgacaaagaaaagctggttgtgcattacaagaatttacccgcatcagcgccgctttttacgctgatgtatcaccaggacagccatgcccggcgaagtgctggtaacaacgcggcaaggttagtcaaagggatcccctttcgggatctgaatacctaa

SEQ ID NO: 71908 - DNA, 276 bp, Citrobacter koseri
atgaacaacgcactgggactggttgaaacaaaagggttagtcggcgctatcgaagccgctgacgccatggtgaagtccgccaacgtgcaactggtgggctatgaaaaaatcggctccggcctggtcaccgttatggttcgcggtgatgttggcgcggttaaagcggcagtcgatgcgggaagcgccgcagcaagcgccgtgggcgaggtgaaatcttgccacgttattccacgtccgcacagcgacgttgaggccattttacccaagtcagcctaa

SEQ ID NO: 71909 - DNA, 477 bp, Citrobacter koseri
gtgaagcaatcactgggattacttgaagttagtggtctggcattagccatcagttgcgcggatgtcatggcgaaagccgcttccatcacgctggtggggcttgagagaaccaacggttctggctggacggtgatcaaaatcaccggtgatgtggcctccgtgcagtccgccatcatcaccggtgccagttttgccgatcagcagcaggggctgatcgcccataaagttatcgccaggcctggggaggggattctttcccgcgcgacggttattccgcccgcgcccatgccagccccggaacctgaaacagaacctgaaatagaacctgaatctgaacctgacgtcgtagttgtagaagagtcagtaccggaagcagaacccgaaaccggaatggtcagttgcaatctctgtcttgaccctgcctgtaaacggcaaaaaggcgagccccggtcactctgcctgcattcaggtaagtga

SEQ ID NO: 71910 - DNA, 633 bp, Citrobacter koseri
atggataaacagcttctggaaacaaccgtcagcaaagtgctggatgaaatgcgtgagcgccctattcctctgggtgtttccaaccgtcatatccatcttagcgctgaagactatgcccggcttttccctagtcagccaatcagcgagaaaaaagcgctgctccagccagggcaatatgcggccgaccagaccgtcacgcttattggccctaaaggtcagttaaagaatgtgcgcctgctcggcccccttcgccgtaccagccaggttgagatttcccgcaccgatgccagaacattgggcatcgctgcgccgctgcgcatgtcgggagaccttaaaggaacgccaggcattcgtcttgtcagccccttcgccgagctggatctcgcatccggcgtgattgtcgcccaacgccacattcatatgtcgccgcttgatgcgttgatatttcgcgttgcgcatggcgataaagtttctgtcgctattgaaggcaatgcgcgcaggctgattttcgacaacgtcgcgattcgcgtctctgcggatatgcgtcttgaaatgcacatcgacacagacgaagccaatgccgcaggcgccgacagcccggacgcgtttgccactctggttacaccgcgatga

SEQ ID NO: 71911 - DNA, 492 bp, Citrobacter koseri
atgaacggcgagatgttgcagcgcattattgaggaggtcatctcccgcttgcagcgtcgggcggaaagcacggccacgctcagtatttcgcaactgcgggaggccgattcccgcgcgctgttttgtcagtatgcggcgctgcatattgtgcaggcggacctgccttcgctgacgtatatcgcagagcaggatgctgacgaccctgtagcgaagaaagtccatgacgcactggcatcaggtatttgtctacagatatccctgcaccatcgcctgttgccgtcgctgccggtgaaaaagctggcgcgtctgcccatcaggctggtcgatgaacgagggcaaacaatctgcctgcatccgaccactcttttgagttacgccgacgtcgccctactcgcggggcaattactggtgctgcgtcgtcgctgtgtcgtcaccgctctggcccgtgaagccgccagcgcgcggaatattcaacttattaagcaggagtga

SEQ ID NO: 71912 - DNA, 276 bp, Citrobacter koseri
atgcatctggcacgagtcacaggcgcggtggtatccacgcaaaaatcgccctctctggttgggaaaaaacttttgctggtacgtcgggtaagtgccgatggagagcttcccgacccgcccattaccggagatgaggttgccgtcgattccgtcggcgctggcgtgggtgaactggttttactcagcagcggctccagcgccagacatgttttttccagcccgaacgaggccatcgacctggccattgtcggcatcgtagacacgctttctcattaa

SEQ ID NO: 71913 - DNA, 1008 bp, Citrobacter koseri
atggcgatttatacccgaacaggagataccggcactacggccttatttaccggccaacgagtcagtaaaacgcatccacgcgtcgaaacctacggcacgctggatgaactcaatgcagcgctgagtttatgcgtttgcgccacaacctgcgtgcaacaccgcacgttgctcgaatctattcagatgcagatattctggtttagcgccgaactcgccagcgaaagcgagcagccgtcgccggagcagcgctatatcagcgcggaagatattgccgcgcttgaagcggctattgataccgcgatgggacgcgttacgcctttacacagttttattttacctggccgttgcgaagccgcgagtcgcctgcactttgcccgcacgcttgcccgccgggctgaaagacgtctggtcgagctgtcggcaaccgccagcgtcaggcacgtcctgatgcgctacatcaaccgcttatctgattgcctgtatgcgctggcgcgcgccgaagatcatgacgcacatcagaacaacatcattcgggaggtcactgagcgctacctggcctcaaccccggcctctgtcgtcaaggagccctctatggccctctcttttcacgagcttcatcagttaactcgttcagcggtggcgcgggcggaggcgcttcaggttcctgtggtcgtcagcattgtggatgccaacggcaccgaaaccgtgacctggcgtatgccggacgctctgctggtgagcagtgaactggcgccgaaaaaagcctggaccgccgtcgccatgaaaacagccacccacgaactggcttgcgccgttcagccgggcgcttcgctctacggtctggaaagccatatgcaggggaaagtcgtcacttttggcggcggattcgcgttatggcgtgatggtctgctcattgggggtcttggcatcagcggcgggagcgttgaacaggacatggatattgcacaagccgccattgcggcaattaacgtgagaacacatcaatga

SEQ ID NO: 71914 - DNA, 1386 bp, Citrobacter koseri
atgaatacttctgagctggaaaccctcatccgtaatattttaagcgaacagttggcgcctgcgcaggccgaaacgcaaggacacggtatttttcagtccgtcggtgaagcgatagacgcggcgcatcaggctttcttacgttatcagcagtgtccgctcaaaacgcgcagcgccattatcagcgccctgcgccaggagcttacgccgcatcttgccacgctggcggcggagagcgcagcggaaacggggatgggaaacaaagaagataaattccttaaaaacaaagccgcgctggataacacgccaggcattgaggatttgacaaccacggccctcaccggcgatggcggcatggtgctgtttgaatattcaccgttcggcgtcattggttccgtcgcgcccagcaccaaccctaccgaaaccattattaacaacagcatcagtatgctggctgcgggcaacagcgtttatttcagcccgcatcctggcgcgaaaaacgtctcactcaaattgatcggcatgatcgaagatatcgctttccgctgctgcggcatccgcaatctggtcgtcactgtcgcagaaccgacttttgaggcaacccagcaaatgatggcgcatcccaatattgcggtgctggctattactggcggccccggcattgttgcgatgggaatgaaaagcggtaaaaaggtcattggcgccggggcgggcaatccgccctgtatcgttgatgagaccgccgatatcgtcaaagcggccgaagatatcatcaacggcgcagcgttcgattacaacctgccctgcatcgcagaaaaaagtctgattgtcgtggagagcgtcgctgagcgcctggttcagcaaatgcaggctttcggcgcattgctgttaaacgctgcggatatcgataaattacgcgccgtctgcctcccggaaggtcacgcgaataaaaaactggtcgggaaaagcccggccgccatgctggaagccgccggtattcccgttcccgcaaaaccgccgcgtttgcttatcggtatcgtcagtgccgacgatccgtgggtaaccagcgaacagttgatgccaatgctacccgtcgtgaaggtcgataatttcgacagcgcgctggcactggcgctaaacgttgaagaaggcctgcaccataccgccattatgcactcgcagaatgtctctcgcctgaatctggcggcgcgcaccttacagacctctatttttgtgaaaaacggcccttcctatgccggtatcggcgttggcggcgaagggtttaccacctttaccatcgccaccccgaccggcgaagggacaacctcggcacgcacatttgcccgttcccgtcgctgcgtactgaccaacggcttttcaattcgctaa

SEQ ID NO: 71915 - DNA, 1113 bp, Citrobacter koseri
atgaatacgttttcactaccaacccgattgtacagtggcagaggaagtctggatgtgctgacgcgttttacaaaccggcatatctggattatctgtgatggatttctggcgcaatcaccgctgatcaatacgctgcgcgacgcccttccaacggataatcgcatcagcatattcagcgacatcaccccggaccctaccatcggtacggtagtgcaaggtattgcgcaaatgcatgccctgcgaccggatgtggtcatcggctttggcgggggatcggcgctcgacgcggcaaaagccatcgtctggttcagccgtcagttcggcatcgaaattgaaacctgtgttgcaattcccaccaccagtggcaccggttccgaagtcaccagcgcatgcgtcattagcgatccagaaaagggcattaaatatccgttatttaataaagcgttgtatccagatatggctattctcgacccgacgctggttgtcaccgttccggcaaatattaccgccaacacggggatggacgtcctgacgcatgcgcttgaagcatatgtgtctccgcacgccagcgacttcactgacgcgctggcggaaaaagccgcgcaaatcgtctttcagtatctgcccgttgcggtcaggaaaggggattgtctggctacccgtgggaagatgcacaacgcctcaacgctggcgggaatggcgtttagccaagctggactggggctgaaccatgctattgcccatcagttaggcggccagtttcatctgccgcacgggcttgccaatgcgctgctgctgacatcggtcatccgctttaacgcccacgatcctcgggcggcaaaacgatacgcaagactcgcgaaagcctgtcaactctgccccgccagcgcaaacgagacgtcatgcctcaatgcgctgattcatcagattgagcagctcaaaacacagtgtgcaatcccttcattcgcccaggcgcttaaagagggacgacaggcgtattcacaacgaatcccgatcatggttcaggcggcgctggctgatgtgacgttaagaaccaacccgcgtaccgccgatgccagcgcgatccgggaacttcttgaggcgttgtcatga

SEQ ID NO: 71916 - DNA, 1356 bp, Citrobacter koseri
atgaataccgtcagcgccattgaacaggatagctatgatgcgcaaaccatacgcgatcgagtacgtgctgcgggcgtggttggcgccgggggggcgggttttcccgcccacgtcaaactacaggcgcaggttgagatctttttggttaatgctgctgaatgtgaaccgatgctcaaggttgatcagcaattaatggcgcagcagcccgcgcgcctgattcgcggcgtgcagtacgccatgaaggcaaccggcgcacgcgagggaattattgcgttaaaagaaaaataccgcgatgcgattgaggcattaacccccctgctaccttccagtatcaggctgcatattttaccggatgtctacccggccggggacgaagtgctgaccatctggatggcgacaggccgacgcgttccgcctgcggcgttaccggtgagcgtcggcgtggtggtcaataatgttcagaccgtactgaatatcgcccgtgcggtagaacaacagtatcccgtaacgcgccgcactcttaccgttaacggcgcggttgcaaggccgctgaccgtcaccgtccctgtcggtatgtctttacgcgacgttttagcgcttgcaggcggcgccaccgttgatgaccccggattgattaacggcggccccatgatgggaagcctggtgacatcgctggattcaccggtgacaaagaccaccggcggcctgttggtgttaccaaaaacccatcccttgattcagcggcgaatgcaggatgaacgcaccgttttgtctgtcgcaagaaccgtttgcgagcaatgccggttatgtactgatttatgccccaggcatttgatcggccatgagttatctccccatttactggtacgcgcggtgaactatcaacaggctgcgacaccgcaactcctgcttagcgcgctgacgtgttcagaatgcaatgtttgcgaaagcgtggcatgcccggtggggatctcccccatgcgcattaaccgcatgctgaaacgtgagctacgggcgcaaaacctccgttacgaaggcccgctgaatcccgccgatgaaatggcgaaatatcggctggtgccgattaaacgattaattaccaaactggggctcagcgactggtatcacgacgcgccgctaacggacgtcgccccttcaacagacaaaacgacgctgctcttgcgtcagcatattggcgccagcgccgttccctgcgtgcaaaaaggtgaacgcgttgtccgtggacagtgtgtcgccgatatgccatctggcgcgttaggcgctcccgttcacgccagtattgacggcattgtcagcgacattactgaacacgccatcacggttgtaagaggttaa

SEQ ID NO: 71917 - DNA, 555 bp, Citrobacter koseri
atgtctcaggctataggtattttagaactcaccagcatcgctaaaggaatggaagcaggcgatgccatgctgaaaagcgccagcgtcaatttactggtcagtaaaacaatctgtccgggtaaatttttactgatgctgggcggcgatgtcggtgcggtacagcaggccatcgaaacgggcacatcgctggccgcagacatgctcgtggatagtctggtgctaccgaatattcatgccagcgtgctgcctgcggtcagcggattgaacagcgttgatcaacgtcaggccgtagggatcgtggaaacctggagcgtagcagcctgtatcagtgccgccgatcgcgccgttaaagcctccaacgtgacgctggtgcgtgtccatatggcgttcggtattggcggaaaatgttacatggtggtggcaggcgatgtctccgatgtcaacaacgccgttacggtagccagtgaaagcgcaggcgaaaaaggactgctggtttaccgcgccgtgatcccccgtccgcatgaagccatgtggcgacagatcgtggagggatga

SEQ ID NO: 71918 - DNA, 351 bp, Citrobacter koseri
atggaaaagcaaccgacaacggaacgcatgattcaggagtatgttcccgggaaacaggtgacgctggcgcatctgattgctaacccaggcaaagatctctttaaaaaactgggtctgccggatgcggtgtccgctattgggatcctgaccattacgcccagcgaagcctcgattattgcctgcgatatcgccaccaaatccggcgcggtcgagattggttttcttgaccgtttcaccggggccgtcgtgctgaccggcgatgtatcagccgtcgagtatgcgttaaatcaggtgaccagaacattgggagaaatgatgtgttttaccgcctgcccaattacccggacataa

SEQ ID NO: 71919 - DNA, 453 bp, Citrobacter koseri
atgaaacgcattatgttaatcggccccagccagtgcgggaaaacctctcttacacagagtctgaacggcgaagcgcttcattaccagaaaacacaggctattgtctggtcgcccggcacgatcgatacgccgggcgaatatctggagaaccgctgtctgtatagcgcgctgctggcaagcgcctgtgaagccgacattatcgcgctggttcttaatgccgatgcgccgtggtcgcccttctcccccggttttaccggcccaatgaacagacccgttatcgggatcgtcaccaaatctgatttggcggattcgtcacgtatctcatgcgtggaaaactggctgattcaagccggcgcgcagaaaatttttgtcaccagcgcgctgatgaaatccgggattgatgaaatgtttgtttttctgagtgctaaggaacccttatgtctcacaaaataa

SEQ ID NO: 71920 - DNA, 1215 bp, Citrobacter koseri
atgtctcacaaaataatggcgattaacgccggtagctcgtcgctaaaattccagttgctggcaatgccgcagggcgaaatgatctgccagggattaatcgaacgtatcggaatggcgaacgccagagtcacaatgaaaacatccgcgcaaaaatggcaagaaacggcccccatcgccgatcaccgcgaagccgttaccctgctgctggataagctcctcagtcatcacatcattaataccttacaggatattgacggcgtgggtcatcgcgtggcgcacggcggagagttctttaaggattcagcgcgcgtgaccgatgaaacgctcgctcaaattgagcgtcttgccgaactggccccgttgcataacccggttaacgtgctcggtattcatatttttcgccagctgttaccctcaacgccttctgtggccgtattcgataccgcctttcatcagacgctggacgagtcggcctatatttaccccctgccctggcgttattacgccgagctgggtattcgccgctatggttttcacggtaccagccataaatatgtcagcacggcattagttgaaagactgggcgtcccgctcagcgccttacgcgttatttgctgccatctgggtaatggcagcagcatttgcgctatcaaaggggggcaatccgtcaatacatcaatgggatttacgccgcaatcaggcgtgatgatgggaacccgtagcggagacatcgatccctccattctgccctggattgcagaacgtgaagggaaaacgccccagcagcttaattatttattaaacaatgagtcggggctgctgggcatttccggcgtttcgcatgattaccgcgacgttgagcaggccgccgatggcggaaatcgccgggcggcgcttgcgcttacgctattcgctgagcgcattcgcgcgacaatcggcagttatatcatgcaaatgggcggtctggatgcgctcatttttaccggtggaatcggcgaaaactccgcccgtgccagagcggcagtctgccataatctgcatttcctggggctgagtattgatgaggaaaaaaacctgcgcaacgctacgtttattcaggcagaaaacgcagtggtgaaagtggcggtcattaataccaatgaagagcttatgatcgcacaagatgtgatgcggattgcgttaagtgacaaggtcacatttggcgtttccgcctga

SEQ ID NO: 71921 - DNA, 867 bp, Citrobacter koseri
gtggctgttgcgcaatgccccgcgtcatgcggagaacttatccagggctggattctgggcagtgagaaactggtctcctgccctgtcgaatggtacagcaccgtggaagtaagctcgggcgctccccttgcggatgaacgccccctttcacgcgcaatggtcaatcggctactggaatactggcgctaccctgcgcagtggagccaggaaattcggatcgcagtgcattcaaccattcccgtcgccaaagggatggccagcagtaccgcagatatcgcggcaacggcggtcgcaaccgcacaccatctggggcatacgctggatgaacccacgcttgcacatctgtgtgtttcgcttgaacccaccgacagcaccattttccgtcaactgacgcttttcgatcacaatgacgcctctacgcaaatggcttgtgaagcgcagccacagcttgatcttttagtcctcgaaagcccaataacgttgcgcacggcggattatcaccgcatcccccgactggaacgtctgcatgcgggggcggcgatgttgcagcaggcatgggagagagtgcaggaagcctgcataacgcaaaaccctcgtcggatgggggaagccgccacgctcagcgctatcgccagccaacaactgttaccaaagccaggctttgatgccctgttggcgctggtggaagcctgtgatttatacggtctgaatgtggcgcacagcggaagcgttgtcgggctgatgctggacaggcagcgccatgacgttgaccatattaagtgggaactcgcacaacgaaaactgacggaacactggcccgatcagcatttgctgaagatggtcactggcggggttgaattgcagtga

SEQ ID NO: 71922 - DNA, 336 bp, Citrobacter koseri
atggaaaccaacaagccttctttccaggacgtactggaatttgttcgtctgttccgccgtaagaacaaactgcaacgtgaaatccaggacgttgagaaaaagatccgtgacaaccagaagcgtgttctgctgctggacaacctgagcgattacatcaagccaggtatgagcgttgaagcgatccagggcatcatcgccagcatgaagagcgactatgaggaccgcgttgatgattacatcatcaaaaacgcagaaatttctaaagaacgccgcgacatttctaaaaagctgaaagcgatgggcgaaatgaaaaacggcgacgcaaaagcagagtaa

SEQ ID NO: 71923 - DNA, 1059 bp, Citrobacter koseri
gtgcgggctgataaatcgctgagtccctttgaaattcgtttatatcgccattatcgtgttgtacacggcattcgcattgcgctggcgtttattctcactttcctgctggttcgactgttcaacatcccggaaggcacctggccgctgattacactggtcgtcattatggggccgatctccttttgggggaacgtggttccccgtgcgtttgagcgcatcggcggcacgattctggggtcggtattaggtcttgtagcgttacgtctggagcttttttccctcccgctgatgttgatctggtgcgctgcggcaatgttcttgtgcggttggctggcgttagggaaaaagccgtatcaggctctgttgatcggcatcacgctcgccgtggtggtaggcgcgccggcaggcgacatgaacacggcattgtggcgtggtggggatgttattttaggttcgctgctggcgatgctgttcaccggcatctggccgcaacgcgcgtttttacactggcgcattcagatggcgcattgtgtgacggcgtacaatcgggtctatcaggccgcgttgtcgccaaatttgttagagcgtccccggctggagaggcatttacagaaactgctgagcgacgtcgtcaaaatgcgtgggctgattacgccagccagcaaagaaacccgtattcaaaagtcgatattcgaagcgattcaaaccgtgaaccgcaatttggtctgtatgcttgagctgcaaattaatgcgcactgggcatctcgtgccagccattttgtgatgctgaatgcgcatacgctgcgcgaaacgcagcaaatgacgcagcaaacgttactcaccatcgcccatgcgctgttcgaaggcaacccacaaccggtactggcaaacacggaaaaactcaatgagattgtcgcggagctgcgccagttgataaacgagcatcatggtaataccgtggctgaaacgcctattcatggctatgtttggctaagtatggagacggcgcggcaactggagctgctctcccatttgatctgccgggcattgcgcaaataa

SEQ ID NO: 71924 - DNA, 468 bp, Citrobacter koseri
atggactacgaaatcaggcaggcagagaagcgtaatatcgccggttttcacatgatcggcccgtgggaaaaaacggtgaagcaaggttttgaacaactcatgatgtgggttgacgggaatcaggttgttccgctcgaatggatcgcggtttactacgataatccagatgaggttccggcggaaaaactccgctgcgatacggtggtgtctgtcccggataatttcaccattccgaaaaatagcgaaggcgtcatcctgacggagatcgccggcgggcagtatgcgacagcggtggcgcgcgttgagaatcatgatttcgcgacgccctggtatcagttcttcaatagcctgttacaggacaatcactaccagatagcggctaaaccgtgttttgaggtctatcttaacaatggaacggaagacgggtactgggacattgaaatgtatgtacccgtacagtcgaaatag

SEQ ID NO: 71925 - DNA, 1170 bp, Citrobacter koseri
gtgttgaaacgccgtttgtttattgccgcttcacttctcgcgatgaatctttcttccgctctggctgccgatgtgccagatttttctccccagcctccggccattcaggcagggtcatgggtacttatggattacaccacgggtcaaattctgaccgcaggtaatgaacatcagcggcgtaacccggctagcctgaccaagctgatgaccggctatgttgtcgatcgcgctatcgacagccatcgtattagcccggacgatatcgtaaccgttggacgtgatgcctgggccaaagacaatccggtgtttgtgggatcttcattaatgtttctgaaacaaggggagcgcgtttcggttcgggatctcagtcgggggctgattgttgactctggaaacgatgcctgcgttgcgctggcggattacatcgccggagggcaaccgcagttcgtcgccatgatgaatcactacgttgaaaccctgaaattgcaggatacccattttgaaacggtacacggactggatgcgccaggccagcacagctcagcctatgatctggcgatattgtcccgcgccattattcacggtgagcctgagttttatcatatgtacagtgaaaagagcctgacatggaacggtattacccagcagaaccgtaacggactgctgtgggataaaaccatgaatatcgacgggctgaaaaccggccatacctccggcgcgggttttaacctgattgcctccgccgtggacgggcagcgtcgtcttatcgccgttgtgatgggcgcggaaagcgcgaaagggcgcgaagatcaggcacgtaagttgttgcaatgggggcagcaaaatttcgatacggtacaaattttacgcagtggcaaacaggttggcacggaacgtatctggtacggcgataaagaaaatattgctctgggcaccgagcaggatttctggatggcactgccgaaaactgaaattccgcatattaaggcccggtatgcccttgataaaaaagaacttgaagcccctattgccgcacatcagcgggtcggtgaaattgagctatacgatcgggataagctggtggcgcactggcctctggtgacgctggagtctgttggcaaaggcggcgttttttcccgactgagcgattacttccaccataaggcgtaa

SEQ ID NO: 71926 - DNA, 1425 bp, Citrobacter koseri
atgaatgacggcaagcagcaccctaccttcctgttccatgactacgaaaccttcgggactcacccggcgctggacagacccgcacagtttgccgccatccgcacggatagcgactttaatattattggcgaacctgaagtcttttactgcaagcccgccgatgattacctgcctcagccaggcgctgtgctcatcaccgggattacgccgcaggaagcgcgcgacaaaggagagaacgaagccgactttgtcagacgtattcattcactgttcaccgtgccaaagacctgtgtcgtcggctacaacaatgtccgttttgatgatgaagtcacgcgtaacattttgtatcgcaacttctacgatccctatgcctggagctggcagcacgacaactcgcgctgggatttgctggatgtgatgcgcgcctgctatgccctgcgcccggaaggcataaactggccggaaaatgacgacggattgcccagcttccgccttgagcacttgaccaaagccaacgggatcgaacatgccaacgcgcacgatgcaatggcagacgtgtacgccaccattgctatggcgcaactggtgaagtcgcgccagccgcgtctgtttgactacctttacacgcatcgcaacaaacataaactggcggcgttgatcgatgtgccgcaaatgaaaccgctagtacatatctccggtatgtttggcgcctggcgcggcaacaccagttgggttgcgccgctggcctggcatccagaaaaccgcaacgcggtcattatggtggatctggcgggcgatatgtcgccattactggagctggacagcaataccctgcgcgagcggttatataccgctaaagccgacctcggcgataacgccgcagttccggtaaaactggtacacatcaataaatgtccggtactggctcaggctaatacgctccgcccggaggatgccgatcgcctggggattaaccgtcagcactgtctcgataacctgaaagtgctgcgcgataatccgcaggtacgcgataaggttgtggcaatcttcgctgaggccgagccgtttacgccgtctgagaacgtcgatgcgcagctatacaatggctttttcagcgacgccgatcgtgccgccatgaaaatcgtgctggaaaccgaaccgcgcaatttgcccgcgctggatattacgtttgtcgataagcggattgaaaaactgctgtttaactatcgcgcccgtaacttccctgggacgctggatgaaaccgaacagcaacgctggctggagcatcgtcgtcaggtgtttacgccagagtttttgcaacggtatgcggaagagttacagatgctgtatcagcaatatgctgacgacaaagagaaactggcattgctgaaatcactctggcagtacgcagaagagattgtctga

SEQ ID NO: 71927 - DNA, 1362 bp, Citrobacter koseri
atgtcgcataacgttactccaaacacctctcgcgtggaattgcgtaagacgcttacgttgattccggttgtaatgatgggtcttgcctatatgcagccgatgacgctgttcgatacatttggtatcgtctcaggcctcactgacggtcacgttgcgacggcgtatgcctttgcgctgatcgcgattctttttactgcgttgagctacggtaaactggtgcgtcgtttcccgtccgctggctccgcgtacacttacgcccagaaatccatcagcccgactgtaggctttatggtgggctggtcatcgctgctggactacctgttcatgccgatgatcaacattctgctggcgaaaatttactttgaagcgctggtgccgacagtgccgtcgtggatctttgtggtggcgctggtggcctttatgaccatctctaacctgcgcagcatcaagaccgtcgctaacttcaacaccctgattgttattctgcaaatggggattgtagcggtgatcgtcggcctgattatctacggcgtgtctcacggcgaaggtgcgggtacgctggtaagttcccgtccattctggtctgaaggcgcgcacgttgtgccgatgattaccggtgcgacaatcctgtgcttctcgttcctcggctttgacggtatctcttctctgtctgaagagaccaaagacgcggagcgcgttattccgcgcgcgattttcctgacggcgctgattggcggcctgatctttatcgcggcgtcttacttcctgcaactgtacttcccggatatttcgcgctttaaggacccggatgcatcacagcctgaaatcatgctgtacgttgcgggtaaaaccttccagtggggcgtgctgattttctccagcgtgaccgtactggcatccggtatggcggcacacgcgggcgtttcccgtctgatgtacgtcatgggtcgtgacggcgtattcccgacgcgtttcttcggctacgttcatccgaaatggcgtactccggcgtggaacgtgctgctggttggcgcgatcgcactgctggcgattaacttcgatctggttacggcgacggcgctgatcaacttcggtgcgctggtggcgtttaccttcgtgaacctctccgtgatttcccagttctggatccgtgagaagcgcaacaagacgctgaaagaccacttcaactatctggttctgccggtgtgcggcgcgctgactgttggcgcactgtggatcaacctggaagaaagctcaatgactctgggtctgatctgggcgggtattggcctggtgtatctggcttgcgtgaccaaaagcttccgcaatccggtaccgcagtacgaagatatcgcacagtaa

SEQ ID NO: 71928 - DNA, 930 bp, Citrobacter koseri
atgaaaccactgctggacgttctgatgattctcgatgcgttagagaaagaggggagctttgcggcggcgtcggcaaaattgtttaagacgccgtcagcgctcagctataccgtccataagctggaaagcgatctgaatatccaactgttggatcgcagcgggcatcgggctaaatttacccgcaccggccagatgctgctggaaaaaggccgggaagttctgcataccgtgcgcgaactggaaaagcaggccatcaaacttcacgaaggctgggagaacgaactggtcatcggcgtggacgatacgtttcctttttctctccttactcccctcattgaatccttctaccaacatcacagcgtaacgcgcctgaaattcataaacggcgtactgggcggttcctgggaggcgctgacgcaggggcgggcagatatcatcgttggcgcgatgcacgatccgccctacgccagtggtttcggttttgcgcgtctgggagagcttgagcaggtgtttgcgattgccccgcatcatccactggtgcaggaagaagagccgttgagtcggcgcacaataaaacggttccgcgcgattgtggtcggcgatgagacgcatccggcgtgttcggcaagcgcgcaattgcttgatgatcaggaagccataacggtttttgattttaaaaccaaactggaactgcaaatcagcggcctgggatgtgggtatttaccgcgctatctggcgcaacgctttctggacagcggtgcgcttattgagaagaacgtggcggcgcagatcgtgtcggagccggtgtggatgggctggaacgaacagacggctggactggccagcgcgtggtggcgagataaaattttagcaaatagtgctattgctggcgtctatacaatgggggatgctgggaaatcaaacagttaa

SEQ ID NO: 71929 - DNA, 825 bp, Citrobacter koseri
atgaaaaaggtcgcaattgtcggtttaggatggttaggaatgccgctggcgatgtcgctgacggcaagaggctggcaggttactggcacgaaaaccacgcaggatggcgtggaagcggcccgcatgagcggcattgagagctatccgctgcgcctggaacctgagctggtttgcgaaacggacgatcttgatgcgctgatggatgtggatgctctggtcattacgctgcccgctcgccgtagcgggccgggggaagatttttaccgccaggcaatacaggaggtggtcgacagcgcgctggcgtatcacgttccgcgtatcatttttaccagttccacgtcagtgtacggcgatgtgcacggcattgtgaaagagactacgccgcgtaatcccgtcacggcgagtgggcgcatcctgaaggaactcgaagactggctgcacaatctgcccggcacctccgtcgatattctgcgtctgtccgggctggtagggccaggacgacatccggggcgtttctttgccggtaaaaccgcgcctgacggtcagcaaggtgtgaatctggtccacttggaagatgtgattgccgctattactctgctgttacaggcacctaaagggggacacatctataatatatgtgcgccttcgcatccggcgcgtaatgtgttttatccgcagatggcgcgtttgctgggtatggaaccgccgcattttctggaaagccagagtaacgataaaggcaagattattgatggcagccggatttgtaatgaactcgggtttgaataccagtatcccgacccgctggtgatgccgatggagtga

SEQ ID NO: 71930 - DNA, 900 bp, Citrobacter koseri
atgttagataacacccgtttacgcatagctattcagaaatcagggcgtttaagcgatgattcacgcgaattactggcccgctgcggtattaaaatcaacctgcacacccagcgtctgattgcgatggcggagaatatgccgattgatattctgcgcgtgcgtgatgacgatattcccggcctggtcatggatggcgttgtcgatctggggatcatcggggaaaacgttctggaagaagagctgttgagccgccgcgcgcaaggcgaagacccgcgctactacaccctgcgccgtctcgacttcggcggctgccgcctctcgctggccaccgccgtcgatgaagcctgggacggcccggcttcccttgacggtaagcgcatcgctacctcttacccgcacctgcttaagcgttatctggatcagaaaggcgtatcgtttaaatcctgtctgttaaacggttctgttgaagtcgctccgcgtgcgggtctggccgatgccatctgcgatctggtgtcgaccggggcgacgctggaagccaacggtctgcgtgaagtcgaggtgatttaccgctccaaagcctgcctgatccagcgtgacggcgaaatggccgaagccaaacaacagcttatcgacaaactgctgacccgtattcagggcgttattcaggcgcgtgaatccaaatacatcatgatgcatgcgccaagcgagcgtctggaagaagtcatcgcgttactgccgggcgcagagcgtccaaccattctgccgctggcgggcgatcagcagcgcgtcgccatgcacatggtcagcagcgaaaccctgttctgggaaacgatggaaaaactgaaagcgctcggcgccagctctattctggtgctgccaattgaaaagatgatggagtga

SEQ ID NO: 71931 - DNA, 1305 bp, Citrobacter koseri
atgagctttaatacaatcatcgactggaatagctgcaatactgaacagcagcgtgcattgctgatgcgtccggctatttccgcctccgacagcattacccgtaccgtcgcagagatcctggataatgtgaaatcacgcggtgatgacgccctacgcgaatacagcgcaaagtttgataaaacgaacgtcgcagcgctgaaagtgtccgccgaagagattgccgcagccagcgcgcgtctgagcgacgatctcaaacaggcgatggcggtagcggtaaaaaacatcgaaaccttccacaatgcgcaaaaactaccggcggtagatgttgaaacccagcccggcgttcgctgtcagcaggtgacgcgccctgtcgcatctgtcggcctgtatatcccgggcggctctgccccgctcttctccaccgtattaatgctcgccacgcccgcgcgtattgccggatgcaaaaaagtggtgctgtgctcgccgccgcctatcgcggatgaaatcctttacgctgcgcagctgtgcggcgtgcaggaaatcttcaacgtcggcggcgcccaggccattgccgctctggcgttcggcagcgagtccgtgccaaaggtggacaaaatttttggccccggcaacgcgtttgtcaccgaggcgaaacgccaggtcagccagcgtctcgacggcgcggcaattgatatgcctgccggcccttctgaagtgctggtaatcgccgacagcggcgccacgccggatttcgtggcgtctgacctgctctctcaggcggaacacggcccggattctcaggtcattctgctgaccccggatgccggtattgcgcagaacgtcgcggaggccgtcgaacgccagttagcggagttaccgcgtgcggaaacggcgcgtcaggcattaagcgccagccgtctgatcgtgacgaaagatttagcccagtgcgtcgccatctcgaaccagtatgggccggaacacctgatcattcagacccgcaaggcgcgcgatctggtggaggatattaccagcgcgggttccgtttttctcggtgactggtcaccggaatccgcaggcgactatgcttccggcaccaatcatgtgctgccgacctatggttataccgccacctgctccagcctcggtctggcggatttccagaaacgcatgaccgttcaggaattgtcgcaggcgggtttctccgcactggcatccaccattgaaacgctggctgcggcagaacggctgaccgcccacaaaaatgctgtcaccctgcgcgttaacgcccttaaggagcaagcatga

SEQ ID NO: 71932 - DNA, 1080 bp, Citrobacter koseri
atgagcactgaaaatacccgcagcgtcaccgacttagcccgggaaaacgttcgcaacctgacgccgtaccagtccgctcgccgtctgggtggtaatggcgatgtctggctgaatgccaatgagttcccgatggcggtggagtttcagctgactcagcaaacgctcaaccgctacccggaatgccagccaaaagcggttattgaaaattatgcgcagtacgccggagtgaaccccgggcaggtgctggtcagccgtggcgcagacgaaggtattgaactgctgattcgcgcattctgcgaaccggggaaagatgcgattctctattgtccgccaacgtacggcatgtacagcgtcagcgcggaaactattggcgttgaatgccggacggttccgacgctggaaaactggcagctggatctgcggggcatcgccgataaactcaacggcgttaaagtggtgtttgtatgcagccccaacaacccgaccgggcagcttatcaatccacaggatttacgtactctgctggaaatgacgcgcggcaacgccattgtggtggcggatgaagcctatattgaattctgcccacaggcgacgctgactggctggctctctgaatacccgcatctggtggtgctacgcacactctctaaagcctttgcgctcgccggtctgcgctgcggatttacgctggcgaacgaagaggtcatcaacctgctgctgaaagtcatcgccccctacccgctctctacgccggtcgccgatattgccgctcaggcgttgacgccgcaaggcgtcaacgcgatgcgcgaacgtgtggcgcagattctgctggaacgtcagtatctggttaatgcgctgaaagagattgcctgcgtagaacaggtgttcgattcagaaaccaactacattctggcacgttttaccgcgtcaagtagcgtgtttaaatctctgtgggatcagggcattatcttacgtgatcagaataaacaaccttctttaagcggctgtctgcgtatcactgttggaacccgcgaagaaagccagcgcgtcattgacgccttacgtgcggagcaagtatga

SEQ ID NO: 71933 - DNA, 1068 bp, Citrobacter koseri
atgagccagaagtatctttttattgaccgtgatggaaccctgattgccgaaccgccgagtgattttcaggtggatcgttttgacaaactcgcctttgaaccggacgtggtgccggttctgctgaagctgcaaaaagccggctttaagctggtgatgatcaccaaccaggacgggctgggaacgcaaagcttcccgcaggcagacttcgacggcccgcacgacctgatgatgcaggttttcacctcccagggcgtactgtttgatgaagtgctgatctgcccgcacctgccagcggatgagtgcgactgccgtaagccgaaggtaaagctggttgaacgttacctggctgaacaggcgatggatagcgccaacagctacgtgattggcgatcgcgctaccgacatccagttggccgaaaacatgggcattaacgggttacgttataaccgtgaaatcctgaactggacgatgattggtgagcagctgacaaaacgcgaccgctatgcccacgttgagcgcaataccaaagaaacgcagattgacgtcaaggtgtggctggatcgcgaaggcggcagcaagatcaatactggcgtgggtttctttgaccatatgctcgatcagatcgccacgcatggcggtttccgtatggagatcgcggtcaagggcgacctctatattgacgatcaccatacggtagaagataccggtctggcgctgggtgaggcgctaaagctggcgttgggcgataagcgcggcatcaaccgctttggttttgtgctgccgatggacgaatgcctggcgcgttgcgcactggatatctccgggcgcccgcacctggaatataaagccgagtttacctatcagcgcgtgggcgatctgagcaccgagatggttgaacacttcttccgctcgctctcctacaccatgggcgtgacgctgcacctgaagaccaaaggtaaaaacgatcaccaccgtgtagaaagcctgtttaaagcgtttggccgcacgttgcgccaggccattcgggtagaaggcgacacgctgccttcttctaaaggagtgctgtga

SEQ ID NO: 71934 - DNA, 591 bp, Citrobacter koseri
atgaacgtcgtcatccttgataccggctgtgccaacctgaactcggtgaaatccgccgtggcgcgccacggttatgatccgctggtcagccgcgacccggaggtcgtcttaaaagctgacaaactcttcctgcccggcgtgggaaccgcccaggcggcgatggatcagttgcgcgagcgtgagcttgtcgaattgattaaggcttgtactcagcccgttctgggaatttgtttaggcatgcagatccttgggcgccacagtgaagagacaaacggcgtcgaccttctgggcattattgaccaggacgtcccgaagatgaccgattttggtctgccgctcccgcatatgggctggaaccgcgtttacccgcaggcgggtaatcgtcttttccagggcattgaagatggcgcctggttctactttgttcacagctacgctatgcccgtaaatccgtggaccattgctcaatgcaactacggcgaacccttcactgcggcagtgcaaaaagacaatttcttcggcgtgcagttccacccggaacgttccggtgccgctggcgcgcagttgctgaaaaacttcctggagatgtga

SEQ ID NO: 71935 - DNA, 738 bp, Citrobacter koseri
atgattattccggcattagatttgatcgatggcaccgtagtgcgtctccatcagggcgactacgcccggcagcgtgattacggtaacgatccccttccccgcctgcgggattatgccgcccagggcgccgaagtgctgcatctggtcgatttgaccggggcgaaagatccggccagacggcagatcccgctgattaaaacgctggtcgcgggtgtgaacgtgcccgtgcaggttggtggtggcgtgcgtactgaggacgatgttgcggcgctgctggacgcaggcgttgcccgcgtggtggtcggctccacggcggtcaaatctcccgaggtggtcaaaggctggtttgagcgctttggcgctgacgcgctggtgctggcgctggatgtgcgtattgatgatcggggcaacaaacaggttgccgtcagcggctggcaggagaactccggcgtttcgctggaagagctggtcgagacttatctgccggttggcctgaagcatgtactgtgcaccgatatctcccgtgacggcacgctggcgggttccaacgtctcattatatgacgaagtgtgcgcgaaatatccgcaggtcgcctttcagtcttccggcggaattggcgggattgaagacgtggccgctctgcgcggcacgggcgttcgcggcgtgattgtcggccgcgccctactggaaggtaaatttaccgttaaggaggccatccaatgctggcaaaacgtataa

SEQ ID NO: 71936 - DNA, 777 bp, Citrobacter koseri
atgctggcaaaacgtataatcccttgcctggacgtacgcgatggtcaggtggtaaaaggcgtacagttccgcaatcatgaaatcatcggcgatatcgtcccgctggcaaaacgctatgccgatgaaggcgcagacgagctggtgttctatgatattaccgcttccagcgacgggcgcgtggttgataagagttgggtgtcgcgcgtcgcggaagtgatcgacattccattctgtgtcgcgggtggtatcaggtctattgatgacgccgctaaaatcctctctttcggcgccgataaaatttccatcaactcccctgcgctggccgacccaacgctgatcacccgtcttgctgaccgttttggcgtacagtgcatcgtcgtgggcattgatacctggtttgatgccgaaaccggcaagtatcacgtcaaccagtataccggcaatgaaagccgtacccgcgtgacgcagtgggaaactctcgactgggtgcaggaagtgcaaaaacgcggggccggtgaaatcgtgcttaacatgatgaatcaggacggcgtgcgtaacggttacgatctggagcaactgaaaaaagtccgtgacgtctgttatgtaccgctgattgcctccggcggcgcgggcacgatggagcacttccttgaagccttccgcgataccgatgtcgacggggcgcttgctgcctccgtcttccacaaacagattattaatattggtgaattaaaagcgtacctggaagcacagggcgtggagatcaggatatgttaa

SEQ ID NO: 71937 - DNA, 612 bp, Citrobacter koseri
atgttaacagagcaacagcgccgcgaactcgactgggaaaaaaccgacggattgatgccggttgtcgtgcaacatgcggtatccggtgaagtgttgatgctgggttacatgacccctgaagcgctgaataaaacaatcgaaagcggcaacgtcactttcttctcacgaaccaaacagcgtttgtggaccaaaggcgaaacatccggccacttcctgaaggtagtccgcattgcgccggattgtgataacgacacactgctggtgctggccaatccaattggaccaacctgtcacaaaggcaccagcagctgctttggggatgccaaccatcagtggttattcctgtatcagcttgagcaactgttagccgagcgtaaaaccgccgatccggcaagctcttacacggcaaagctttacgccagcggcaccaagcgtatcgcgcagaaagtgggtgaagaaggtgtcgagaccgctctggccgcaacggtacatgaccgttttgagctgaccaatgaagcctccgacctgatgtaccacctgctggtgctgctacaggaccaggaccttgatttaacgactgtcattgagaatttgcgtaagcgtcatcaatag

SEQ ID NO: 71938 - DNA, 984 bp, Citrobacter koseri
atgacagtgaacaataacaatgctaccgggcgcagtaatgacccggaacagattgatttgattgatttagtgatgcaattgtggcgcggaaaaatgacaatctttgtgtgtgtcattgtcgcaattctattggctgttggttacatcctggtagcgaaagagaaatggacctctaccgccatcatcacccagcctgatgtagggcaaattgccacttataataatgcgatgagcgttttgtatggcgataacgctccgaaagttgcggatatccagactggttttatcggtcgctttagctccgccttttccgcattgtcagcagccctggataatcaggaagaacctgaagaattaaccattactccttctgttaagggtcaatcattgccgttggctgtttcttacgttggagagtctgcggaaggggcgcagcgccagctggcagagtatatccagcaggtagatgagagcgttgcgaaagaactggacgcggatctaaaagataacatcaagttgcagacaactacgcttgaggactcgttaaaaacgcaggaagtggtcgcgcaggagcaaaaagatttgcgtatcaagcaaattcaggaagcattgcgttatgcggaacaggcgaatgtgataaagccacaaattcagcaaactcaggatgtcacccaggacagtatgttccttcttggtagtgatgcgctgaaatcaatgatcgaacacgaggctacgcgtccgctggttttctctggggcctactatcagaccaagcaaaatctgctggatatcggaaatctgaaaatcgaaaccgcatccattcacgcctaccgttacgtcatgaagccgacgctaccaattcgtcgtgacagtccgaaaaaggcaattacgctggttctggcggtattgctgggcgggatgattggtgcgggtgtggtgctgggacgtaatgcgttacgtaactataagccgaaagcgcagtaa

SEQ ID NO: 71939 - DNA, 1167 bp, Citrobacter koseri
atgaaaatcaccatttctggaaccgggtacgttggtctgtcaaacggtttgcttatcgcacagcatcaccaggttaccgcgttagacattattcccgaacgtgtagaaatgctaaatgatcggatatctccgattgttgataaagaaatacagcaatttttagcgtccgggaatattaattttgaagcaaccttagacaaggtatccgcctaccaaaatgctgattatgtcattattgcaacaccaaccgactatgatccaaaaacaaattatttcaacacatcaagtgtagaatcggttattcaggatgtgacagagattaacccatcggcagtgatggtgatcaagtcaacggtgccggttggcttcaccgcaacgatgagtaaaaaatttaatacgcagaatatcattttctcccccgagttcctgcgcgaaggtaaagcgctttatgataatttgcatccttcgcggattgtgattggtgaacgctctgagcgtgcggagcgattcgctgctttgctacaggaaggcgccataaaacaggatattccaaccctgtttaccgattcgacggaagcagaggcgattaagctttttgctaatacttaccttgcgatgcgcgttgcttactttaatgaacttgatagctatgcggaaagtttaggactgaatacccgacaaattattgaaggtgtgtgtctggatcctcgtattggcaatcattacaacaatccttcatttggttatggcggttattgtctgccgaaagatacgaagcaacttctggcgaattatcagtcagtgccaaacaatattatctccgcgatcgtggatgcgaaccggacgcgtaaagattttattgcagatgccatcttgtccagaaaacccaaagtggtgggcatctatcgtctgattatgaagagcggttctgataatttccgtgcgtcttcaattcaggggattatgaagcgtatcaaagctaaaggtgtggaagttattatttacgaaccggttatgaaggaagcgtcgttctttaattcccgccttgaacgtgatttgaatacgtttaaacagcagtccgacgtgattatctccaatcgcatggcgtctgaactgctggatgttcaggacaaagtttatacacgcgatctctttggcagtgattaa

SEQ ID NO: 71940 - DNA, 1407 bp, Citrobacter koseri
atgtccaagcaacagatcggcgtcgtcggtatggcagtgatggggcgcaacctggcgctcaacatcgagagccgtggttataccgtctccgttttcaaccgctcccgtgaaaagaccgaagaagtgattgccgaaaacccaggcaaaaaactggtgccttactacacggtaaaagagtttgttgaatcccttgaaacgcctcgtcgtatcctgttaatggtgaaagcaggggcgggcactgatgctgctatcgattccctgaagccgtatctggataaaggcgacatcatcattgatggtggtaacacgttcttccaggacactatccgtcgtaatcgcgaactttctgctgaaggctttaacttcattggtaccggcgtttccggtggtgaagaaggggcgctgaaaggcccatctatcatgcctggcggtcagaaagaggcctacgaactggttgcgccgattctgactaaaattgccgcagttgcagaagatggcgaaccttgcgtgacctatattggtgccgatggtgccggtcactatgtgaaaatggttcacaacggtatcgaatacggcgacatgcagctgatcgcagaagcctattctttgctgaaaggtggcctgaatctgtctaacgaagagctggcagatactttcactgagtggaacaaaggcgagctgaacagctacctgatcgacatcaccaaagacatcttcaccaaaaaggatgaagagggtaaatatctggttgatgtgattctggatgaagcggcgaacaaaggcaccggtaaatggaccagccagagttctctggatctgggcgagccgctgtcgctgatcacggaatccgtttttgcacgttatatctcttctctgaaagagcagcgtgtcgcagcgtctaaagtgttgtcgggacctaaagcgcagcttgcgggtgacaaagcggaatttatcgagaaagtccgtcgcgcgctctaccttggcaagatcgtctcttacgcacaagggttttcccagctgcgtgccgcttctgacgaatacaactgggatctgaactacggcgaaattgcgaagatcttccgtgccggctgcattattcgtgcacagttcttgcagaaaatcaccgacgcatatgcagaaaatgcgggtatcgctaacctgctgctggcaccgtacttcaagaaaatcgcggacgattatcagcaagcgctgcgtgatgtggttgcgtatgccgtgcagaatggtatcccggttccgacgttctctgccgctgttgcctactacgacagctatcgcgcagccgttcttcctgcgaacctgatccaggcgcagcgtgactactttggggcgcatacgtataagcgtactgataaagaaggcgttttccatactgaatggctggagtaa

SEQ ID NO: 71941 - DNA, 1437 bp, Citrobacter koseri
atggatacggataattttttgaataaatataatccattgctatgcaaggtttttctcgcagcatcggattttatattttttaacttatcactggccctctctattggttgtgtatactggatttttaacgatctttatcgttttatccccgatgctcaactagagatgcgcataatttctcatgtcatcctgagtttgatatgtgtgggatggttctgggttcggttgcgacattattcctatcgcaaacccttttggtttgaattgaaggagattatccgtactattgtgatctttgctgtttttgatctggcgctggtcgctttttctaaatggcaattttctcggtatgtatgggtcttttgttggacgtttgcattaattctgctaccgcttttccgagcaatgaccaaacaacttcttaatcgtcttgggatttggaagaaaaagactgtcattatgggtagcggaagtaatgcagtggaagcttattatgcactgcaaagtgaggaaatgcttggctttgatgttgtcgcattttatgacgaagagtgtacagaggcaacgctacagggactgccggttcttcaggaccccaatattctttgggaaatgaagaaaacaggcgatattcatttcattgtagcttttgaaatggaaaacagcgataagaccattaactggttgcgcgaactatcgaagaaggactgccgttctgtcacggttattccgtccctgcgcgggttaccactttataataccgatatgtctttcatctttagtcatgaagtcatgttgctgcgtattcataataatctggcaaaacggacatctcgtttccttaaacggactttcgatattgtctgttcatcactgattatcttaatttcttcgccactgctcatttatctttggtacaaagttacccgtgatggtggtccggcaatctacggtcatatgcgagtagggcgtcacggtaagcttttcccttgctataagtttcgctcaatggtgatgaattcgcaggaggttttacaaaagctccttgattccgatcctgctgcacgggaagaatgggagcgtgactttaagttgaaaaacgatccgcgaatcactcctgtcggtcgatttattcgtaaaaccagtcttgatgaattgcctcagttatttaatgtgctgaaaggtcaaatgagtctggttggcccgcgtccgattatctctgaagagttaccacgctatgatgagaatgttgattactatctaatggcgaaaccgggaatgacagggttgtggcaggtaagtggacgtaacgatgtggattacgatacccgagtctactttgactcctggtatgtcaagaactggtcgctgtggaatgacatcgctattcttttcaaaacagtgaaggtagtcctccatagagatggtgcatattga

SEQ ID NO: 71942 - DNA, 1149 bp, Citrobacter koseri
atgaaatctgttgctattgtcggtgcgggtatttctggtgcggttattgcgagattattagcagaggaagggattgagtctgttgtttttgacaaacgttctcatattgctggtaactgtcattcagaacgtgatccgcagaccaacgtcatgttgcacgtttatggtccccatatttttcatacagatgataaagaagtttgggatttcgttaatcagtattcagagtttatgccttacaccaaccgtgtgaaggccatttacaaaggcaatgtttacttactaccagtaaacctgcatacgattaatcagtttttcaataaaacaatgcgtccggatgaagctcgtgctttcatcgaatctaaagctgacaaatctattgtcgaaccgaaaaactttgaagaacaggccatcagcatgattggtcgggaactgtatgaagcattctttaaaggctatacgcgtaaacaatggggttgtgagccgacggagttaccagccagtattttgaaacgcttgccgcttcgttttaactataatgacaattattttaaccaccagtatcaggggatgcccagagatggctataccgatatggttggaaaaattcttgatcacgaactgattgaaataagaacagatactgagttttcagctaccgagagtggggcctaccagcatgtattttggtcaggcgcgctggatggttactttaactttagtgaggggcgtctgggttatcgcacgctggatttcgaaaaattctcagcagaaggtgactaccagggaacggctgttatcaactactgcgaagaaaatgtaccttatacccgaatcactgagcataagcatttctcaccttgggagtcacacgaaaaaacaacatgttatcgtgaatttagtcgcttctgcaccgaagatgatattccgtattatccgatccgtatggttaaggaaaaagaactgctcaatcgctacctggataaagcgatggaattaagcaataccacttttgtcgggcgtcttggtacctaccgctatctggatatggatgtcactattcgtgaagctattgatgttgcaaataaattccttgaatgtcaaaagagtcaggagccaatgcctgtatttaatataaatcctcgctaa

SEQ ID NO: 71943 - DNA, 990 bp, Citrobacter koseri
atgactcgacgtacggatatagatatatatcgtggactggggatattgttggttgtgttaggacatgtatccttcctcagtccatcttggcataagattatttatagttttcatatgcctgcttttttcattctttctggttatctggtaaatgttaaaaatctggagttgaaaccttggatatttatcatccagcgattttatagattgattattcctgcatggacgattggagtaatttgtggcttgccgtttgttgctatgttattgatgagtaatatatctggtagtgatttccttatgaaactatatggaacattaacaggtgcaacaaaagtagcaaataatttctttgttactcccatttggtttttatattgcctgtttatagttgaggctatgttttatttaataatgaaaatctcttcaaataaatatattattgccttgattgtaatttccttttatttaattgcgaaaaatgtagatatttttcatttttttaatgtgaatatagcttttatcgctatgccatattttttaattggatacatattgcaaagtattgtcataaccagacatattaattatgcgatgatttctgttgtactgcttttgggattttcgtatttaactcccactgaggttgatatgtctgcattacaggtggggaatggagtatgggcttttataaatcttgcttctgctttagcaggaagttatctgctctattatattgcgggttatattaattcggaatttatctcttggttgggtaaaaataccttagttatattggggtttaattattatattaatgccatagcgaaaaatatattaacttttgcacatatggaatactatgtcatattaagttttattattcagatcatattgctcgctattcttgtgaaaataattgcatgctggccagctcttaattccctggtgaatgggaaaatgtttgtaacttacaaagaagcaaaataa

SEQ ID NO: 71944 - DNA, 363 bp, Citrobacter koseri
ttgaatatattacgctctatcgtggaggctatgtatcctgattataatcaagccttcgatacggttatgcatggtcggaaaataagtctgtataatatgttcgtaggtaaggccgatgtggtcaatcagtattgccagtggcttttccctctattagacgaagtgaataaacagattgatttctctggttatgattcttatcaaaaaagaattttgggattcatggcagaaagattatttaatgtatggattgaacataataaaagaaatattaaagttggatacagaaaggttgtaaatattgaaggtgaaaatttaataaaaaaaggaagtgcactcttggttaggcatttcctaaaataa

SEQ ID NO: 71945 - DNA, 1281 bp, Citrobacter koseri
atgactagaaaaaaaactaaggcattgtttgctgttatcgcagcgagagtaattggtgtatccattagttttttgatgaatatacttgttactcgctgggtcaatgtaaatgaagccggaatattcttcacctccttctctattattatgttgtggggacttatcggtacatcagggttttgtgatgccattcttagaatgcgaccgcaacttatagccacaagaaattatatccaggcaagttcattggcattgtttggagcattaataattatagttatatcatgtctgttatcaggcgctatatatttttttctgacttacggagagtcattaaaggtctatggtgctttatatatttgtgcgagcatccctcttctttccatgatccaatatacgggatatatatttcagactaatgggagatcattattatctgttattataattaatatatcctatccgctgatattttcgtttattgttttagtatgtgccgttctgcatatggaagctaatgcattaaatttagtaaggtttttatttttatcaattatacttagttttatcttttgtgctgttttgtggaaaaaatatatatttactaatataaatgctgttgtttatttgaagaagcttaaatataaatatataattacaacattactatctttcttgctaatattaatatgtaataccattatacaatggattacacctatcatctctaactactatatttcaagtgaagacgttgctcttatctctgtttgcttgcggattggtttagttatcagtttcttccttatttcattaaatgttgtttttgcaccaaatttttccaagctgtatactgaagggaaatttgatgagcttaaattaatggtaagaagtagcacccgtcttgtcgttattttgtcattgccaggagtagcgtttctcttactattccctgagtttgtgctttcaatttttgggcgtgaatatactcaagcatctatcatacttagaatagtttgcattggtcagttaattaatgtcctgacagggtcggtcgctttcttattaacaatgacaggtaatgagaaaatatttagaaatattattttctttaatgcatttatgatgattatcaaccttaacttcatgggggggggattcggcataaaaggaattgcctgcgctgttgctctttctgtgattatacagaatgtcattgctgtctattttgtgaaaagaaaactggatatcaatatccttgattatttttatttgaagtaa

SEQ ID NO: 71946 - DNA, 1077 bp, Citrobacter koseri
atgctgcaggtaatattttcaccaattggttttgcagcattctctgttttacagattttttttgtttctataatatctttcttaaaaagaagcaagttttccttttttttattggctattaacataacacttattggattatatcttggtatagctaatcgttggggatatgattctattcactattatatacctttttatgagggtgatacctccagaaagtttgagccaggatttactttattagtctatatattacgaacaataggtataccatctgagttatttcctgtaataacaatattaattacaacatggttatcttttatagcaatactgaagctaacaaatgaatatgtacagacaactataattgctttttgtctgacaagtatgataagtttcatgtatctctatatgggaggaatgcgacaagctatcagttttagttttattcttttatcaatagcataccaatcaagaaatgcatcgattaaatcttttatcactattattatagctatcagtctacatttctctgctttaatatttttggttatgcctatatggagacgacttgattttcataaaaaatatataattattttgctatcacttatttttgctttggcatcagaatatattgttggttttgtgctcaaagcattacccccgggaagtgtgtttgctaataaaataattcgagcatttgagtattcagatcgaaataatgaacacgccatatatatatataagtttttatattcttcaatatttgtatttattcctttattcttattggataaaataataaaaaataaaagcgcgtctcttattttagaatatgctctgttagcatatgttttctctgccatcttatttttcaccaaagaatcatcgatcagatatttgtttgtagtaaatgtttttttaatccctttttatattatgagtatagaacacgtttttgttaaaactcaacgaagggtaatattattactaatagttattatttttatgctttatggggttatatcacataactggttatctgaattagtgactcgatttatctaa

SEQ ID NO: 71947 - DNA, 1311 bp, Citrobacter koseri
atgaaaaaaatagcaataatgtccttttatgagagtaattcaagatatatacatcaactatcaaaacagataaaagaggtgactggtagagatactgtccagttgtgtatgtatgcttcttcgactaactattgcatcaaaaactcattagaatatattgatttacctggaaatgttcgtaaatataagtcagaaaaaaatattacaatacctcgtcatttttatgagtttcatgtctctcttttccctgaattagaaaaatattttttagatatctctaggaaatattgggatttttatgagaattatttcccatgggaagatttccacagtgtggtatttattggagataaacgtttatattcttctattggtggctattttgcaaaattaaaagaggttcaagtattctattttgaacctggcccatatgggacgatgatttttgatccgaaaggcgtcaattgtaatatgagcatcactactgctagtctcgatatgatgcggaataatgtaaatgaagatgaaatagaatatttatataataaatgcattacatctgtcagtgaaaagaaattttatgaaaagaatattggttcttatttcaggaagataaaagatgtccttcaaagtgtccctccatctatttttaggaaagtatgtgctgtcgagctatatacaggggagggtttttgggagtctattccttatttattaggacgtctgccatttaaaaagaatagtaaagcaaataatattgatatagaaaaacaagggaaatatatttttgttgcgttacaagtgccaaatgatgtccagattatctcaaactgtaaattattttcatcaattgatgatatgttaacttcagttattaaatcattacctgagggatatgatcttattgttcgtgaacatccaatgaataaagggagatataataaatcactgtataagttaattaatgaaaatgtgaatgtacatattgataataatactccaattgatcatttaatcgataaatcttcgttagtaattgtaataaactcaactgtaggacttgaggctgctgtaagaggtgctgctgtattaacacttggtgatatatattatcctcaaatagtaaataatctaacatctcgagaatcgttaaaaactgaaatagttaaagccatcgataataaagctacccaggaagaagtgaaactttatatagcttatttatttaaaaactatatggttaaagataattataaaaatagcaattattatgatctcaacaatgcggtagaaaaaatatgctgcaggtaa

SEQ ID NO: 71948 - DNA, 894 bp, Citrobacter koseri
atgattaatttgaaagcagttattccggtagctggtctgggtatgcacatgttgcctgccaccaaggcaatccccaaagagatgctgccgattgttgacaaaccgatggtacagtacattgttgacgaaattgttgctgctgggatcaaagaaatcgttctggttactcacgcttccaaaaatgcggtagagaaccacttcgacacctcctacgaattagagtcacttctggagcaacgcgtgaaacgtcagttgctggcggaagtgcagtccatttgcccaccaggcgtgacgattatgaacgttcgccaggctcaaccgctgggtctggggcattccattttatgcgcacgtcctgtgattggtgacaacccgtttgtggtggtgctgcctgatatcatcattgatgacgcgacggccgatccgcttcgctataatcttgcggcaatggtagcgcgtttcaacgaaacgggacgcagccaggtgctggcaaaacgcatgaaaggcgacctttcagagtattccgttatccagaccaaagaacctctggataatgaggggaaagtcagccgtattgttgagtttattgaaaagccggatcaaccgcagacgctggactcagatctgatggcggtaggtcgctatgtgttgtcggcagatatctgggcagaactggaaagaacagaacccggcgcctggggccgtatccagttgacggatgcaattgcagaactggcgaaaaaacagtctgttgacgccatgctgatgacaggcgacagctacgactgcggtaagaaaatgggctatatgcaagcgttcgttaagtacgggctgcgcaacctgaaggaaggggcgaagtttcggaaggggattgaggcgttgcttaacgagtaa

SEQ ID NO: 71949 - DNA, 1404 bp, Citrobacter koseri
atgccagagaataaactctcccgtcgcaccttcctgacggcaggctctgcgcttgccgcacttcctgtcctccattccccctttgcccgcgcgcttgaaccccggcaaaccgtcaatattcaggattataacccccgagactggatagcctcgtttaaacaggcgtttagcgaagcgcagacggtcgttgttcctgcggggctggtctgcgagaacgtcaataccggcatctttatcccggcaggaaaaacgctgcatgtgcgtgggcgcttaagcggcaatggtcgcggtcggtttgtgttgcaggatggctgccaggtaacaggggagcagggcggcggcctgcacaacatcaccctggatgtgcgcggttcagattgcaccatcagggggattgccatgagcgggttcggccccgttacccagatctacattggcggcaaaaagccgcgagtgatgcgtaatctcaccattgatgatattacggtcagtcatgcaaattacgccattctgcgccagggattccacaaccaggtggacggcgcgcgcatcaccaacggccgattcagcgatctgcaaggggatgctatcgaatggaacgtggcgattaacgatcgtaacattctgatctctgaccatgttatagaacgcatcgactgcaccaacgggaaaatcaattgggggattggcatcgggctggcgggcagcacctacgataatgcctacccggaagagcaaaccgtaaagaactttgtcgtggccaatattaccggatcggattgccgacaactggttcatgtggagaacggaaaacactttatcattcgtaatgtaaaagcgcggaatatcacgcctgatttcagtaagaaagcgggcattgataatgcgacggtagcaatttatgggtgtgataatttcgtgattgataatatcgatatggtgaattgtgcggggatgcttattggttatggcgtcgtcaaaggcaaatatttatccattccgcaaaacttcaaattaaatgatattcatcttgataacactcgcctggcctataaactgcgcggcattcagatctcttcagggaatgcgacctcctttgtggcgatcaccaatctggatatgaagcgcgctacgcttgaactacacaaccagccgcagcatcttttcctgcgtaatatcaaggtaatgcaggagtctgcgacagggcccgcgctgaagatgcactttgatctgcgtaaagatatacgcggcaagtttatggcgaaacaggacactttgctgtcgctggcgaacgttcatgcagtcaatgagaaggggcagagctctgtcgatatcgacaggattaaccacaaggtggtgaatgtggaagcggtcaatttcaggttgccggagcgggggaggtag

SEQ ID NO: 71950 - DNA, 1221 bp, Citrobacter koseri
atgaaggtcagcttctttttactgaagttcccactgtcgtcagagaccttcgtgctgaaccagatcaccgcatttatcgatatggggtttgaggtggaaattgtcgcgttgcataaaggcgaccttgagaacacgcatgcggcgtatgacacctaccgcctgggtgaaaaaacgcactggctgctggatgaaccggaaggcaagctggcgaagctacgctatcgcgccattgcgtctttgcgtggcggtacgcgcgcatcgacctggaaggcgctgaacgtttcacgttacggtgatgaagcgcgcaacctgattctgtccgcaatctgcgggctgacgccaaaaatgttccaggcggatgtttttatcgcccattttggcccggcgggcgtaacggcggcgaagttgcgggaacttggcgtgatcaaaggcaaaatctccaccgtttttcacggtattgatgtatcgcaccgcgatgtactcaatcactacacgcctgaatatcagcgtctgttccagcgtggcgatctcatgctgcccatcagtgaattatgggcgggacgccttaaaacgatggggtgcccgcccgagaaaattgcggtctcgcggatgggcgtcgatatgacgcgctttactcaccgtccggtaaaagcgccgggtacgccgctggagattatctccgtggcgcgattaaccgagaagaaaggactgcacgtagcgattgaggcctgccgacagctcaaagcgcagggggtggcgttccgttatcgcatcctgggcatggggccgtgggagagacgcctgcgcacattgattgagcagtaccagcttgatgatgtgattgaaatgcccggctttaagcccagccatgaagtgaaaaaaatgctggatgacgcggatgtgtttctgctgccctccatcaccggtacggatggtgatatggaaggtattccggtggcgctgatggaagcgatggcagtcgggctgccggtggtttcaaccgttcacagtggaattcctgaactggtggatgccggtaagtcgggctggctggtgcctgaaaatgatgctgaggcgttggcggagcaactggcggcattcagtcgtatcgacaccgagtcgttgcggcctgtggtacaacgcgcccgtgaaaaagttgaggctgattttaatcagcaggtaattaatcaacagttagccagcctgctgcaaacgatgtaa

SEQ ID NO: 71951 - DNA, 1281 bp, Citrobacter koseri
atgaaattactgatcctgggtaaccacacctgcggcaaccgtggcgacagcgcaattttgcgcggcctgctggatgccattaaccgtcttgagcctgacgcagaagtggatgtgatgagtcgctatccggtgagctcatcctggttattgaatcgcccggtgatgggcgatccgctctattcgcagatgaaacagcacaataacgcggcgggcgtgatggggcgcgtgaaaaaagtgctgcgtcgccgctatcagcatcaggtactgctctcccgcgtcaccgataccggcaagctgcgcaatattgccattgcgcaggggtttaccgacttcgtgcgtctgttatccggttatgacgccattatccaggtcgggggctcgttttttgtcgatctgtacggtgtgccgcagtttgaacatgcgttgtgtacttttatggcgaagaagccgctgtatatgattggtcacagcgtcggccccttccaggacgagcagttcaacacgttggcgaattacgtctttggccactgtgatgcgttgattctgcgtgaatcagtcagtctggagctgatgaagcgtagcgatatcaccacgacgaaagttgaagcgggggtcgataccgcctggctggttgatcatcacaatgacgattttgaaccgggttatgccgttcagcactggttagcccttgccggaaagcaaaagacggttgcgattacgctgcgtgaactggcgccattcgataagcgtctgggaaccacccaacaggcttacgagaaggcgtttgctggcgtggtgaaccgtatccttgaggaaggctatcaggttattgcgctgtcaacctgtaccggtatcgacagctataacaaagacgatcgcatggtggcgttaaacctgcgccagcacgtcagcgatccggatcgttaccatgtggtaatggacgaactcaacgatcttgaaatgggtaaaatcctcggcgcctgtgagctgaccgtgggcacgcgcctgcattccgccattatttccatgaatttcgcgacccctgcgattgccattaattatgagcacaaatctgccggaattatgcaacagctgggattgcctgaaatggcgatcgacattcgtcatttgctggacggcagcctggaagcgatggtggccgatacgctggggcagttgcccgcgctcaacgcgcgactggcggacgccgtaaaccgcgagcgtgaacagggctttcgcatggtgcagtcagtattaacccgtatcggggaggggaaatga

SEQ ID NO: 71952 - DNA, 1479 bp, Citrobacter koseri
atgagcttacgagaaaaaaccatcagtggggcgaagtggtcggcgatcgctacggttatcattatcgggctgggactgattcagatgaccgtgctggcgcggattattgataatcaccagtttggtctgctgaccgtgtcgctggtgattatcgccctcgccgatacgctgtcggacttcggtattgccaactccattatccagcgtaaaacgataagccacctcgaactcaccaccctgtactggctgaacgttggcttagggctggcggtgtgcgttgtggtgtttttgcttagcgacgcgatcggcaacgtgctgcataaccccgatctggcgccgctgattaaaaccctgtcgctggcgtttgtggtgatccctcacgggcaacagtttcgcgcgttgatgcaaaaggagctggaatttaacaaaataggcatgatcgagaccagctcggtgctggcggggttcaccttcaccgtggtcagcgcccatttctggccgctggcaatgacggcgatcctcggctatctggtcaacagcgccgtccgtacgctgctgttcggctattttggccggaagatctaccgccccggcctgcatttttcgctggcgtctgtttcgtcgaacctgcgctttggcgcatggctgacggcggatagcatcatcaattacgtcaatactaacctgtcgacgctggtgctggcgcgtattctcggcgcgagcgtcgccgggggatacaaccttgcttataacgtggcggtagttccgccaatgaagcttaacccgatcattacccgcgtattgttcccggcgttcgccaaaattcaggatgatacggagaagctgcgcgtcaacttctacaagctgctgtcggtcgtggggattattaattttcccgcgttgctcggtctgatggtggtatcgaataattttgtaccgctggtttttggcgagaagtggaacagcatcattccggtgctgcaactgctgtgcgtggtggggctgttgcgctctgtcggcaacccgattggttcgttgctgatggcgaaagcgcgcgtcgatatcagcttcaaattcaatgtgttcaaaacctttctgttcattccggcaattatcgttggcggccatctggcgggggcgacaggcgtgacgctgggcttcctgctggtgcagatcatcaataccgttctgagctatttcgtcatgattaaaccggtgctggggtcgagttaccgccagtacatccttagtttgtggctaccgttttatctctctttacctaccctggcggtgagctatgggttggggattgcgctgaatggacatctgccgctgagcgtactgctggcaacgcaaatcgtggcgggcgcgctggccttcgccgtgatgattgtgctttcgcgccatccgctggttgtggagatgaagcgccagttttgccgtagcgaaaaaatgaaaacactgcttcgcgcaggataa

SEQ ID NO: 71953 - DNA, 1395 bp, Citrobacter koseri
atgacaaatctaaaaaagcgcgagcgagccaaaaccaatgcatcgttaatctctatggtgcaacgcttttcggatatcaccatcatgtttggcgggttatgggttgtctgcaagctgagcggattgcctttcctgtatatgcatctgttggtggcgctgatcacgctggtggtttttcagatgctgggcggcataactgatttttaccgttcctggcgcggcgtgaagatttcgacggaactggcgctactgctgcaaaactggacgctgagtctggtcttcagcgcgggcctgattgccttcaataacgacttcgataaccgtcttaccgtctggctggcgtggtatgcgctctccagcgtgggtctggtggtctgccgctcgttcattcgctacggagccggatggctgcgtaaccgtgggtacaacacgcgccgggtggcggtggcaggggatcttcctgccggtcagtcgctgctggacagcttccgcaaggagccgtggttgggttttgaagtggtcggcgcttactacgatccgaaaccgggcggcgtctcttctgactgggccggaaatctgcaacaactggtcgaggatgccaaagcctcacgcattcataacgtctatatcgccatgtcgatgagtgacggggcgcaggtaaaaaaactggtgcgcgctctggcggacactacctgctcggtaatcctcatcccggatgtttttaccttcaatattctgcactcgcgtattgaagaggtaagcggcgtgccggtcgtgccgctgtatgacacgccgctgtcaggggtcaatcgtctgctgaaacgcgcggaagatatcgtgctggcgtcgctgattctgctgctgatctctccggtgctgtgttgcattgcgctggcggtcaaattcagttcgccagggccgatcattttccgtcagacccgttatggcatggacggtaagccgatcaaagtgtggaaattccgctccatgaaggtgatggaaaacgacaaagtggtgacgcaggcgacgcaaaatgacccgcgtgtaacccgcgtggggaattttctgcgccgtacctcgcttgatgaactgccgcagtttatcaacgttctgaccggcggcatgtctatcgtcgggccgcgcccgcacgcggtggcgcataacgagcagtatcgccagcttatcgaaggctacatgctgcgccataaagtcaaacccggcattacggggtgggcgcagatcaacggctggcgcggcgagaccgacacgctggagaaaatggaaaagcgcgtggagtttgatctggagtacatccgcgagtggagcgtgtggtttgacatcaagattgtttttctgacggtgttcaaaggctttgtgaataaagcggcgtactga

SEQ ID NO: 71954 - DNA, 1371 bp, Citrobacter koseri
atgacgaaattaacctgttttaaagcctacgatattcgcggcaggctgggcgaagagttgaatgaggatatcgcgtggcgtattggccgcgcttacggcgagttcctgcaaccgaaaaccattgtgctgggcggcgatgtgcgcctgacaagcgagtcgctgaaactggcgctggcgaaagggttgcaggatgcgggcgttgacgtactggatatcggcctttccggcacggaagagatctattttgcgaccttccatctgggcgttgatggcggtattgaagtgaccgccagccataacccgatggactacaacggtatgaaactggtgcgcgagggcgcgcgccccatcagcggcgacaccggcctgcgcgacgtgcagcgtctggcggaagccaatgattttccaccggtcaacgaagccagacgcggcagctataagcagatcaatctgcgtgacgcctacatcgaccacctgttcggctacatcaacgtcaacaatctcacgccattgaagctggtcatcaactccggcaacggcgcggcaggcccggtggtggatgccattgaagcccgctttaaggcgcagggtgtgccggttgacttcatcaaaatccacaacacgccggacggcaacttcccgaacggcatccctaatccgctgctgccggagtgccgcgatgacacccgcaacgccgttattgaacacggcgcagatatgggcattgccttcgacggggatttcgaccgctgcttcctgttcgatgagaaagggcagttcattgagggctactacattgtcggcctgctggcggaggcatttctggagaaacacccgggagcgaagatcatccacgacccgcgtctgtcctggaacaccgttgatgtggtgacggcggcgggcggcacgccggtgatgtcgaaaaccggccatgcctttattaaagaacgtatgcgccatgaagatgctatctacggcggcgaaatgagcgcccatcactacttccgtgattttgcgtactgcgacagcgggatgatcccgtggctgctggtggcggagctggtatgtctgaaagggcagtcgctgggggaactggtgcgtgaccggatggcggcgttcccggccagcggtgaaatcaacagcaaactggcagagcctgcggccgccatcagccgggtggaagcacactttgcgcgtgaagcgctgacggtggacagaactgacggcatcagcatgtcgtttgccgactggcgcttcaacctgcgttcttccaataccgaaccggtggtgcggctgaacgtggaatcacgcggcgacattccgctgatggaagcgcgaacgcgaaccctgctgacgttgctgaatcagtaa

SEQ ID NO: 71955 - DNA, 1437 bp, Citrobacter koseri
atgggtcaacgtaaactttatccggtcgtgatggcgggtggctcgggtagccgtttatggccgctttctcgtgtactttatccaaaacagtttctctgcctgaagggcgatctcaccatgctgcaaacgaccatttgtcgtctgaacggcgtggagtgcgaaagcccggtggtgatctgcaatgagcagcaccgctttattgtcgccgaacagttgcgccagctaaacaaactgacggagaacattattctcgaacctgccgggcgcaataccgcgccagcgattgcgctggcggcgctggcggcgaaacgccacagcccggaaggcgatccgctgatgctggtactggcggccgatcacgtcattgctgatgaaggggcgtttcgcgacgcggtgcgtaacgccattccgtatgccgaagcgggcaaactggtcacgttcggcatcgtgccggatctgccggaaaccggctatggctacattcgtcgcggcgatgtctctcccggcgagcaagacgcggtcgcttttgacgtcgcgcagtttgtcgaaaaacccaatcttgaaaccgcgcaggcctacgtggcgagcggcgactactactggaacagcgggatgttcctgttccgcgccgggcgttatctggaagaactgaaaaaataccgtcccgatattctggacgcctgcgaaaacgcgatgagcatcgttgaccccgacctcgattttatccgcgtggatgaagaggcgttcctcgcctgcccggaagagtcggtggactacgcggtgatggagcgcacggcggatgcggtggttatgccgatggatgccggctggagcgacgtgggttcctggtcttcactgtgggaaatcagcgcgcacaccgccgagggaaacgtgcatcacggcgacgttattagccataaaacggaaaacagctacgtttatgcggagtcgggcctggtgacgaccgtcggggtgaaagacctggtggttgtacagaccaaagatgcggtgctgattgccgatcgcaatgcggtgcaggatgtgaaaaaagtggtggagcagattaaagctgacgggcgtcatgagcaccatatccaccgtgaagtctaccggccgtggggcaaatacgactccatcgacgctggcgaccgttatcaggtgaaacgtattaccgttaaacccggcgaggggctctccgtgcagatgcatcaccatcgggcggagcactgggtggtggtcgcagggacggcaaaagtcaccatcaacggcgaaatcaaactgctcggtgaaaacgagtctgtctacatacctctgggggcgacccactgcctggagaatccgggaaaaattccgctcgacctgattgaagtccgctccggttcgtaccttgaagaggacgacgtggtgcgcttcgccgatcgctacgggcgggtgtaa

SEQ ID NO: 71956 - DNA, 1224 bp, Citrobacter koseri
atgagaatccttgtgtacggcatcaactactcgccggagctaaccggcatcggtaaatacaccggcgagatggtggagtggatggcgcgtgaagggcatgaagttcgggtgatcaccgcgccgccttattacccgcagtggaaagtgggcgagcagtattcctcctggcgttatcgccgggaagagggggcggccaccgtctggcgctgcccgttatatgttccgacgcagccatcgacgctgaaacgcttgctgcacctgggcagtttcgccctgagcagtttcttcccgctgatggcgcagcgacgctggaagccggatcggattatcggcgtggtgccgacgctgttttgcacgccgggtatgcgtttgctggcgaaactctccggcgcgcgcacgttgctgcacattcaggactacgaggtggatgcgatgctcggtctggggctggccgggcaaagcaagagcggtaaggttgcccgactggccgccgcgttcgagcgcagcggtctgcacaacgtcgataacgtctccaccatctcccgctcaatgatgaataaagcgcaggaaaaaggggtcgcggcagacaaggtgattttcttccctaactggtcggaagtggcgcgttttcgcgacgtgaccgctagcgatgcggcccgtttacgccagacgttggggttgccggatgataaaaaaatcattctgtactccggcaatattggtgaaaaacaagggcttgagaacgtgatcgacgctgctgagcgtcttaccgatcgcccctggttgtttgtcattgtcgggcagggcggcggcaaagcgcggctggaaaaaatgacccgtgagcgcggcctggataacgtcaaattttatccgcttcagccttatgaagccttacctgcgctgctgaagatgggcgattgccatctggtggtgcaaaagcgcggcgcggcggatgccgttttgccgtcgaaactgaccaatattctggcggtgggcggcaatgcggtgattaccgctgaaccggaaaccgaactcggccagctttgtcgcgactatcccggcattgccgtttgcgtggaaccggagtcggtcgacgcgctggtgacggggattacccaggcgcttgccatgcctgagaacaacacggtggcatgcgaatatgccgaacgcacgctcgataaagagaacgtgttacgtcaatttattacagatattcggggataa

SEQ ID NO: 71957 - DNA, 555 bp, Citrobacter koseri
atgtttttacgtcaggaagatttcgctaccgtcgtgcgctctacgccgctgatctccattgatttgatcgtggagaatgagcgcggcgagttcctgttgggcaagcgcaccaatcgccctgcgcagggttactggttcgtaccgggcgggcgcgtgcagaaggatgagacgctggaaaaagcgtttgagcgtctcactcaggcggaactggggctgcgtttaccgctgtccgcaggcgcgttttatggcgtctggcagcacttctatgacgataacttctccggcgaagactttaccactcattacgttgtgcttggttttcgcctgaaggtgaatcaggcggatctgcatctgcctgatgaacaacatgaagattatcgctggcagacgcctgagcggcttctggcaagcgccagcgttcacgacaacagtcgggcgtacttcctcgcggatcgtcagtccgggacgcctggatgttacacgaaatcattcagcctgaatcaaggcggcaggggtgagcagatgcagccaacgcagagtcaggttgaaggatga

SEQ ID NO: 71958 - DNA, 966 bp, Citrobacter koseri
atgatgaaacaacgtatttttgtggcgggccatcgcgggatggtgggttccgctatcgtaagacagctggcgcagcgcgaggatgtggagctggtgctccgcacccgcgacgagctgaatttgctggacagccgggcggtacaggcattcttcgctgaagaacgcattgaccaggtttatctggcggcggcgaaggtgggtggtattgtcgccaacaatacgtacccggccgatttcatctacgagaacatgatgattgagagcaacatcattcacgccgcgcatctgcacaacgtgaacaagctgttgttcctcggttcctcctgtatttaccccaaactggcaaaacagccgatggcggaaagcgaactgctgcaagggtcgcttgaaccaaccaacgagccgtatgccatcgccaaaattgccgggatcaaactgtgcgagtcctggaatcgccagtttgaccgcgattaccgctcggttatgccgaccaacctgtacgggccgcatgacaacttccacccgagtaattcgcacgtcattcccgcgctgctgcgtcgcttccatgaagcgaccgaacagaacgcgccggatgtagtggtatggggcagcgggacaccgatgcgcgagttcctgcatgtggatgatatggccgctgccagcatccatgtgatggagctggatcgcgaagtgtggcaggagaacacgcagccgatgctctcgcacatcaacgtcggtactggtgttgattgcaccattcgggagctggcgcaaacgatcgctcaggtcgtgggctacaaagggcgggtggtgtttgacgccacgaaaccggacggcgcgccgcgcaaactgctcgacgtaacgcgcctgcatcagcttggctggtatcacgaggtgtcgctggaggccgggcttgccagcacttaccagtggttccttgagaaccagcaccggttccgggggtaa

SEQ ID NO: 71959 - DNA, 1122 bp, Citrobacter koseri
atgtcaaaagtcgctctcattactggcgtaaccgggcaggatggttcttacctggcggaacttctgctggagaaaggttacgaggttcatggtatcaagcgtcgcgcgtcttcgttcaataccgaacgcgtggatcatatctatcaggacccgcatgccagcaacccgaaattccacctgcactacggtgatctgaccgactcatccaacctgacccgcattttgcaggaagtgcagccggatgaagtctacaacctaggggcaatgagccacgttgcggtttcgtttgagtccccggaatacaccgccgacgtagatgcgctgggtacgctgcgtctgctggaggcgatccgcttcctgggcctggaaaagaaaacccgtttctatcaggcctccacctctgagctgtacggtctggtgcaggaaattccgcaaaaagagaccacgccgttttatccgcgctctccgtatgccgtcgccaaactgtacgcctactggatcaccgttaactaccgcgaatcctacggcatctacgcctgtaacggcattctgttcaaccatgaatctccgcgtcgcggtgaaaccttcgtgacccgcaaaatcacccgcgcgattgccaatatcgctcaggggctggagtcctgcctgttcctcggcaacatggattccctgcgtgactggggtcatgccaaagactacgtcaagatgcagtggatgatgctgcaacaagagacgccggaagatttcgtgatcgcgaccggcgtgcagtactccgtgcgccagtttgtcgaaatggcggcggcacagctggggatcaaactgcgctttgaaggggaaggcgtggaagagaaagggattgtcgtttctgtcaccggtcatgacgcgccgggcgtgaagccgggtgatgtgattatcgccgttgacccgcgctacttccgtcctgcggaagtggaaaccctgctgggcgacccgtcaaaagcgcacgagaagctgggctggaaaccggagatcacactccaggagatggtgtctgaaatggttgcgaaagacctggaagcggcgaagaaacattccttgctgaaatctcatggctacgaggttgccatcgcgctggagtcctga

SEQ ID NO: 71960 - DNA, 555 bp, Citrobacter koseri
atgcaggatttaagcggcttctcggtgccgaaagggttccggggcggcaatgcaataaaagtgcaattatggtgggcggtgcaggcgacgttatttagctggtcgccgcaggtgatgtatcgctggcgcgcatttttattacggatgtttggcgcaaaaataggaaaaaacgcagtcatccgaccttctgtaaaaattacgtatccgtggaaattgacgttaggtgattacgcctgggtcggcgatgacgccgttttatatacgctgggtgacattacgattggcgcacactctgttatttcgcagaaaagctatttatgtaccggcagtcatgattatgccagcgcccattttgatattaacgccacgccaattgtgattggcgagaaatgctggctggcgacggatgtctttgtcgctcccggcgtaacgataggcgacggcaccgtcgttggtgcgcgaagcagtgtttttaaatcgctaccggcaaacacaatctgccgtggcaatcccgcagtggtaacgcgcgagcgcgttgagaaagttactccctaa

SEQ ID NO: 71961 - DNA, 747 bp, Citrobacter koseri
atgttacttagcgtcgttactgtcgcctttcgtaattacgacggcgtggtaaacacctggcgctcgctgcgcaacctggcgcgcgatcccagcctgacctttgaatggattgtcgtggacggcggttcggatgacggcaccgcccagtttctggaaaaactcaacggtgagtttaacttacgcttcgtgagtgaaaaagatcgcggcatttacgacgcgatgaacaaaggcattgcgatggcgcaagggcgctatactcttttcctcaattccggcgatgtgtttcatgaagatgtcaccgattttgtccgtcaactggggcgaaaaaatgatgacgcgatgtacattggtgacgcgttgctggattttggtgaaggaaataaaacccgacgaagcgccaaacatggctggtatatctaccacagcttacccgccagccatcaggctattttcttcccgaccgcagggctgaaaaaacatccatacgatctgcaatataaggtgtcatctgattacgcgctggcagccagtctttataaatcaggctatcctttccgtcgaatcaaagggttggtgtctgaattttctatgggcggcgtgtcaacctcaaataatctggaattatgccgggatgcaaaaaacgtgcagcgtaaaatattacgcgtacccggattctgggcggaattatcttatttactacgtctgaaaacgacaggcaaagcaaaagccttatataacaaagcctga

SEQ ID NO: 71962 - DNA, 1221 bp, Citrobacter koseri
atgtctcgttctatcagaatctgtagttacctgctgctgccgctgatctacctgctggtcaacgtcaaaattgcccaactgggcgaaagcttccccatcaccatcgtcacctttttacccgttttgctgttgttgttcattgagcgcatcagcattaaaaaattgatgattgcgctgggcgtgggggcagggctgacggcgtttaactacctgttcggtcagtcgctggatgccagcaagtatgtcacctcgacgatgctgtttgtttacatcgtcatcattatcggcatggtgtggagtattcgctttaaaaccgtttccccgcataactaccgcaagatattacgttttttctatatggtggtggcgtttgtggtggcgctggcggcagttgagatggcgcagatcattctcaccggcggcagcagtttaatggaaggaatttcgaaatatcttatttacagtaatagctatgtgctgaattttattaaatttggcggcaagcgaaccactgcgctctattttgaaccggcgttttttgctctggcgttaatctcaatttggctcagcatcaaacagtttggtatcaaaacccctaagaccgatgctatgattctggcagggataatattatcaggatcattttcaggggtaatgacctttatcctgttttacttactggagtgggcatttcagtatctgaataaggatgcgataaggaaaaaattgccactggcgattatttcgttgggcgtatttttagtcggtgtggtttttgcttttccttatatcgctgaacgtcttggagatttaggaacggaaggctcgtcatcgtattatcgtatcgttgggccattagtgatggtcggttattcgttgacccatattgatggcgtagtcagatttggctcactttatgaatatgtcgcatcattcggaatttttaacggtgcggatgtcgggaaaacaatagacaatggcctgtatctgctgattatttatttctcatggttcgcggtgttattgaccgcatggtacatgtggaaaatcttaaaaatgacgctgaatgcgtttggtgataatcagaattttcgggtgcagctttatctctttacgccggtatcgttgttttttaccggttcgatatttagcccggaatatgcatttttaatcgtttgtccttttattttgcgcaaagcgctaaatattacgaattcatga

SEQ ID NO: 71963 - DNA, 1218 bp, Citrobacter koseri
atgaatattctgcaatttaatgttcgactggcggaaggcggcgcggcgggcgtggcattagacctgcacctgcgcgcgctacaaaaaggcctgacctcgcactttgtctatggctacggcaaaggcgggaagaaaagcgtcagccacagcaactatccgcatgtgattaaacagacgccgcgtctgacatcggtcgccaatatcgcgctgtttcgtctgtttaaccgcgacctctttggcaatctcgataatctgtaccgcaaagtgacccggacacccggcccgctggtgctgcattttcatgtgctgcacagctactggctgaatctggcagaggttgtcgctttctgcgagaaggtgaaaaaccacaagccggacgtgaggctggtctggacactgcacgatcactggagcgtgaccggacgctgtgcctttactgacggctgtgaaggctggaaaagcggctgtcagaaatgcccgacgctgaccaattatccgccggtaaaagtggacagagcgcaccagctggtggtgggcaagcggcagctgtttcagcagatgctctcgctgggttgtcagtttatctcgcccagccagcatgtggcggaggcgtttaacagcctgtacggggcagggcgttgtcgcattatcaataatggcattgatgtggcgaccgaagcgattctgtccgaactgtcgccggtgagcgagcgccagggcaaaccgaaaattgccgtggtggcgcacgatctgcgctatgacggcaaaacaaaccagcagctggtgcgcgacatgatggcggcaggcaacaacattgagctgcacaccttcggtaagttttcccccttcgacggtgagaacgtggtgaatcacggctttgaaaccgataaacgcaagctgatgagcgcccttaaccagatggatgcgctggtgttcagctcccgggtcgataattacccgctgattttgtgtgaagcgttatctatcggcgtgccggtgatcgccacgcacagcgacgcggcgcaggaggtactggcaaaatcgggcgggcgaacgttcagtgaagacgaggtgcttaacctggtgcagatgagcaaatccgacattgcccaggccgtatttggcgcctcgctggaggccttttgcgagcgtagccgcaccgcatacagcggacaacagatgctggaggagtatgtctcgttctatcagaatctgtag

SEQ ID NO: 71964 - DNA, 489 bp, Citrobacter koseri
atgctggaggatctacgcgcaaacagctggagtctgcgcccgtgctgcatggtgctggcctaccgtgtcgcccatttttgttccgtctggcgcaaaaaaaatgtgctgaataacctgtgggccgcgccggtgctggtgctgtaccgcctgatgaccgaatgcctgtttggttacgaaattcaggctgccgcaaccatcggccgacgcttcaccatccatcacggttatgccgtcgtgatcaataagcatgttgtcgcgggcgacgacttcaccgtgcgtcatggcgtcaccatcggcaaccggggcggcgacagcctggcgtgcccggtcattggtaacggcgttgagctgggcgctaacgtcattttgctgggggatatcaccatcggcaataacgtgactatcggggcgggcagcgtggtgctcgacacggttcccgataacgcgctggtagtgggagagaaggcgcgagtgaaggtaattaaatga

SEQ ID NO: 71965 - DNA, 843 bp, Citrobacter koseri
atgacaatagacaacccactgatttcgatctacatgccaacctggaatcggcagcaactggcgattcgcgcgattaaatcggtgctgcgccaggactatacccactgggaaatgatcattgtggatgactgctcctcatcgtatgagcagttgcagcagtttgttgaagggttaaacgacccgcgcgtgcgctacacccacaatgcgatcaattccggcgcctgcgcggtgcgtaatcaggccattatgcaggcgaaagggcagtacatcaccgggatcgatgatgatgatgaatggacgccgaaccgtctgagcgtgttccttgaacataagcatcagctggtaacgcacgcgtttttatacgccaatgactatgtctgcgaaggcgaggtttactcgcagccggccagtctgccgttgtacccgaaatcgccgtactcacgccgtcttttttataaacgcaatatcattggcaatcaggtctttacctgggcctggcgctttaaagagtgcctgtttgataccgaactgaaagccgcgcaggactacgatattttcctgcgtatggtggttgagtacggcgaaccgtggaaagtggaagaggcgacgcagattctgcacatcaatcacggtgaaatgcagatcacctcctcgccgaaaaagttctccggctacttccatttctaccgcaaacataaagacaaattcgaccgcgccagcaaaaagtatcagctgtttacgctgtaccagatccgcaataagcgaatgacctggcgcacgttgctgacgctgttttctgtgcgtaacggcaaacgcctggctgacggactgcgggggcgttaa

SEQ ID NO: 71966 - DNA, 2163 bp, Citrobacter koseri
atgacagaaaaagtaaaacagcttgccgctccggtaacgggcagtgatgaaatcgatgtcggtcgcctggtgggaaccgtcattgaagcgcgctggtgggtgcttggcattacggcggtatttgcgctgtgcgcggtgatttacacgctattcgccacgccgatttacagcgccgacgcgctggtgcaaatcgagcaaaataccggtaactcgctggtgcaggatattggctctgcgctggccaataaaccgccggcatcagaagcggaaattcagctgattcagtcgcgtctggttctggggaaaaccgttgacgatctcgacctggatatctccgtcaccaaaaacaccttcccgctgtttggcgcaggctgggagcgtctgatggggcggcagaatgagacggtgaaagtgacaacgttcacccgtccaaaagagatgggcgagcaggttttcacgcttaacgtgctgagtgacaaaacctacgaactgaccagcgacggcggctttagcgcgcgcggtcaggccgggcaactgctgagtaaagacggcgtgacgatgatggtgagcgctatccatgcccgcccggacagtgaatttaccgtcactaaattctccacgcttgggatgatcaacaatttgcaaaacaacctgaccgtgacggaaaacggcaaagataccggcgtattgagcctggccttcaccggtgaagacaaggatcagatccgcgatattctcaacagcatcacccgcaactatctcgaacagaacgttgagcggaaatctgcggaagcggcgaaaagcctggcgttcctggcgaaacagttgccggaagtgcgcagtcgcctggacgtcgcggaaaacaaactcaacgccttccgtcaggataaagactccgtggacttaccgctggaggccaaggcggtgctggattcgatggtgaatatcgacgctcagcttaacgaactgaccttcaaagaggcggaaatctccaagctgtttactaaagcgcatccggcttaccgcacgctgctggaaaaacgtaaagcgctggaagacgaaaaagccaaactgaacgggcgcgtgacggcaatgccgaaaacgcagcaggaaattgtgcgtctgacgcgcgacgtcgaatccggtcagcaggtttatatgcaactgctgaacaagcagcaggagctgaagatcaccgaggccagcaccgtcggggatgtgcgtattgttgacccggcgattgcccagccgggcgtgctgaagccgaaaaaagcgctgattattcttggcagcattattcttggcctgatgctctctatcgtcggcgtgttgctgcgttcgctgtttaaccgtgggattgaaagtccgcaggtgctcgaagaacacggcatcagcgtctatgccagcattccgctgtcggagtggcagaaagcgcgcgataacgtcaaaacgattaagggcgttaagcgctacaaacagagccagttgctggcggtggggaatccaaccgatctggcgattgaagcggtgcgtagcctgcgtaccagtctgcatttcgccatgatgcaggcgcaaaacaatgtgctgatgttgaccggggtcagcccgtctatcggcaaaacctttgtctgcgccaacctggcggcggtcatcagccagaccaacaaacgcgtgctgctgatcgactgcgatatgcgtaaaggctatacccacgagctgctgggcaccaacaacgtgaatggtctgtccgacattctggtgggcaaaggggatatcgcctcctgcgctaaacccacttccatcccgcatttcgatctggtgccgcgcggacaggtgccgcctaacccgtcggaactgctgatgagcgagcgctttggcgaactgattgcctgggccagcgcgcgctatgacctggtcttaatcgatacgccgccgattctggcggtgaccgatgcggcgatcgtcggacggcatgtcggcaccacgctgatggtggcgcgttacgccgttaacacattaaaagaggtggaaaccagcctgagccgctttgagcagaacggcattccggtaaaaggcgtaatcctcaactccatcttccgacgggcgaccggttatcaggattacggttactacgagtacgaatacaagtcggattcaaaataa

SEQ ID NO: 71967 - DNA, 444 bp, Citrobacter koseri
atgtttaacaaaatcttagttgtttgcgtggggaacatttgccgttccccaacggcagagcgcttgctgaaaagttatcacccgtcgttaacggtggagtccgccgggttgggcgcgctggtgggaaggggcgccgaccggtcggcggtcagcgtggcggcggcgcataacctctctcttgaaggtcattgcgctcgccagatctccgggcgtatgtgccgggattatgacctgattctggcgatggaaaaacgccatatcgccagactgtgcgagatggcgccagagatgcgcgggaaagtgatgttgttcggccactgggacagcgagcgtgaaatacccgacccgtatcgcaaaagtcgcgaggcgtttgaagcggtgtacacattacttgaaaggtctgctcgccaatgggcgcaggcattgaacgcagagcaggtataa

SEQ ID NO: 71968 - DNA, 1140 bp, Citrobacter koseri
atgatgaaatccaaaatgaaattgatgccattattggtgtcggtaaccttgataagtggttgcacagtacttccgggcagcaatatgtctacgatgggtaaagacgtgatcaaacagcaagacgctgattttgatctcgaccgtatggtgaatgtctatccgttgacgccgcgcctggtggagcaattacgaccacgtccaaatgtggcgcagcccaatatgtcactggaccaggagatctcaagctaccagtaccgcgtcggcccaggcgatgttttgaatgtgacggtctgggatcacccggaactgaccacgcccgccgggcagtaccgtagctccagtgataccggcaactgggttcaacctgatggcaccatgttttatccctacatcggcaaagtgactgtggtgggcaaaactctgggtgaaattcgcagtgatattaccgggcgcttagcgaagtacattgctgacccgcaggtggacgttaatatcgccgctttccgctcgcagaaggcgtatgtctccgggcaggtgaataaatccggccagcaggcgatcaccaacgtgccgctcaccgttcttgatgccatcaacgccgcaggtggtctgaccgaaaacgccgactggcgcaacgtcgtgctgacgcacaatggccaggagcagcgaatttctttgcaggcgctgatgcaaaacggcgatctcagccagaaccggttgctctaccctggagacatcctgtttgtaccgcgtaatgacgatctgaaagtcttcgtgatgggtgaagtgaagaaacagagcaccctcaaaatggacttcagcggtatgacgctcaccgaagcattgggtacggcggaaggtatcgacctgaccacctccaatgccagcggcatcttcgtgattcgaccgctgaaaggcgagggcggacgcaatggcaagatcgccaatatttatcagcttgatatgtctgatgccacctctctggtgatggcgacggagttccgactgcaaccttacgatgtggtgtacgtcacgaccgcaccggttgcgcgctggaaccgtctgatcaatcagttgctgccgaccatcagcggtgtccgttatatgacggatacggccagcgacattcataactggtaa

SEQ ID NO: 71969 - DNA, 1584 bp, Citrobacter koseri
atggaatggattgccgatccatcaatctgggccggactcgtcacgcttatcgtcatcgagttagtcctcggcattgataacctggtctttattgccatcctcgctgaaaaactgccgcctgcgcagcgcgatcgtgcgcgcattaccgggctgctgttagcgatgatcatgcgcctgctgttgctggcgtctatatcgtggctggtcacgctgacgaagcctctctttagcatacgcgacctgagcttcagcgcccgggatctgattatgctgtttggcggtttcttcctgctctttaaagccacgatggagctcaacgagcggctggaggggaaagacagcgataaccccacccaacgcaaaggggcgaaattctggggcgtggtggcgcaaattgtagtgctggacgccatcttctccctcgactcggtcattaccgccgtggggatggtcgaacaccttgcggtgatgatggcggcggtgattatcgccatcagcctgatgctgctggccagtaaatccctgacccggtttgtgaacagccacccgaccatcgtgatcctctgcctcagcttcctgctgatgatcggcttcagcctggtagcggaagggtttggcttccatattccgaaaggctatctgtacgccgcgatcggtttctcggtgatgattgaagcgctgaaccagctggcgatcttcaaccgtcgtcgcttcttatccgccaaccatacgttgcgccagcgcaccaccgaagcggtgatgcgtttgctcagcgggaaaaaggaggatgccgagctggatgctgacacctccgccatgctggcggatcatgacgacagccagattttcaacccgcaagagcggcagatgattgagcgggtgctgaacctcaaccagcgcaccgtcagcagtatcatgacctcgcgccatgatattgagcacatcgatctcgacgcgcctgaagaggaaattcgcgccctgctggaaaaaaaccagcatacgcgtctggtagtgaccggagaggacgaacaggaagagttgcttggcgtggtgcatgtcatcgacctgctacagcaatcgctgcgcggcgatccgctcgatctgcgggcgttgatccgtcaaccgctggtgtttcctgaaacgctgccgctgcttccggcgctggagcagttccgtaacgcccgtacgcattttgcttttgtcgtggatgagtttggttccgttgaagggatcgtgaccctgagcgacgtcatggaaaccatcgccggtaatctgccgaacgaagtggaagagatcgacgcccgtcacgatattcagaaaaacccggacggctcctggaccgccaacggccatatgccgctggaagatctggtgcagtacgttccgctgccgctggatgagaaacgcgagtaccacaccatcgcggggttgttgatggaatacctgcaacgcgtgccgaaaaccggagaagaggttcaggtgggagattacctgttgaaaaccttgcaggttgagagtcaccgcgtacagaaagtgcagattattccgttacgtagcgatgacgagttagattacgaggtgtaa

SEQ ID NO: 71970 - DNA, 1854 bp, Citrobacter koseri
atgagacgatttctgacgacgctgatgattctcctggtcgtgctggtggccggtttctcggcgttggtgatgctggtgaatccgaatgatttccgcgcgtatatggtgcagcaggtcgctgcgcgtagcggatatcaactgcaactggatggccctctgcgctggcacgtatggcctcaactcagcatcctttctggacggatggcgttgacagcggaaggcgccagcgaacccctggttcgggccgacaatatgcgcctggacgttgcgctatggccgcttcttagtcatcagttgaaggttgaacaggtgatgctcaaaggcgcggtcatccagttgacgccgcagacggaagcggcgcgccgggaagacgcgcctgttgcgccaaaagacaatacgctgccggatgtcccggaagaccgtggctggtcttttgatatcagcagcttacgcgttgctgacagcgtgctggtgttccagcatgaagacgacgagcaaattacggttcgcgatattcgcctgcaaatggagcaggatgaacagcatcgcgggacgtttgatttttccgggcgggtgaaccgcgatcagcgcgatctctcgctctccttcaacggaacggtcgatgcgtctgactatccgcacaacttaacggccggtatcgagcaactcaactggcagttgcagggagccgatttaccgaaacagggtattcagggccaggggcaattacaggcgcagtggcaggaaggacaaaaaaggctctctttcagtcagctcagtttaaccgccaacgacagcaccctgaccggacaggctcaggtgacgctgagcgatgagccggaatgggcgatcgatctgcaatttggcaagctgaatctggataaccttcttccgcgaaatgacgtggcaagcacatccaaaaacgtggcgcaaacggggcagcagtcgacgcggccgcggccggttatcgcgtcccgcgttgatgaacccgcttatcaggggctaaaagggttttctgcggccctctctctgcgggcggataacgcgcagtggcgtggcatggcgtttaccgacgtgtcggcgaaaatgacgaatcaggccggtttgctgaatatcgtcgagttgcaggggaaactcgacggtggtgagatttctctgcccggtacgctggacgcgagagcggcaaatccgcgcgccgtgttccagccgcgccttgaagatgtggaaattggcacgattctgaacgcgtttgactatcccatcgcgctgaccggcaaaatgtcgctggcgggtgatttttccggcgcggatattgacgcccaggcgtttcgtcatggctggcaagggcaggcgcatgttgaaatgcgcgacacgcgtatggaagggatgaacttccagcaactggtgcagcaggcggtaacgcgtagcggtggcgatgtgcagcaatcgcagcagaattttgataacgcgacccgtctggatcgctttgtcaccgacctggcgctggataacggtaagctcacgctgggcagcatggaagggcagtctgcaatactggcggtttccggtaatggcgcgttgaatcttgttgagcagacctgcgacacgcagtttaacgtgcgcgtgctgggcggctggacaggtgaaagcaagctgattgatttcctgaaagagacgccggttccgctgcgcgtatacggtaagtggcaggcgctgaattacaatctccaggttgaccagattctgcgtaagcatttgcaggatgaagcaaaacgtcgtctgagcgactgggcggatcgtaataaagagacccgcaacggtaaagacgtgaagaagctgctggataagctgtaa

SEQ ID NO: 71971 - DNA, 582 bp, Citrobacter koseri
atgcgtttgtgtgaccgagatattgaagcctggctggatgaaggccgcttgtcgatcaacccgcgtcctcctgttgagcgtattaatggcgcgacggtggatgtgcgccttggcaataaatttcgtacatttcgtggccacacggctgcgtttattgatttaagcggcccgaaggatgaggtcagcgccgcgctggatcgcgtgatgagcgatgaaatcgtgctggatgaaggcgacgcgttttatcttcatccgggcgagctggcgctggccgtgacctttgagtccgtcacgctgccgccggatctcgtggggtggctggatggccgttcctcgctggcgcgtcttgggctgatggtgcacgttaccgcgcaccgtatcgatcccggctggtccggttgcatcgttctggagttctacaactccgggaaattaccgctggccctgcgtccgggaatgctgattggcgccctgagctttgagccgctctccggccctgccgcacgcccttataaccgtcgccaggatgcgaaataccgcgatcagcaaggcgctgttgccagccggattgacaaagactga

SEQ ID NO: 71972 - DNA, 642 bp, Citrobacter koseri
atgactgttcagtctcatcagtgcgtcattatcggtattgctggcgcatcggcttccggcaagagtcttattgccagtaccctttatcgcgaattgcgtgaacaagtgggtgatgaacatatcggcgttattcccgaagacagctattacaaagatcaaagccatctgtcgatggaagagcgtgtaaaaaccaactacgaccatcctaatgcgatggaccacagtttgctgttccagcatctgcaagcgctcaagcgcggttcggcgattgaattgcccgtatacagctatgttgaacatacccgtatgcaggaaaccgttcgcgtcgagcccaaaaaagtcattattctcgaagggattttgctgctgacggacgcgcgtttgcgtgaagagatgaacttctctatttttgtcgataccccgctggacatctgcctgatgcgccgtattaagcgcgacgtcaacgagcgtgggcgttcaatggattcggtgatggcgcagtaccagaaaaccgtacgcccaatgttcctgcaatttattgaaccttctaagcaatacgccgatattatcgtaccgcgcggcggtaagaaccgcattgcgattgatattctgaaagcgaaaatcagtcagttctttgaataa

SEQ ID NO: 71973 - DNA, 3330 bp, Citrobacter koseri
atgagtaaacaaacccaacatgttttagttaccttgcctcaccctctactgcgtctcgtcagtttaggtctgctcacctttatctttacactcttctcgctggaactgtcgcgtttcgatacgccgctggcgccgctgtggttcccgacgtcaatcatgatggtcggtttttatcgccacgccggacggatgtggccggggatcgcactggtctgttccctcggcagcataagcgcgtcactcgttttttctcctgccggttcgctgaattttggctggacggcgatcaatattattgaagcggtggtcggcgcaatcctgttacgtaagctactgccctggtataaccccttacaaaatctgaatgactggctccgcctggcgacgggcagcgcggtgattccaccgttactgggaggcgcgctgctctggctgctgatgcccgaagggacgccagtaaaaacatttttgatttggattctgtccgagtctatcggcgcgctggcgctggtgccattaggcttgctgtttaaaccgcgctacctgcttcgccatcgcgatccccgtttactgcttgaaacgctgcttacgctgacaataacgctggggctaagctggctctctatgctgtacgtcccgtggcctttcacctgcattatcgttctgctgatgtggagcgcgatacgtctgccgcgtatggaagcgtttctgatcttcctcgccaccgtcatgatgacgtcgctgatgctggcatccgacccggcgctgctgtcaacgcccaaaacatacgccatgatgaacgttccctggctgccgcttttaatgatcctgctgcccgtcaacatcatgacaatggtgatgtatgcgtttcgggcggaacaaaaaaatatcacggaaagcgaattacgctttcgtaacgcgatggaatattccgcgatcggcatggcgttagtgggcaccgaaggccaatggctacaggccaacaaggcattgtgtcagtttcttggctacagccaggatgaactgcgcgccctcacctttcaacagctcacctggcctgaggatctgcataacgaccttgaacagctgaatatgctggtgcgcggcgatatcaacagctattccatggagaaacgctattacacccgcgacggcgatgtggtctgggcattactggccgtttcactggttcgccatagcgacaacaccccgctctatttcattgcgcaaattgaagatatcaacgacctgaaacataccgaacgggtaaacaagcgcctgatggagcggattacgctggcgaacgaagcgggcggtatcggcatctgggaatgggaactgcggcctgacgtgatcagctgggataagcgcatgtttgagctgtatgaggttccgtcgcatatcaaacccacctggcaactctggcacgactgcctgttgccggaagaccgcgcgccgacggaaaagatcatccgtgagtctctggcggcgcgtctcccttttaagctcgaattcaggattggcgtaaaagatggcatccggcatatccgcgccctggcgaaccgggtgctggataaagacggcgacgtggaacgcctgcttggcatcaacatggacatgaccgaagtcaagcagcttaacgaggcgctgtatcaggaaaaagagcgcctgcacattacgctggactccatcggggaagcggttgtctgtattgacgtcgatatgaacgtaacctttatgaaccctgtcgccgaaaagatgagcggctggcagcaggagcatgcgatcggcatcccgctgctgacggtattgcgcatcacttttggcgataacggcccgctgatggaaaatatctatagcgcggatatgtcgcgttccgccattgagcaggatgtggtgcttcactgtcgcaacggcggtcgctacgacattcattacagcattacgccactcagtacgctggacggcgggaatatcggctccgtactggtcattcaggacgtcacggaatcgcggaaaatgctgcgccagctcagctacagcgcctctcatgacgccctcacccacctggctaaccgggtcagttttgaaggccatcttaaagaaatcctgctgacggtacgcgatacgcgccagcatcatgcgctggtctttattgatcttgaccgctttaaagccgttaacgacagcgccgggcatgccgcaggcgatgcgctgcttcgcgagctggccgccttaatgctcagtatgctgcgttccagcgatatgctggcccgcctgggcggggacgaatttggcctcctgctgccggattgcaatatcgacagcgcgcgctttatttctacgcggatcgtcaacgcgattaatgaataccgctttacgtgggaagaccgtgaacaccccattggcgccagcgccgggatcacgctaatcaataacgccaatcgccttgcggcagacgtgatgtcccaggcggatatcgcctgctatgcctctaaaaacaacggtcggggatgtgtcaccgtgtacgaagcgcagcaggaacaggcgcacagcgggcgggaagtcacgtctcaggatgaacaatggcgcataatcaaagataaccctctattgatgatcgcccgtggggtcgcgtcgccgcgcatccctgaaacgtgcggtttttggctgatctcgctgcggctgtggaccagcgacggcgaaatcatggaggagcaggcattccgcgcagggctaaccgatcccgaactcagccacgctctcgatcgccgcgtgtttcagacatttttccagcacgcggcatccaccgtcgccagtaagggagtgagcatcgccctgccgctttccgccgccggactcagccgcgcaacattcattgatgagctgctcgaacagctggagcgcagcccacttccgccgcgcttattgcatctggttatcccggcacatgttctgatgcaagagtccgataaggccatacccgcgatacagatactgcgtcaggcgggctgtcgcattgttctcagccaggtcaaccgtgacctggcgcttttcgattgcttaagcgcccacatggctgactacctgttgcttgatagcgaactctgcgccagcattcacggtaatttaatggatgaaatgctggtatcgattattcagagccatgcgcagcggctgggcgtcagaaccattgccggcccggtacaaatgccgctgatcatggatgcgctttccggtattggcatcgatctgatttacggcgacgtcattgccgatgcccagccgctggatctgttactgaacaccagttatttcgccatcaactga

SEQ ID NO: 71974 - DNA, 870 bp, Citrobacter koseri
atgtatatcctaagctggcagccgccttatgactggtcctggatgttgggttttctcgccgcgcgtgcggtgagcggcgtcgaaacggttgagcccgcgcgttacgttcgcagtctggcgacgggagaacatcggggactgatcgccgttgtaccggagcaccagacgcatacgctgcgcgtaaccctgagcgcgggcttgttgcccgtcgccgaagaatgtctggcaaaaattgaacgcctgttcgatctgcgctgtaaccccgctcagattgccgacgcgctcggcagtctgggggctgcgcgaccgggattgcgcctgcccggctcggtggatgccttcgaacagggcgtaagggcgatactcgggcaactggtcagcgtggcgatggcggcaaagctgacggcgaaagtcgcccgtcgttatggcgatgtgcttgccgacgcgccggagtatgtctgtttccccacgccgcaaacgctggcggcggcggacccattcgcgcttaaagcactggggatgccgcttaaacgcgcagaagcgctgatccatctggcgcgtgcgacgctggatggaacgttagagacggtcgcgccgcaggatattgcgctgggggtgaaaaacctgcaaacctttcctgggattgggcgctggacggccaactacttcgcgctgcgcggctggcaggcgaaagatatctttttgccggatgattatctgattaaacagcggttttcgggaatgacgcccgcgcaaatccgccgttatgcggagcgctggaaaccctggcgctcctacgcgttgctgcatatctggtatacggatggctggcagccgtcagttgatggcgaaataactggtgttcagtaa

SEQ ID NO: 71975 - DNA, 1353 bp, Citrobacter koseri
gtgtttattggttttgactacggcacggcaaactgttccgttgccgtcatgcgcgacgggcaaccgcagctgctaaaaatggaaaataacagcacgctgttgccctcaatgctttgcgccccgacgcgtgaagccgtcagcgagtggctgtaccgccatcacgcggttccggcgacggatgacgaaacgcaggcgctgttgcggcgcgcaatgcgctacaaccgtgaagaagatattgaggtcggcgcaggcagcgtgcagttcgggctggcttcgctgagccactacattgacgacccggaagaggtttacttcgttaaatcgccaaaatccttcctcggcgccaacggcctaaaaccgcagcaggttgcgctgtttgaggatctggtttgcgcgatgatgttgcacatccgtcatatggcgcaaacgcagttgccggaaagcatcacgcaggcggtgatcggtcgaccgattaactttcaggggctgggtggcgacgaggctaaccgccaggcgcaaggcattctggaacgcgcggcaaaacgcgccggttttcaggatgtcgtcttccagtttgaaccggttgcggcgggtctggattatgaagccacgttgcaggaagagaagcgcgtactggtggtggatattggcggcgggacgaccgactgttcattgctgctgatggggccgcagtggcatcagcgcgctgaccgcgcctccagcctgctcgggcacagcggctgtcgcgtgggcggtaacgacctggacatcgcgctggcgtttaaacacctgatgccgttgctgggcatgggcggcgaaaccgaaaaaggcatcgcattgccggttctgccgtggtggaacgctgtcgcgatcaatgatgttcccgcacagagcgatttctacagcagcgccaacggtcgcctgctcaacgagctggttcgggacgcccgcgatgcggataaagtcgcgctgctgcttaaagtctggcgtcagcgcctcagctatcgtctggtacgcagcgcggaggagagcaaaatcgccctgtccgggcagcccgatatcctcaccacgctgccgtttatcaacgatgagctggcgacgtctgtcagtcagcaggggctggaagccgcgctgagccagccgctggcgcgtattctggagcaggtacagctggcgctggacaatgcgcaggaaaaaccggatgtcatctatctgaccggcggcagcgcgcgctcaccgctgatcaaaaacgcgctggcggagcagttgccgggcattccgattgctggcggcgatgacttcggttccgtcaccgccggtcttgcgcgctgggcggacgtcgtatttcgttaa

SEQ ID NO: 71976 - DNA, 1302 bp, Citrobacter koseri
atgactaaactagtatcattccgcgaaacgtttcaggatgagaaacttataacgatgaaaggcagtaaaaaatcccgctgggtgatagtaatcgtggtcgttgtggcggccattgccgtgtacgggttctggcatagtcgcagcgaaacccaggggaatgcgccgggcgctaacgaacatgcgcaacgtcaggctggcgcaggacgtcgcggcatgcgttccggcccgctggcgccggttcaggcggccaccgcaacggaacaagccgtaccacgctatctgaccgggctgggcacgatcgctgccgccaataccgtcacggtacgcagccgcgtggatggtcaactgatggcgctgcacttccaggaaggacaacaggtcaaagcgggcgatctgctggcggaaatcgatcccagccagtttaaagtcgccttagcgcaagcgcaggggcagctcgcgaaagacaaagccacgctggcgaatgcccgtcgcgatttagcgcgctatcaacagctggtgaaaaccaaccttgtctcccgccaggagctggacgcgcaacaggcgctggtcagcgaaacagaaggcaccattaaggccgatgaagccagcgtcgccagcgcgcagttgcagcttgactggagccgcatcaccgcaccggtagagggtcgcgtggggttaaaacaggtggatgtcggtaatcaaatctccagcggcgataccacaggcattgtcgttatcacccagacgcacccaatcgatctgatttttaccttgccggaaagcgatatcgccaccgtcgtacaggcgcaaaaaacgggcaaaacattgaccgttgaagcctgggatcgcactaactcacagaaattaagcgacggcgtactgctcagcctggacaaccaaatcgacgccacgaccggcaccatcaaaatcaaagcccgttttaacaaccaggatgacgcgctgttccctaaccagtttgttaacgcccgcatgctggtcgatacgcagcaaaacgcggtggtgataccgacagcggccgtacaaatgggtaacgaaggccactttgtctgggtgctaaatgatgagaacaaagtcagcaagcatctggttaaaccgggtattcaggacagtcagaacgtggtaatcagcgccgggctgtcggcaggcgatcgcgtcgtgacggacgggatcgatcgtctgacggacggggcgaaagtcgaagtggtggaagcgcaagcgcctgcggcgaaagaagataaagccacgaatcgggaatacggtaagaaaggagtgcgctcctga

SEQ ID NO: 71977 - DNA, 3123 bp, Citrobacter koseri
atgcaggtgttacctccgagcagcacaggcggcccgtcgcgcctgtttattatgcgccctgtcgcgaccacgctgctgatggtggcgattttactcgccgggattatcggttaccgcttcctgcccgtcgccgcgttgccggaggtggactaccccaccattcaggtggtaacgctctaccccggcgccagcccggatgtgatgacctccgccgtcaccgcgccgcttgaacgccagttcgggcaaatgtccggcctgaaacagatgtcgtcacaaagttccggcggtgcatcggttgtgacgttgcagttccagctgactctgccgctggatgtcgccgagcaggaagtacaggccgccattaacgcggccacaaacctgctgcctagcgatctgcctaacccgccggtatacagcaaagttaacccggcagatccaccgatcatgacgctggccgtcacctcaaccgctatgcccatgacgcaggtggaagatatggtggaaacccgggtggcgcagaaaatttcccaggtttccggcgtagggctggtcacgctgtccggcggccaacgcccggccgtgcgtgtgaagctgaatgcgctggcgattgccgcgctggggcttaccagcgagacggtccgcgccgccatcaccagcgccaacgtcaactcggcgaaagggagtcttgatggcccaactcgcgcggtcacgctctctgctaacgatcagatgcagtccgtcgatgagtatcgccagttaatcatcgcctggcagaacggcgcgccggtacgtctgggcgatgtggcaacggtcgaacaaggcgcggaaaacagctggctcggcgcgtgggccaataaagaacaggccattgtgatgaatgtgcagcgccagcccggtgccaacattatctccacggcggacagcattcgtcagatgctgccgcagcttacggaaagtctgccgaaatcggtcaatgtcaccgtgctgtcggatcgcaccaccaacattcgcgcttccgttaccgacacccagttcgaactgatgctggcgattgcgctggtggtgatgatcatctacctgttcctgcgtaatgtccccgccacaatcattccgggcgtcgccgtgccgttatcgctgatcggcacttttgcggtaatggtctttctcgatttctcgatcaataacctgacgctaatggcgctgaccatcgccaccggcttcgtcgtggacgacgcgattgtggtgattgagaacatttcgcgttacatcgagaaaggggaaaaaccgctggcggcggcgctcaaaggcgctggcgaaatcggctttaccattatttcattaaccttctcgctgattgcggtactgatcccgctgttatttatgggcgatatcgtcgggcgtttgttccgcgaatttgcggtcacgctggcggtagcgatcctgatctccgccgtcgtgtcgctgaccctgacgcccatgatgtgcgcccgtatgctcagccaggcgtcgctgcgtaagcaaaaccgcttctcccgcgcggcggaaaaaatgtttgatcgcgtcattgagaaatacggtcagtggctggcaaaagtgctcaaccatccgtggctgacgctgagcgtggcgctcggcaccctgtttctcagcatcatgctgtgggtctttatcccgaaagggttcttcccggtgcaggataacggcattattcagggcacattgcaggctccgcaatccagctcgttcgccagcatggcccagcgccagcgccaggtgtctgatgtgattttaaaagacccggcggtggaaagcctgaccgcctttgtcggcgttgatggcaccaacccggcgctgaacagcgcgcgtctgcaaattaaccttaagccgctgaatgaacgtgacgatcgggtgcagaaagtcatcgcccgtctgcaacacgccgtggcgaaagtgcccggcgtcgatctctacctccagccaacgcaggatctcaccattgatactcaggtgagccgcacgcagtaccagtttacgctacaggccacctcactggacgcgctcagcacctgggtgccgcagctgatggaaaaactccagcagcttccgcagctttctgacgtcagcagcgactggcaggacaaaggtctggtggcgtatgtgaacgttgaccgcgacagcgccagccgtcttggcatcagcatggcggatgtcgataacgccctgtataacgcctttggccagcgcctgatttcgaccatctacacccaggcgaatcaatatcgcgtcgtgctggaacataacaccgacaccacgccggggctggcggcaatggacaccatccgtctgaccagcagcgacggcgggattgtgccgcttagcgccatcgccaaaatcgagcagcgtttcgcgccgctttccattaatcacctggatcaattcccggtaacgaccttctcgtttaacgtgccggataattattcgctcggcgatgcggtacaggccattctggacacggagaaaacggtcaacctgccagtcgatatcaccacccagttccagggcagcacgctggccttccaggccgcgctcggcagcaccgtctggctgatcgtggcggcagtggtggcgatgtatatcgtgcttggcgtgctgtacgaaagctttatccacccaatcacgatcctctccaccctgccgacggcaggcgtcggggcgctgctggcgctcatgattgccggtagtgaactggacgtgattgccatcatcgggatcattttgttgatcggtattgtgaagaagaacgccatcatgatgatcgacttcgccctggccgccgagcgcgagcagggaatggcgccgcgtgatgcgattttccaggcttgtctgctgcgttttcgcccgattctgatgaccacgctggcggcactgttaggcgcgctgccattgatgttaagtaccggcacaggcgcggaattacgccgcccgttagggattggcatggtaggcggcctgctggtcagccaggtcttaaccctgttcaccacgcccgtcatctatctgctgtttgaccgcctgtcgctgtatgtgaaaagccgcttcccccgccaggaagaggaggcgtaa

SEQ ID NO: 71978 - DNA, 3087 bp, Citrobacter koseri
atgaaatttttcgcccttttcatttaccgcccggtggcgaccattttaatctccatcgccattacgctctgcggcgtgctgggtttccggttattgccggtcgccccgctgccgcaggtggattttccggtcattatggtgagcgcatcgcttccgggcgcttcaccggaaaccatggcgtcgtcggtcgccacgccgctggagcgttcgctcggacgcatcgcgggggtcagtgaaatgacctccagcagctcgctgggcagcacgcgaattattcttcagtttaactttgaccgcgatatcaacggcgcggcgcgtgacgtgcaggcggcaattaatgccgcacagagtctgctgcccagcgggatgcccagccgcccgacctaccgtaaagccaacccgtccgacgcgccgattatgattctgacgctcacatcggacacctggtcgcagggagagctgtatgacttcgcctcaacgcagctggcgcagacaatcgcgcaaattgacggcgtcggcgatgtggatgtcggcggcagttcgctgcccgccgtgcgcgtggggcttaacccgcaggcgttgtttaatcagggcgtatcgctggatgacgtgcgcagcgccatcagcaatgccaacgtgcgtaagccacagggcgcgatcgacgacaagactcatcgctggcagattcagacaaatgatgaactgaaaacggcgacggaataccagccgttgattatccactacaacaacggcgccgccgtgcgtctgggcgatgtcgccacggtaactgactcggtacaggatgtgcgtaacgccgggatgaccaacgccaaaccggcgattttgctgatgattcgcaagctgccggaagccaatatcatccagacagtagacagcattcgcgagaagctcccggaattacaaacgctgattcccgcctcaattgacctgcaaatcgctcaggatcgttccccgacgattcgcgcctcgctggaggaagtggagcaaacgctggttatttccgttgcgctggtcattctggtggtctttttattcctgcgctccgggcgcgcaacgttgattcctgccgttgcggttcccgtgtcgctgattggcaccttcgccgcaatgtacctgtgcggttttagcctgaacaacctgtcgctgatggcgctgactatcgccaccggttttgtcgtcgatgacgccattgtggtgctggaaaatatctcccgccatcttgaagccggcatgaagcccttgcaggcggcgcttcagggaacgcgcgaagttggctttacggtgctctccatgagcctctccctggtggcggtattcctgccgctcttgctgatggggggattgcccggaagattattacgcgagtttgccgtcaccctttcggtggcgatcggcatctcgctgctcgtctcgctcacgctaacccccatgatgtgcggctggatgctgaagtccagcaagcctcgcgagcagacgcgaagccgcggctttggccgtctgctgactggcctgcaacaggggtacggcacatcgctgaaatgggtgctaaaccatacgcggctggtgggcgtcgtcttgttgggcaccattgcgctgaatatctggctctatatttccatccccaaaaccttcttccccgaacaggatacaggcgtactgatgggcggcattcaggctgaccagagtatttcgtttcaggcgatgcgcggcaaacttcaggactttatgaagatcattcgcgacgatccggcggtcgacaacgtgaccggcttcaccggcggttcgcgggtcaacagcgggatgatgtttattacgctgaaatcacgcggcgagcgccatgaaacggcgcagcaggttatcgaccggctgcgggtcgcgctggcaaaagagccgggcgcaaacctgtttctgatggcggtgcaggatatccgcgtcggcgggcggcaggctaacgccagctaccagtatgccctgctgtctgatgatttaagcgcgctgcgggaatgggagccgaaaatccgtaaagcgctggcggcgctcccccaactggcggacgttaactccgaccagcaagataacggcgcggagatgaacctgatttacgaccgcgaaaccatgtcccggctggggatcgacgtgcaggccgccaacagtctgctgaataatgccttcggtcaacggcaaatttccaccatctatcagccgatgaaccagtataaggttgtgatggaggttgactcacgctatacccaggacatcagcgcgctggagaagatgttcgtcattaacagcgacgggaaggcgattccgctctcttattttgcaaaatggcagcccgccaatgcgccgctgtcagtgaatcaccaggggttgtccgccgcctcgactatcgcgtttaacctgcctacgggcacgtcgctgtccgaagcgacggaagccatcaaccgggcgatgacacagcttggcgtaccgtcaacggtgcgcggcagtttcgccggcacggcacaggttttccaggagacgatgaattcgcaggtgattctgatcctggcggcgatcgcgacggtctatattgtgttggggatattgtatgaaagttatgttcatccgctgaccatcctctctaccctcccctccgcaggcgtgggggcgctactggcgctggagctgttcaatgccccgttcagcctaatcgcgctcatcgggatcatgctattaattggcattgtgaagaaaaacgccatcatgatggtcgattttgcgcttgaggcgcagagaaacggcaacctgacgccggaacaggcgattttccaggcctgcctgctgcgttttcgcccaatcatgatgaccacgctggcggcgctgtttggcgcgctgccgctggttatctccgggggcgatggttcagagttacgtcaaccattagggattacgatcgtgggcggactggtgatgagccagctgctgacgctctataccaccccggtggtctatctctttttcgaccgtctgcggctgcgtttttcacgtaataatagccaaccggaacccataacagagccatga

SEQ ID NO: 71979 - DNA, 1416 bp, Citrobacter koseri
atgacagaacttcctgacagcacacgctggcaactctggattgtggcattcggcttttttatgcaatcgctggataccacaatcgtcaacaccgcgcttccctctatggcgctcagtctgggggaaagcccgctgcatatgcacatggtcgtggtttcctatgtactgaccgtggcggtaatgctgcctgccagcggctggctgacagataaagtcggcgtgcgtaatatcttctttaccgccattgtgctgtttacgttgggatcgctattttgcgcctggtccagcacgctgaatgaactggtgctggcgcgcgttttacagggcgtgggcggcgccatgatggtgccggtcggcagactgacggtcatgaagatcgttccgcgcgaacaatatatggcggcaatgaccttcgtcacgctgcccggtcaggtcgggccgctgctcggcccggcgctgggcggcattctggtcgagtacgcctcctggcactggattttcctgattaacattccggtcggcattgtcggggcgattgcgacgctcatgctgatgccgaactacactatgcaaacccggcgcttcgatctttcagggttcctcctgctggccgtcggcatggcggtactgacgctggcgctggacggcagcaaaggcacggggctctcgcctctctcactgggcgcactggtgttgtgcggcatcctggcgattgcgctctacctgaaacacgccaaaaacaatccgcgcgcgctgtttagtctggcgctgtttcgcacccacaccttctcgctgggcctgtctggtagcttcgccgggcgcgtcgggagcggcatgctgcccttcatgacgccggtctttttgcagattggtctggggttttcgccgtttcatgccgggttgatgatgatcccgatggtactcggcagcatgggaatgaaacgtatcgtcgtacaggtggtaaaccgctttggctatcgtcgcgtactggtcgccaccaccctcggcctgtcgctggtcagcctgctgtttatgagcgtcgcgatgcttggctggtattacgccctgccctttgtgctgtttctgcaaggcatggtcaactccacccgtttttcatccatgaacaccttaacgctcaaagatctgcccgatgaactcgccagcagcggcaacagcttgctgtccatgatcatgcagctatcgatgagtattggcgtgaccatcgccgggctgctgctgggcatgtttggtcaacaacatatcgcggccgacagcggcgcgagccacacggtgtttatgtatacctggctgtgcatggccctgattatcgcgctgcccgcactcatcttcgcccgggtgccgaacgacacgcataaaaacgccgtcatttcacgacgcaaaaggagcacgcaatga

SEQ ID NO: 71980 - DNA, 1404 bp, Citrobacter koseri
atgaagttctggcggcccggtattaccggcaaattgtttctggcgattttcgccacctgcattgtcttgctgatcagcatgcactgggccgtacgcatcagctttgagcgtgggtttatcgactacatcaaacatggcaacgaacagcggttgcagatgctcggcgacgcgctgggcgagcagtactcgctgcacggcaactggcgttttttacgcaataacgatcgcttcgttttccagatcctgcgctcttttgagcatgacaacgacgataacaaacccggccccgggatgccgccgcatggctggcgaacccaattttgggtcgtcgatcaacacgccaatgtgctggtcggcccgcgagcgccagtcccgcgtgacggcacccgccgggctattcacgtaaacggtgtggaggttggcgcggtgattgcctctcccgttgagcgactgacgcgcaataccgatattaattttgataagcaacagcgccgtaccagttggctgatcgtggcgttgtcgactctgctggcggcgctggcgacgtttccgctggcgcgcgggttgctggcgcccgttaagcggctggtggaaggcacgcacaaactggccgcaggcgacttcacgacgcgcgtaacgccgaccagcgcggatgaactgggtaaactggcgcaggattttaaccagctcgccagcacgctggaaaaaaatcagcaaatgcgccgcgattttatggcggatatctcccacgaactgcgcacgccgctggcggtattgcgcggtgagctggaggctatccaggacggagtccgccagtttacgcccgaatcggtggcctcgctccaggctgaagtcggcacgctcaccaagctggttgacgatctgcatcagctttctatgtccgatgaaggcgcgctggcgtaccagaaaacatcggtggacctgattcccctgctggaggtggcgggcggcgcgtttcgcgagcgcttcgccagccgtgggctgacgttacacttttcccttcctgacagcgtaatggtattcggcgatccggatcgtctgatgcagttattcaataatctgctggaaaatagtctacgctacaccgacagcggcggcagcctgcacatttccgccgagcagcgcgacaacatgctgctgttaacgttcgccgattccgcgcccggcgttcgcgatgagcagttacaaaaactgtttgaacgtttctaccgcacagaaggctcccgcaaccgcgccagcggcgggtccggtctgggactggcgatttgcgacaatatcgtacaagcgcataatggtcgtatccgggcgtcccattcgccttttggcgggcttagcattacagtagagttaccgctggaacgcgatttacagagagatgtatga

SEQ ID NO: 71981 - DNA, 723 bp, Citrobacter koseri
atgactgagttacccattgatgaaaacacgccgcgtattttaatcgtggaagatgaacccaagctgggacaactgctgatcgactatctgcgcgccgcaagctatgcccccacgctaatcagtcatggcgatcaggtattgcagtatgtgcatcaaacgccgccagacctgatcctgctggacttaatgctgccaggtacggacggcctgacgctgtgccgggaaattcgccgtttttctgacgtgcccattgtgatggtcacggcaaagattgaagagatcgaccgcctgcttgggctggagattggcgccgatgattacatctgcaaaccttacagcccccgtgaggtggtcgcccgcgtgaaaacgattttgcgccgctgcaagccgcagcgtgagctgcaacagctggacgcgcaaagcccgctgattgtcgatgaaggccgttttcaggcatcctggcgcggcaagatgctcgacctgacccccgcagagtttcgcctgttgaaaacgttgtctcacgagccggggaaagtcttctcccgcgagcaactgcttaatcatctctacgatgattatcgcgtggtgacggaccgcaccattgacagccacatcaaaaacctgcgccgcaagctggaatcactggatgccgaacagtcgttcatccgtgcggtatacggcgtcgggtatcgctgggaagcggatacctgccggattgcataa

SEQ ID NO: 71982 - DNA, 1362 bp, Citrobacter koseri
atgtttaaaccggaactcctttccccggcgggaacgctgaaaaatatgcgttacgctttcgcttatggcgcagatgccgtgtatgcgggccagccgcgttactccctgcgcgtgcgcaacaacgaatttaaccacgagaatttgcagctcggcattaacgaagcccacgcgcttggcaaaaaattctatgtggtcgtgaacattgcgccgcataacgcgaaactgaaaacctttattcgcgatcttaaaccggttgtggaaatggggccggatgcgctgatcatgtccgatcccgggcttatcatgctggtgcgtgaaaacttcccggagatgccgattcacctttcggtgcaggccaacgccgtaaactgggcaacggtgaagttctggaaccagatggggctgacccgcgttattctttcccgcgaactgtcgctggaagagattgaagagattcgtcaacaggtgccggaaatggagatcgaaatcttcgtacacggcgcgctgtgcatggcctactccggtcgttgcctgctctctggctacatcaacaagcgcgatccgaaccagggaacctgcaccaacgcctgccgttgggaatataacgtgcaggaagggaaagaagacgtcgtaggcaacatcgtccataaatacgaaccgattccggtacagaacgtcgaaccgacgctgggtatcggcgcaccgaccgacaaagtgtttatgatcgaagaagctcagcgcccgggcgaatacatgaccgcgttcgaagatgaacacggcacctacatcatgaactcgaaagatctgcgcgccattgctcacgttgaacgcctgaccaaaatgggcgtgcactcactgaaaatcgaaggccgtaccaaatccttctactactgtgcgcgtaccgctcaggtttatcgcaaagcgatagacgatgctgctgcgggcaagccgtttgatccacaactactggaaacgctggaaggcctggcgcatcgcggttacaccgaaggctttctgcgtcgccacacgcatgatgactaccagaattacgagtacggttactctgtttctgaacgtcagcagttcgtgggtgagttcaccggcgagcgtaaaggcgcccttgccgccgttgccgtgaagaacaaattctccatcggcgacagcctggagctgatgacgccgcaggggaacgtcaacttcactctggagcatatggaaaacgccaaaggtgaagcaatgccggtggcgcctggcgatggctacaccgtctggatgccggtgccgcaggatatggatctgaattatgcgttgttaatgcgtaatttttccggcgaatccacgcggaacccacatgctaagtag

SEQ ID NO: 71983 - DNA, 900 bp, Citrobacter koseri
atggctacgtttcccgccagcttactgattttaaatggcaaaggcgctgataatcagcccctgcgcgacgcgatagggctacttcgcgatgagggcgtggagattcacgtccgggtcacctgggaaaaaggcgatgcccagcgttatgttaatgaagccagacagcttggcgttgagacagttattgcgggcggcggcgacggcaccatcaatgaggtttccgccgcgctgattcagtgtcagggcggcaacgttcccgcgcttggcattttgcctctgggcacggccaatgacttcgccaccagcgctggcatcccggaagcgctggataaagccttaaaactggcgattgccggtaacgcggttgcgatcgatatcgcccaggtcaacgataaaacctgctttatcaatatggcgacagggggtttcgggacgcgcattaccaccgaaacgccggaaaaactcaaggccgcgctgggcggcgtctcttactttattcatgggctgatgcgcatggacaccctcaagcccgatcgctgtgagattcgcggcgagaattttcactggcagggcgatgcgctggtgattggcattggtaatggtcgtcaggccggtggcggacaacagctctgccctggcgcactcattaatgacgggctgctgcaactgcggatcttcaccggggaggagctgcttccggcgctgttttccacattgacgcagccggaagagaaccccaacattgtcgatggcgcatccgcctggtttgatattcaggctccgcatgaaatcacctttaacctcgatggcgagccgctcagtggtcaggaatttcatattgaaatacttcccaacgcgctgcgttgccgtttgccgccagactgcccgttactgcgctaa

SEQ ID NO: 71984 - DNA, 663 bp, Citrobacter koseri
atgaagagtaaagcggtaattttcgacatggatggcgtcatcattgactccgaagggctgtggcgtcaggcgcaaaaagacgcgctggcaggctggggagtgacggttaatgacgaggagtgtgaaacgttaaccaaagggaagcgactggatgagattgcccgcgtctggtgcgaatactgcccgttgcagacagaccccggggtgctggagtcggccattcgcaaacgcattaccggacttattgcaacggaaggcgaagcgatggacggcgtctacgcggtattgcatcattttcgccacagggggtatcggattgcgctggctacgtcatcatcccatcaggttattgaggctgttctctctaaacttaatctccgggggcattttgacgtcatttgcagcgctgacgatgaacgctacggcaaaccgcacccggcggtgtatctctccgcgctgaaaaagctgggcctgcccgccgcagagtgtctggtgattgaagacagcctgagtggttttcgcgccgcgcaggccgccggaattgataccatcgtggtgtctgacggctgccagcatccctgctttagcgaggccatcgggcgctacacgtcaatgccgcaactcctggagacgctggccccgccggttcgggccgcagggtaa

SEQ ID NO: 71985 - DNA, 1278 bp, Citrobacter koseri
atgtcgttaactaacaaacaatggctgggattacccttaagtctggtctgggggtatatcgccatcgccgtattcatgactggtgatggtttcgagctggcatttttgtcgcactacatcaaagcgctgggctttaccccggcggaagcctcctttgcctttacgctatatggcctggcggcggcgctgtcggcctgggtatccggtgtagtggcggagatcatcacgccgcaaaaaaccatgatgatcggctttgtgctgtggtgcgtattccacgtattgttcctcgtttttgggctgggtcagtccaactacgccttaattctgctgttttacggtattcgcggtctggcgtatccgctgttcctttacgcgtttatcgtcgccattgtgcataacgtccgtagcgacagcaccagcgccgcgctgggctggttctgggcggtctactctattgggattggcgttttcggcagttatatcccgagttttaccattccgcatattggcgaaatgggcaccctgtggctggcgctggcgttctgcctgaccggcggtgttatcgcgctggtttcgctgcgtaaaattgaaacgccgcgccatatgcaaaacctcaccacccgtgaaaagttcagcgaactggggcgtgcggtcacgctgctttacaccaaccgtagcattatgttgtccagcatcgtgcgtattatcaatacgttatcgctgttcggttttgcggtggtcatgccgatgatgtttgtggatgaactgggcttcaccacctctgaatggctacaggtatgggcggcgttcttcttcacaaccatcttctccaacgtcttttggggcgtactggcagagaaaatgggctggatgaaggttgtgcgctggtttggctgcatcgggatggcgctctccagcctcgcgttttattacattccgcagcactttggccataacttcgcgatggcgctggttccggcaatcgcgctggggatcttcgttgccgcgtttgtgccgatggccgccgtctttcctgcgcttgagccaaaacacaaaggagccgcgatttcggtctacaacctgtcggctgggctttccaacttcctcgccccggcgatcgccgtggtgttgttaccgcacttcagcaccattggcgtcgtgattgcgtatacgttgctctatattgtggcgtttattctgtgtccgttcattcgtgttgaacaacccggattcacgcgtcaggaggcatgtgaaggcgaaacggtcggtatttcttaa

SEQ ID NO: 71986 - DNA, 1464 bp, Citrobacter koseri
atgtatctgggtatcgatctcggcacatctgaagtgaaggcgctggtcattgatgaaaataatgacattgtcgccacccatagcgcgccgctgacgattcagcggccccatcaacactggtcagagcaatcaccggaagcctggtgggacgcgacggcgtatctgatgtccaccctgcgggagaaatgtggtcatcactggcaggcgattaaggcgatcggtctttccggtcagatgcatggcgcggtactgcttgatgccgccgggaatacgatccgcccggcgattttgtggaatgacacccgtagcgcccaggagtgtgcggagctggaagaaattgccccagagctgcatcaggttgccggtaatctggcgatgccggggtttaccgcgccgaaattgctgtgggtgcgtcgccatgaaccgcagaattttgcccgcatcgaaacggtgctgctgccgaaggattatctgcgtttcaaaatgacgggtaaaaaagtctccgacatgtccgattcggcagggacgctgtggcttgacgtcgagaagcgcgactggtcggatgcgctgctggagaaatgcggactgacgcgggccaatatgccggagctggtggaaggctgcgatatttctgccacgctcgatcccgtcgtcgcgcaatgctgggggttaaacccttcggtggtggtcgccgggggcggcggagacaacgcggtcagcgctattggcgttggcgcggtatcgcccggcgatgcgtttatttcactggggacgtccggcgtgctgtttgtggtgacggacgcgtaccgtcccgcgccgcaatccgcagtacatgctttttgccacgtcctgccgaatttgtggcaccagatgagcgtaatgctcagtgccgccagctgtctgcaatggttctgccgcctggtagggacaacggaaacggaactgctggaagaaatcgcgcagttaagcgatgcggaaaaagccagcgcgccgatgttcctgccgtacctttccggcgaacgtacgccgcataacgatcctgacgcccggggcatgttctgggggctgacacactccagccagcgcgcgctgatggggtatgcggttctggaaggcgtcagtttcggcatcgctgacgggctccgtgttttgcaggagagcggtacaaatatcgaacaatgttcgctggtgggcggcggcgcccgaagtccgttctgggcgcaactgctggcagatattctggatatgcccgtggtgacgcacaaaggcggagaaaccggcggcgcgctgggcgcggcgcgactggcgtgccttgcggcaggtaaaccgttggcgtccgtttgcgaaaaaccggaagtctacaaaacctggtatggcgatccggttcgccacacggcgctgatgcagcgttatcagcagtttaacgcactgtaccgaaacgacctgaactatcgaaatcaataa

SEQ ID NO: 71987 - DNA, 1368 bp, Citrobacter koseri
atgaacgatcaatacacatggcttcatattggcttaggttcttttcaccgcgcccatcaggcgtggtatctgcatcgtctgatcgcttccggcgatacgcgctggcacattgccgccggcaatattcgcaatgacgccgagcacgttgtgcaggcgctggcggcgcaaaacggtcgttatgtgctggaaacggtcagcccggagggcgaacgtgagtacgaagagatcacgtcgattcagaaactgctgccgtggcaggcggatttgcagccgctgattgccgaaggcgccagagcgcagaccaaagtgattgcctttaccgtgacggaagggggctactacctgaacaccagccacaagctggaagtgaataaccccgatctggcgagcgatctcaacggcggctgtaaaacgatttacggcgttattacccgcattctggaagcgcgtatggccaataacgcagggccgctgacgctgctcaactgcgacaacgtgcgccacaacggtgaacggttccacgatggtctggttgagtttttacagctgaccggcaaacaggcggtgattgactggcttagcgccaatgcgacctgcccgaatacgatggtggaccgcatcacgccgcgtccggcagccgatcttccggcgcgtatcaaagcgcagacgggcattgatgataaagcgccggtaatgggcgaaacctttatccagtgggtggttgaagatcgtttccgcgatgtgcgtcctgcgctggaaaatgtcggtgtggagctggtgacgtctgttatcccgtatgaagaggcgaaaatccgcatcctcaactcatcacatagctgcattgcgtgggcgggtacgttaatcggccagcagtatattcatgaaagcaccctgacggactttatctaccagattgccgaccgctacgtgacggaagacgtgatcccttgcctgggagataacggcatcgatctcccgacctatcgtgatgtggtgcttaagcgttttaccaacccgcatattcaggataccaaccagcgcgttgccgccgacggattctcgaaaatcccggcgatgattgcgccgacgctgcgcgagtgctatcagcgcggtgcgcggccgaacgctaccgctatgctgcccgcactgttttacgtcttcatggagcagtggcacaagggcacgctgccttatgaataccaggacggcattctggatgcgccagcggtacatgccatgtttgaatccgccgatccgatcgcggcgtatgccagtgataaagcgctgtttggcgacctgacggaacgtgatgatttcgccgcgctgctgcgcgagaaaatcgccgctgttcacacgctgattaactga

SEQ ID NO: 71988 - DNA, 942 bp, Citrobacter koseri
gtgagcaaagaagatgacatcaggctggatcagaaagtccgggccgcatggatgtactacattgcgggtttaaaccaaagtgagatagccagccagcttgggacatcaagaccggtggtacaacgccttatcgctgcggcgaaagaggaaggcattgtttcgattggtctgcaccatcccgtcgcgaactgcctcgattacgcgcagcttttgcaggaaaagtatcagttaattaactgcaatattgttcccgcctacagcagcgaaagcaccctcgacagcgtaacctttggctgttatcaactgatggcccgctacttacagggcgacaaaccgacggtagtcggcattggttccgggttgacgctgaaaaaaaccatcaaacgcattgatttcgacagtcgcaatacgcgctgcgtggcgttgatcagcgccatgaacgaacacggacaatgtaactattacgacgacgtcccactgttgctggcgcgtaaaattcagggcaaatattaccagtggcccgcgccacgctatgcgcaatcctgtgatgaatacgagatgtggtgcaccagccgtctgtttcgcaacgtctctgccgtcgccgaagcgtcggaggtcatttttgtcggcatcggcgcgctggggaaacagagccctatcttcaaagacggttttatcaatgaggcgcagctggacgaattgaccgcgcgcggcggcgtaggagaaatacttggccgctttattgacgcagacggcaacgtagtggatagcctcatcaaccgctacatcaccagctacgatatacgccagagccagtgtccgcgtattgcggcggcctgcggtgaagataagcgccctgctatcctcgccgcactgaaaggcggctggatcaacggtctggtcaccgatgaacataccgcgcgctggttgctgacgcgctaa

SEQ ID NO: 71989 - DNA, 1032 bp, Citrobacter koseri
gtgacgcgcgttgagaaaacgaagaaaacaaccatctacgacctggctgagttaaccggggtttccgccagcgcggtgagcgcaattttgaatggcaactggaagaagcgacgcattagcgcaaagctggcggagaaggtgaccaggattgctgaagagcagggatatgcggtgaaccgacaggccagcctgcttcgcagtaagaaatcgaatgtcatcgggatgattgtcccgaaatacgacaaccgctattttggctccattgctgaaaagtttgaagagatggcgcgtgccagggggctgctgcccatcattacctgtacgcggcgtcaaccggagctggaggttgaagcggcgagggcgatgctctcctggcaggtggactgggttatcgccaccggggcgacgcacccggataagatcgcgcagatgtgtcatcaggcgggtgtgcccacgctgaacctcgatctgcccggaacgctggcgccgtcgattatttcggataactatgcgggggctaaagcgctgacggaaagcattctcgccagcagccaaaagcggtatggcgttttggctccgctgacgtttgtgggggggcgaatcaccgacaataacaccgccgaacgtttgcgcggcttcctcgacgcgcataaagcgtgtggattgacggtgccggaaacgcagcaactggttacggggtattcttccgcaagggtggaagggttactgaaatcggtctatccgtcgcctgatattccgctgccggggctgtttgttaattcgacaatttcgctcgaaggggtggtgcgctggctggcgcagaacgggcagacgggaagccatcagccgccaatgggctgttttgactgggacccgtttgtctctctgctggggcatgatatcgatatggtgcgccaggatgtgccagccatgctggacaaagtgtttgagattgtggattccggcgacaccacaatacgtcgtattgagatcccgccagaattgatcgccagccagaacatggcgcgttag

SEQ ID NO: 71990 - DNA, 750 bp, Citrobacter koseri
atgaatcactctgtcccctccatgaatacttccctcaacggcaaggttgcagccattaccggcgcagcctccggtatcggccttgagtgtgcgaaaaccctgcttgccgcaggagcaaaagtggtcctgatcgaccgcgaaggcgagaagctgaagaaaatcgtcgcggaactgggcgataacgcgtttgcgctgcaaatcgacttgttcaataccgggcaggtcgacaacctgctggcaggcattatcgagctggccggtgggctggatattttccatgctaacgcaggcgcttacattggcgggccggccgccgagggcgatcctgacgtctgggatcgcgtactgaacctcaacatcaatgccgcatttcgctgcgtccgcgccgtattgccgcatatgattgcgcaaaaatccggcgatatcattttcaccagttctatcgctggcgttgtaccggtcatctgggaacctatttacacggcctccaaatttgccgttcaggcctttgtccatacgacccgccgtcaggtgtccgaacatggcgtacgcgtcggagcggtgctgccggggccggtagtgaccgcgctgctggacgactggccgcaggcgaaaatggaagaagcgctggcaaatggcagcctgatgcagccgatcgaagtcgcagaatcggtgctgtttatggtcactcgttcgaaaaacgtcactgttcgcgatctggttatcctccccaacagcgttgatctgtga

SEQ ID NO: 71991 - DNA, 1608 bp, Citrobacter koseri
atgaacagcttacagaaaaccgttatcggcgtggatgttggttcaggcagcgtccgcgcaggcatcttcgacctgagcggcacgttgctctctcatgtcacgcaaaaaatcacgaccactcaccggagcggcagccgcgtggagcagtccagccaggagatctggcaggccgtttgtcactgcatccgggaagcgctcaggcagtccggcgcggcgccggaaagcgtggcggggatcggtttcgacgccacctgctcgctggtggttctggataaaaacggcgcgccgctccccgtgagcgccgagggcgatgcggcgcaaaacatcatcgtctggatggaccatcgcgcgactgaacaggctgaacgcattaacgtcagccaacatccggtgctgaactatgtcggcgggaaaatctcaccggaaatggaaacgcctaagattttatggctgaaggaaaatcgccgcgaggtgtacgaaaacgcatggcaatttttcgaccttgcagacttcctgacctggcgcgccaccggcgaccttgcccgctccatctgtacagtcacctgcaaatggacctggcttgctcatgaaaaccgctgggacccggactatttccgcacgatcgggctggcagaactggctgatgacgagtttgcccgcatcggacagcgcatcgtgccgccgggtacgccctgtggtgacggtttaaccgcgcaggcggcgcaggagatgggcctgcctgcgggcacgccggtcgccgtgggtctgattgacgcccatgcgggcggcatcgggactgtcggcgttgaaggcggcgccctcaataatatggcatatgtgtttggcacctcatcctgcaccatgacttcaacgaacgatcccgttttcgttcccggcgtctgggggccgtattacagcgcgatggtgccagggctctggcttgttgagggagggcaaagcgctgcgggcgcggctatcgatcagctattggcgtttcatcccgccgccgaagacgcgcggaaactggcgcaggaggcaggattaccgctgccggtttatcttgccgatcgggtgtcagaaaaagcgccgcaggcatcggacgccgtcacgctggcggcgggtattcatgttgtaccggagtttttaggcaaccgcgcgccgtttgccgacccgcacgcacgcgccgttatttgcggattgggtatggaacgcgacctggacaatttactggcgttgtatgtggcgggactgtgcggtatcggttacggtttgcggcaaattattgatgcgcagaatgcctgcggcgtacggaataaaaatatcgtgattagcggcggcgcgggtcagcaccctctggtgcggcaactattagccgatacctgcggacttccggtattaaccacccagtgcagcgagcccgttttattaggttccgcaatccttggcgccgtcgccggaaatatttccccctcggttgccgaggccatgacgcagtttacgcatgtggatacctgttattacccacagacagcgtatcagccattgcatcatcgtcgttacgaggcctataagcagttgcaacacatggcgaaaatgctcagagagtga

SEQ ID NO: 71992 - DNA, 1053 bp, Citrobacter koseri
atgactgatattgcgcagttgcttggcaaagacgccgacagccttttacagcatcattgtatgaccattccttctgaccaactttatttacccggacatgactacgtagaccgcgtgatggttgataacaaccgtccgcctgccgtactgcgtaacatgcagacgctgtataataccggacgtctggccggaacgggctacctctccattctgcccgtcgatcagggcgttgaacattctgccggggcgtcgtttgccgcaaacccgctttattttgatccaaagaatatcgtcgaactggctattgaagcaggctgtaactgcgtggcctcgacgtatggggtactggcatcggtttcacgccgttatgcgcaccgcattccgttcctcgtcaaactgaaccacaacgagacgttgagctacccaacggagtacgatcaaacgctctatgccagcgttgagcaggcgttcaatctgggcgccgtggccgttggcgcgaccatttacttcggttctgagcagtcgcgtcgtcagattgaagagatttccgccgcttttgaacgtgcgcatgagctggggatggtgaccgtcctgtgggcatacttgcgtaactctgcatttaaaaaagacggcgtggattaccacgtttccgccgacctgaccgggcaggctaaccacctggcggcgacgattggcgcggatatcgtcaaacaaaaaatggcggaaaataacggtggctataaggcggtgaatttcggttacaccgacgatcgtgtttacagcaagctgaccagcgataaccctatcgatctggtgcgttaccagttagccaactgctatatggggcgcgcggggctgattaactccggcggcgcggcgggcggcgagaccgatctcagcgacgctgtgcgtactgcggttatcaacaaacgcgcgggcggcatgggcctgattctggggcgtaaagccttcaagaaaacaatggcggatggcgtgaaactgattaacgccgtgcaggacgtctacctggacaataaagtgacgattgcctga

SEQ ID NO: 71993 - DNA, 1278 bp, Citrobacter koseri
atgaaaactacagtgaaactgtcgttcatgatgttcgtggagtggtttatctggggcgcctggttcgtccccctctggctttggctgaacaaaagcggttttagcgccggagaaatcggctggtcttacgcatgtaccgcgattgccgccattctctcgccgattctcgtcggctcactgactgaccgctttttctccgcacaaaaagtgctggcggtgctgatgttcgcaggcgcagtcctgatgtatttcgccgcgcagcaaacaacattcgccgggttcttcccgctgctgctggcctattccttaacctatatgcccactattgcgctgacgaacagcatcgccttcgccaacgtaccggacgtcgagcgcgatttcccacgcattcgcgtgatgggcaccattggctggatcgcatccgggctggcgtgcggcttcttaccgcaaatgctgggctataacgatatttcgccaaccaatattccgctgttgatcaccgcaggcagttccgtcctgctgggcgcctttgcgttcttcctgccggatacgccgccaaaaagcaccggcaagctggacattaaagttatgctggggctggatgcgctgatcctgctgcgcgataaaaacttcctggtctttttcttctgctcgttcctgtttgcgatgccgctggcgttctactacatcttcgcgaatggctatctgacggaagtcggcatgaaaaacgccaccggctggatgacgctgggccagttctccgaaatcttctttatgctggcgttacccttcttcacgaagcgctttggcattaaaaaggtcttactgcttggtcttatcactgcggcaatccgctacggtttttttgtttacggcggcgcggaagaatatttcacctatgccctgctgtttcttggcattttgctgcacggcgtcagttacgacttctactatgttacggcctatatctatgtcgataaaaaagcgcctgtgcatatgcgtactgccgctcaggggttgatcaccctctgctgtcaggggtttggcagcctgctgggctaccgtctcggcggcgtgatgatggaaaaaatgtttgcctataaagagccggtaaacggcctcaccttcaactgggcgggcatgtggacattcggggcggtgatgatcgccgtgattgccgtgttgtttatgattttctttcgcgaatccgacaaagagatcactgcgattaaagtggacgatcgcgatattgcgctgacacaaggggaagttaaatga

SEQ ID NO: 71994 - DNA, 1005 bp, Citrobacter koseri
atgaaagctgaacgtattctcggtgccctttatgggcaggcgttaggggatgcgatgggaatgccgtcggagctatggcccagaacgcgcgtaaaagcgcattttggctggattgatcgctttctgcccggccctgcggaaaataacgcggcctgctattttaaccgcgctgaatttactgacgatacgtcgatggcgctgtgtctggcggatgcgctgctggagcgcgacgggcagatcgacccggacctgattggccgtaacattctggactgggcgctgcgctttgacgcctttaataagaacgttcttggcccgacgtcgaaaattgcgctgaacgccattcgtgacggcaagcccgttgctgaactggaaaacaacggcgtgaccaacggggcggccatgcgcgtttccccactggggtgcttgcttccgccacgcgatctggatgcgtttattgatgatgtggccctggcctccagcccgacacataattcagacctggctgttgctggtgcggtcgttgtggcatgggctatctcacgcgcgattgaaggtgattgctggtctgatattgtcgattcgctaccggctatcgcccactatgcgcagcaaaaacgcatcacgacctttagcgcctcgctctccgctcgcctggagatcgcattgaagatcgtccgtgacgcgaacggcattgaatccgccagcgagcagctttaccaagtggttggcgcgggcaccagcaccattgaatcggtgccctgcgccatcgcaatggtcgagctggccaacaccgaccctaaccgctgcgccattctgtgcgccaatctcggcggcgacaccgacaccattggggcgatggcaacggcgatttgtggcgcattgcacggcgtggaggccatcgagcctgcgctgaaagatgagctggacgcggtaaaccaactggacttcatgcgctatgccaccgcgctgacgcgctatcgccagcagcgggaggcggtatga

SEQ ID NO: 71995 - DNA, 966 bp, Citrobacter koseri
atgaacacaacgcgcctgcgggcgttgctgcccgatttagcccgccgccagccggtgacggtcgtgggcgcggcggtcattgatgtgattgccgatgcttacgcgctgccctggcgtggctgcgatattgagcttaaacagcaaggcgtcaacgtcggcggctgcgcgctcaatatcgccgtcgccttaaagcgtctggggattgaggccagtaatgccctgcccctcggtcagggcgtatggtcagacattattcgtcatcgcatggcgaaagaggggttacacagcctgatcgacaacgcagagggagacaacggctggtgtctggcgctggtagaaccggatggcgaacgcacgtttatgtcgttcagcggcgttgagaaccaatggaatgccgactggctggcgcagctgacaattccgcccgacagttggatctacttttccggttatcaactcgcctcgccatgcggcgaactgctggtgagctggctggaagggttagagcgcgtgacgccgtttatcgacttcgggccgcgaatcggcgacattcccgacccgctaatggcgcggattatggcctgccatccgctggtatcgctgaaccgtcaggaggcagacattgctgccgaacggtttggctttagtcatgaacctaacgcgtttggcgccgcctggcttgcggcgtttgcctcaccggttattgtccgccacgataaagacggagcatggtatttcagccagcaatcatccggctgcgtgcccgcatttgccacaacggtcgtcgataccattggcgcaggagacagccacgcgggaggcatgctggccgggctggcatccggctgggcgcttgcagacgcggtgctgctggggaacgcggtcgcctcctgggtggtaggccatcgcggcggcgattgcgcgccaacgcgcgaggcgctactcctcgcacacaaaaacgtatag

SEQ ID NO: 71996 - DNA, 747 bp, Citrobacter koseri
atggaacaagcgcatacccggcttatcgcgcaactgaatgaacgaattgccgcggtggataacacgccgctgtacaggaagtttgccgagacggtcaaaaatgccgttcgcagcgggattcttgagcatggcaacattttgcccggcgagcgcgatctcagccagttgaccggcgtttcgcgtattacggtgcgcaaggcaatgcaggcgctggaagaagaaggcgtcgtgacccgcgcccgtggctacggaacgcagattaataacatcttcgaatattctctgaaagaggcgcgcggcttttcgcagcaggtggtattgcgcggtaaaaagccggataccctgtgggtcaacaagcgggtagtgaaatgcccggatgaggtggcgcagcagctggcgatcgccgcaggcagcgatgtgttcttgctcaaacgtattcgttatgtggatgaggatgcggtgtccattgaggagtcctgggtgcctgcgcacctgattcatgatgcggacgccatcgggatctcgctgtatgactatttccgcagccagcatatctttccgcaacgtacacgttctcgcgtcagcgcgcgcatgccggatgcggaatttcagtcacatattcagatggacagcaaagtgccggtgctggtgatcaagcaggtggcgcttgaccagcaacagcggcccattgaatacagcatcagctactgtcgcagcgatctatacgtttttgtgtgcgaggagtag

SEQ ID NO: 71997 - DNA, 801 bp, Citrobacter koseri
atgaaacggattaacgcgttaaccattgcaggcactgacccaagcggcggcgccgggattcaggccgatttgaagaccttttcggcgctgggcgcgtatggttgctccgtcattacggcgctggtggcgcaaaatactcgcggcgtgcagtcggtgtaccgcattgagcccgattttgtcgcagcgcagctggattctgtcttcagcgatgtgcgtatcgacaccaccaaaatcggcatgctggcggaaacggatattgttgaagctgttgcagagcgtttgcagcgtcaccaggtgcaaaacgtggtgctggatacggtgatgctggcgaaaagcggcgatccgctgctttctccgtcggcggtggagacgttgcgcagccggttattgccgcaggtgtcgattatcacgccgaatctgccggaggccgcggcattgctggatgcgccgcacgcccgcacggaacaggaaatgctggaacaagggcgtgcgctactggcgctgggctgtggcgccgtgctgatgaaaggtggtcatctggatgatgcgcaaagcccggactggctctttacccgtgaaggggagcagcgttttaccgccccacgggtgatgaccaaaaatacccacggcaccgggtgtacgctgtcggcggcgttggcggcgctgcgcccgcgccatagcaactgggccgatacggtacaggaagcaaaaacctggctttcggcggcgttagcccaggcggatacgctggaggtaggtgaggggattggcccggtacatcatttccacgcgtggtggtaa

SEQ ID NO: 71998 - DNA, 789 bp, Citrobacter koseri
atgcagcctgacctgcacagccgcacgcttgcggcccataccttacaacaatttcgtatcctttctccgctgacccactgtatgacgaacgacgtcgtgcagaactttaccgccaatacattactggcatcaggcgcctcaccagcgatggtgattgagcccgaagaggcgcgccagtttgctgctatcgccagtgcgttactgattaacgtcggcacgctgacccggtcgcgcgcggaggccatgcgcgctgcgacagagcaggcccatatagcgaaaaccccctggacgcttgatcccgtggcggttggcgcgctcgattatcgccgccgtttctgtctggaactgctgtctcttaatcccagggcaatacgcggcaatgcctcggagatcctcgccctggctggattagcggcgggcgggcgtggagtggataccaccgatacggcggtatcggcgttaccggccgctcagacgctggcgcgtcagacgggagccgtcgttgcggtaacgggagaggtggattacgtcaccgacgggcagcgtaccgtcagcgttaccggcggcgatgtgctgatgacgcgcgtcgtcggaacgggatgcgccttatctgcggttgtggcggccagttgcgcgctgccgggaaatacgctggacaatgtggcgtcagcctgtagctggatgaaacaggccgggcagtctgctgccgaacgcagtcaggggccagggagctttattccggcttttcttgatgcgctgtatcaccttaatgcggaggagcaggtatga

SEQ ID NO: 71999 - DNA, 321 bp, Citrobacter koseri
atgggtatgaagaataaatttttaatgggcgcactgctgctggcaaccagcgcagtctgggccgcacccgccgcaacggggattgatcagtacgaattgagcagctttgttgccgactttacccatttcaaacctggcgataccgttcctgagctgtaccgcaccgacgagtacaatattaagcaatggaagcaacgcaatctgccagcgcccgacgcaggaacccactggacctatatgggcggcgcttatgtactgattaacgacaccgacggcaaaattattaaagcctacgacggcgagattttttatcatcggtaa

SEQ ID NO: 72000 - DNA, 960 bp, Citrobacter koseri
atgtggccgtatctattgctatgtgtattccttgtttctttttcttcctttagtgcgtgtcggttgagcaatggagataaaagtgaacggattgttcttaatgttgaattttcccctgaaaaaaacacggctcagagtagtgttttgttaaatttcacacaagattttaaatgtcgattatcttcagatagaatgaatttttatgataatattatgcacgaaacatatgccgttaatggcattcgatttaaagtaaagtctgatattggtacatcatttccagtttctaatcttaatcatgaacttatttctggcgcaaataacgatgtcgctgtaataaataaagttgtaccaatggtatttgattatgtactggaaggtcaaaatgtgccaacaactcaagggaatgatacgcttactgttaaggatgcttttgtaataacaacggctaaatgtgagtctattggttgctggttgtttggcgatgcgggttcttatattgtagatttgaatatatctattaaacacaggaaaacaacctgtgaatttttatctccgcattacttcataaaaatggaagatgtaacaacacaggagttgctggccgggaatgggaaaagaagtaagagtgaagatattaaactacgatgcgatggtatacatggaattgcaagcaaccctgttacggtaaaaatatctgatggtgattgggatgccaatggtcagatattgcttaacactatatctactggaagtaaaaatgtcgggtttaaattatttcgaggttctgagtcggtaacgttgcataaggggaatgttttgctctcagtcgcgaaatattctggtctggaaacagactatgtatttcccgtatcagcagaatatgcccttactggcggtggaaaaccaacgacaggtgaaatatcaagtaaagttatttttagagttgattatcagtaa

SEQ ID NO: 72001 - DNA, 2481 bp, Citrobacter koseri
atgttaaggatgaccccgcttgcttcggcgatattactgttgctgcccggaatgaatgcttatgcggcagaagaaacctttgacacccattttatgatggggggaatgaaaggcgagaaagtgtctgacttccgtctggatgatagccaaccgttacccgggcaatatgacatcgatatttatgtcaaccagcaatggcggggaaaatatgaggttatagttaaagataacccagatgatacctgcctgtctcgtgagatattcactcgcttaggcattaatacagaagcattgaataatgcgggggagtgcttattgttgaaacaggcggtgcaaggcgggagctacgcgtgggatatcggtacgtttcgtctgaacctcagcgtgccgcaggcatacgtggaagaactggagcagggatatgtgccgccagaaaactgggatcgcgggattaatgctttttatacgtcatattatgccagccagtattacagtgattataaagagtccggcaacagtaaaagcacctatgtccgttttaacagcgggctaaatttgctggggtggcaattgcattcggatgccagttacagcaaatctgacgataaccgtggagagtggaaaagcaatacgctctttcttgagcggggaatcccgcagattctgggtacgctgcgcgccggggatatgtatacctcatcagatatttttgattctgtgcgttttagcggcgtacgtctgtatcgggatatgcagatgttaccgaactcgaagcaaaactttacgccgctggtacaggggattgcacaaagtaatgcgttggtcaccattgagcagaacggttttgtggtctatcagaaagaggtgccgccagggccattttctatcgctgatttacagcttgcgggaggcggtgcggatcttgatgtgagcgtgaaagaggccgatggctcagtcactacctacctcgtaccgtatgccgctgtccctaacatgctgcaacccggcgtttcgaagtatgactttgccgccgggcgaagccacattgagggagcgagtcatcaaacggattttgcgcaaatcagctatcagtatggcctgaataatttgctgacgctttatggcggcacaatgctggcggatgattataatgcttttacgctcggtacaggatggaatacccgtattggcgcaatttccgtggatgcgacgaagtctcatagcaaacaggataatggcgatgtttttgacggtcagagctatcagattgcctataacaaatatttgacgcaaacggcgacccgctttggtctggcggcataccgctactcgtcacgcgagtaccgtacttttaacgatcatgtctgggccaataataaaaataactaccgtcgcgatgagaatgatgtctatgacattactgattactaccagaatgattttgggcgtaaaaacagtttttccgctaacgtcagccagaccttgccagaaggatggggatcgttttccttaagtacgctatggcgtgattattggggacgcagtggtaacagtaaagattatcaactgagctattccagccagtggcagcgcatcagctatacgttttctgccagccagacatatgatgaagatcatcatgaagacaagcgttttaatatctttatttcgattccatttgactggggagatgatattacctcgccgcgtcggtctttatatgtgtctaactcaaccacctttgatgatgatggctttgcctccaacaataccggattgtctggtacgacgggcgctcgcgatcagtttacttatggcgtgaaccttagccatcagcgacagaacagcgagaccaccgcggggacaaacctgacgtggaatgcgcctgtggcgacattaaacggcagttacagtcagtcgtctaaatatacgcaaagtagcggcagtatttcgggaggcgtggtggcctggtccggcggtgtgaacctggcgaatcgtctttcggagacgtttgcgataatgcaggcgccgggattagaaggcgcttatgcgaatggacagaaataccgcactactaaccgtaatggcgtggtgatctatgacagcctgacgccataccgtgaaaaccacctgatgctggatgtttcacaaagtaatagtgaaacggaattacgtggcaatcggaaaattaccgcgccataccgtggggcagtggtactgacaacgtttgacaccgaccaacgaaagccgtggtttattcgggcgcaacgtcccgacggctcgccgctaatctttggctacgaggttgaggatacgcacgggcataatattggcgtggtcggccagggaagtcagctctttattcgcaccaatgaaattccgccagaagttagtgtggcggtcgataaacaacagggactttcatgttcaatcaccttcgataaagagattgatgaaagtaaagtttatatttgtcggtga

SEQ ID NO: 72002 - DNA, 684 bp, Citrobacter koseri
atgaaaggattttacgcattaattatatcatcaatcattatgcctgctcatgcgggaattgtgatctacggtactcgcattatctacccggcagagaaaaaagaagtgctggtacagttaatgaaccaggggggacgttcttcactggtgcagtcgtggattgatgatggcgacacgtcgctaccgccggagaaaatccaggtgccgtttctgcttacgccaccggttgcaaaggtagccagtgattccggccagcagttaaagattaaagctatgccgaatatgttacccggcaataaagagagtctttttttcctgaatgtgctggatattccaccgaataatccagaaagcgccggaaagaatgtgcttaagtttgctatgcaaaaccgtattaagctgttttatcgaccaaaaggtattgctcccgttaataaaagtacttttcagaaactggcgattaaacggagcggtaaaacgtttacgatcagaaatgatgccgccaactggatcaccgtaagtgaggtgaaagccagtaatgtcaaaataaataatgaaagcatcatggtcgctcccttatccagtcaggacgtaccattaaaaaatgttaacgccagccaatatagtctgaccattattgatgattacggtaattatatcagcgatcgtgtaagcgtaaaatga

SEQ ID NO: 72003 - DNA, 546 bp, Citrobacter koseri
atgaaacgttcaattattgctgcctccgtattgtctgctatttttatgagtgccggggtttttgcggcggattctggtgaattaacaattcagggtgaagttacaggtacgtcatgccagtttgttgacgggcatacaagtgcaaccatcgagttagccagtattcctgataccttcttcgataacgtgaatattgggcaggatgtaacatatggtgaaggccgcgcagcagcgccgctggaaatcaaatgtggggatggcgctacgaatgttagggtctttatctccggcgatgaggtggataacaacggtgttattatccctggtgttaatgatgggtatgttacaggggtcggttttaaattatttcataataataactctattgcgaagtcaggtagtgttggtattccattaagtgagtttccaacatcggcggatggggcttataaacttgaccttgcagcacgttatgctaaaagaacaaactcgataacctcaggtgtggttaatgcaaaagtgattcttaaagttgttcaggaataa

SEQ ID NO: 72004 - DNA, 282 bp, Citrobacter koseri
atgaagaatcctttgctgatgggaattatagttctggcttatggaatgagttctcctgtttttgcctctgataccgcgacgctcacgattagcggaagcgtcacgacccccacctgtcacgctgacgttgtggatactcagttgcaacagcgttgcggtaataacacctatctgacaaacgcaggagaaacggcctcaatgccggtcagaggcgttgtaacggaagttatcaccctgccaggaagcaccgctcgccagatagtcctaaaccgctacgactaa

SEQ ID NO: 72005 - DNA, 1110 bp, Citrobacter koseri
atgaacgcacaatcccaggctaaatcaccagagaccctgcgcgcgatggtcgccgggacgctggcgaattttcagcacccaaccctgaagcataacctgacgacgttgaaagcgttgcaccatgtcgcctggctggatgacacgctgcacgttgagctgattatgccgtttgtctggcacagcgcgtttgaggtgttaaaagagcaatgcagcgccgatttattgcggattacgggcgcgaaagccattgactggaagctgtcgcataacatcgcgacgctgaagcgcgttaaaaatcagcctggcattaacggcgtgaagaacattatcgccgtcagttccggtaaaggcggcgtgggaaaatcgtctaccgctgttaacctggcgttagcgctggcggcggaaggggcgaaagtcggtattctggatgccgatatctacggcccgtctatcccgaccatgctgggggctgagaatcagcgcccaacttcgccggacggcacccatatggcgccgattatgtctcacggtctggcaaccaactccatcggttatctggtgacggatgacaatgcgatggtatggcgcggcccgatggccagcaaagcgctgatgcagatgttgcaggaaacgttgtggccggatctggattacctggtactggatatgccgccgggaaccggtgatattcaattgacgctggcgcagaacattccggtgacaggcgcggttgtcgttaccacgccgcaggacatcgcgcttattgacgccaaaaaaggcatagtgatgttcgagaaggtcgaagtaccggtgctcgggattgttgaaaacatgagtatgcatatctgtagcaactgcggtcaccatgagccaatttttggcaccggcggcgcacagaaactggccgagcagtaccgtacgcaactgctggggcagatgccgttgcatatcagcctgcgtgaagatctcgatcgcggaacgccgacggtaatcagccgtcccgacagtgagtttaccgcgatataccgcgagctggcagggcgcgttgcggcgcaactgtactggcagggtgaggttattcccggagaaatagctttccgcgcggtttaa

SEQ ID NO: 72006 - DNA, 2034 bp, Citrobacter koseri
atgactcaagtcgcgaagaaaattctggtaacgtgcgcgctgccgtacgccaacggctccatccacctcggccatatgctggagcacatccaggctgatgtctgggtccgttaccagcgaatgcgcggccaccaggtcaacttcatctgcgcggacgacgcacacggcacccctatcatgctgaaagcacagcagttgggtattacgccagagcagatgattggtgaaatgagtcaggagcatcagactgatttcgcaggctttaacatcagctatgacaactaccactcaacgcacagcgaagagaaccgcgagctgtccgagctgatttacacccgcctgaaagagaacggtttcattaagaaccgcaccatctctcagctctacgatccagaaaaaggcatgttcctgccggatcgttttgtaaaaggcacctgcccgaaatgtaagtctccagaccagtacggcgataactgcgaagtgtgcggcgcgacctatagcccgaccgagcttatcgagccgaaatccgtggtttccggcgctacgccggtgatgcgcgactctgagcacttcttctttgacctgccctctttcagcgaaatgttgcaggcgtggacccgcagcggcgcgttgcaggagcaggtggcgaacaaaatgcaggagtggtttgaatccggcctgcaacagtgggatatctcccgtgacgcgccatacttcggttttgaaatcccgaatgcgccgggcaaatttttctacgtctggctggatgcgccgatcggctacatgggttcattcaagaatctgtgcaacaagcgcggcgatctgaccagctttgacgactactggaagaaagattctgacgccgagctataccatttcatcggtaaagatatcgtctacttccacagcctgttctggccggccatgctggaaggcagcggtttccgcaaaccgaccaacctgttcgttcacggctatgtaacggtgaacggcgcgaagatgtctaaatcgcgcggcacctttattaaggccagcacctggctgaaccattttgacgccgacagcctgcgctattactacacggcgaagctctcttcccgcatcgatgacatcgacctgaatctggaagacttcgtgcagcgcgtcaacgcggatatcgtcaacaaagtcgtcaacctggcttcccgtaacgcgggctttatcaacaagcgtttcgatggcgtactggctgctgaactggccgatcccgcgctgtacaaaaccttcaccgacgcagcagcggtcatcggcgaagcgtgggaaagccgcgaattcggtaaagcgatccgtgaaattatggcactggcggacatggctaaccgctatgttgatgaacaggcgccgtgggttgtcgcgaagcaggaaggccgcgatgccgacttgcaggcgatctgctcgatgggcatcaacctgttccgcgtgctgatgacgtacctgaagccggttctgccaacgctgagcgaacgtgtggaagcgttcctgaacaccgagctgagctgggatgcaatcgcgcaaccgctgctgggccacaaggttaacgccttcaaagcgctgtataaccgcatcgacatgaaacaggtcgatgcgctggttgaagcctcgaaagaagaggtgaaagcggcggcggcgccagttaccggcccgctggcagacgacccgattcaggaaaccattacctttgacgatttcgctaaggtcgatctgcgcgtggcgctgattgaaaacgctgagttcgttgagggttctgacaaactgctgcgtctgacgctggatctgggcggcgaaaagcgcaacgtcttctccggcatccgttccgcgtaccctgacccgcaggcgctgattggtcgccatacggtgatggtcgccaacctggctccgcgtaaaatgcgcttcggcatctctgaagggatggtgatggccgccggtcctggcggaaaagatatcttcctgttaagcccggatgacggtgcgaagcctggccaacaggtgaaataa

SEQ ID NO: 72007 - DNA, 471 bp, Citrobacter koseri
atgctgagtaacgatattctgcgtagcgtgcgctacatcctgaaagcaaacaataacgatctggtgcgcattctggcgctgggtaatgccgaagccactgcggaacagattactgtctggttgcgtaaagaagaggaagagggctttcaacgttgcccggatatcatcctctctgctttcctgaatgggctgatttacgaaaagcgtggtaaagatgagtccgcgccagcgctggagccggagcgccgcgttaacaataatattgtgctgaaaaagctgcgtatcgcgttctcgctgaaaaccgacgatatccttgcgattctgacggagcaaaaattccgcgtctcgatgccggaaatcacggcgatgatgcgcgccccggagcataaaaacttccgtgagtgcggcgatcagttcttgcgctatttcctgcgcgggctggcggcgcgtcagcacgagaagaaagcgtaa

SEQ ID NO: 72008 - DNA, 720 bp, Citrobacter koseri
atgattaaagtgctgattgtggatgatgagccgttagcgcgggaaaatctgcggattctgttacaggaacaaagtgatattgagattgtgggtgagtgctcgaatgcggtagaggcgattggcgcggtgcataagctgcacccggacgtgctgtttctcgacatccagatgccgcgcatcagcgggctggaaatggtcgggatgctcgatccagaacatcgaccgtacattgtttttctgaccgcttttgacgaatacgccattaaagcgtttgaagagcacgcttttgactatctgcttaagcccattgaagagaagcggctggagaaaacgttggcgcgtctgcgacaggaacgaaacatgcaggacgtttcggtgctgccggaaaatcaacaagcgttgaaattcattccctgcaccgggcacagccgtatttatctgttgcaaatggatgacgtggcgtttgtcagcagccggatgagcggcgtgtacgtaaccagcagcgaggggaaggaagggtttaccgaattgacgctgcgaacgctggagagccgcacaccgttattgcgctgccatcgtcagtatctggtgaatatggcgcagttgcaggaaattcgtctggaggataatggtcaggccgagctgattttgcgcaacggtttaacggttcctgtcagccgtcgctacctgaaaagtttaaaagaggcgattgggctgtaa

SEQ ID NO: 72009 - DNA, 1686 bp, Citrobacter koseri
atgtacgagtttaatctggtgttgctgctgcttcagcagatgtgcgtgtttctggtcattgcgtggttaatgagtaaaacacgtttattcatcccgttaatgcaggttaccgttcgcctgccgcataaatttctctgttatatcgtcttctctattttctgcattatgggcacctggtttgggttgcacatcgaagattccattgccaatacccgtgcgattggcgccgtgatgggcggcttgctgggcgggcctgtggtcggcggcctggttggactcaccggcggtttacaccgttattcgatgggcgggatgacggcgctgagctgcatgatctccaccattgttgaagggttgttaggcggcctggtgcatagcgtgctgatccgtcgcgggcgcaccgataaagtcttcagcccgttaacggccggggcgattaccttcgtcgctgaactggtgcaaatgctgatcattttgttgatcgcccgaccttttgaagatgcgttgcatctggtaagcagtattgccgcgcccatgatggtgactaacaccgtcggggcggcgctgtttatgcgcattttgctcgacaaacgcgcgatgtttgaaaaatacacttcggcgttttccgccaccgcgctgaaagtggcggcctccacggagggtatcctccgtcagggctttaacgaagtgaacagcatgaaggtggcccaggtgttgtatcaggaactggacatcggcgcagtagcgatcaccgatcgcgacaaactgctggcatttaccggcattggcgacgatcatcacctgccggggaaacctatttcatcaagctacacgctgaaagcgattgagaccggtgaggtggtgtatgccgatggtaacgaagtgccttaccgctgctcgttgcatccgcagtgcaaattaggctcaacgctggtgattccgctgcgcggcgaaaaccaacgcgtgatgggcaccatcaaactgtatgaagccaaaaaccggctctttagctccatcaaccgaacgctgggcgaggggattgcgcaactgctgtcggcgcagattctggccgggcagtatgaacgccagaaagcgctgctcacacagtcggaaattaaacttttgcatgcgcaggtgaatcctcatttcctgtttaacgcgcttaacaccattaaagcggtggtgcgccgcgacagcgaacaggccagccaactggtgcagtatctctcgaccttctttcgcaagaacttaaagcgcccctcggagattgtgacccttgccgatgaaattgagcatgtgaatgcctatttgcaaattgagaaggcgcgcttccaggcgcggttgcaggtgaatttaaacgtgccggaggaactttcgcaccagcaactgcccgcgttcactctgcaaccgattgtggaaaacgccattaagcacggcacgtcgcaactgctcggcaccggcgaagtctccattacggccagacaggacgggcagcatctgatgctggacattgaggataacgccgggttgtaccagcccacgaccaatgccagcggcctggggatgaacctggtggataaacggctgcgcgaacgctttggcgatgattacggcatcaacgtggcctgcgaacccgatctctttacccggataaccttacgacttcccctggaggaaaacgcatga

SEQ ID NO: 72010 - DNA, 732 bp, Citrobacter koseri
atggcgctttacacaataggtgaagtggctttgctttgtgatatcaaccctgtcacgttacgcgcgtggcagaggcgttacggattattaaagccccagcgaacagacggggggcaccgcctgtttaatgacgccgatatcgacaggattcgggagattaaacgctggattgataacggcgtgcaggtcagtaaggtcaaagtgctgctcagcaacgataacatcgatgtgcaaaacggctggcgcgaacagcaggagacgctgctgcactatttgcaaagcaacaatctgcatagcctcaggctatggattaaagaacgtgggcaggattaccccgcccagacgctcaccacacacctgtttactcctctgcgacgacgcttacagtgccagcaacccactctccaggcgctgctcggcatccttgacggcatcttgatcaattacattgcgatttgtcttgcctccgcgcgcaaaaaacaggggaaagacgcgctggtggtcggctggaatattcacgataccacccggctgtggctggagggctgggtcgccagccagcaaggatggcgcgtcgatgtgctggctcactcgctgaaccagcttcgcccggagctgtttgacggcaggacgctgcttatctggtgcggcgagacgcaaacgcccgcgcagcagcagcaactcaatgcctggcgcgcgcaggggcacgatatttacccgctgggcctgtag

SEQ ID NO: 72011 - DNA, 732 bp, Citrobacter koseri
gtgaaacgactgtctgatccgctgctctggcttattgtcgcttttctggcgctgcttgcggggctgccgtacagccaggcggtgtttggcgcgctgtttccgcaactgccacgaccggtttaccagcaagaaagctttatggcactggcgctggcccatttctggctggtgggcgtatcaagcctgattgctgtggcggttggcgtcggggcggggattgcggtcactcgctcatggggggcagagtttcgcccgctggtggaaaccatcgccgccgtcgggcagacctttccgccggtcgcggtgctggcgatagccgttccggtgatggggtttggtcaggagccagccattatcgcgctgatcctctacggggttttgccgatattgcaggccacgctcgccgggctgggggcgattcccgccagcgtcatgagcgtggcgcgcgggatggggatgagccggggacagcagctgtggaaagtcgaactgccgctggccgcgccggtgattctggcggggattcgcacctcggtgatcatcaatattgggactgcgacgatcgcctcgacggtgggcgccagcacgctcggcacgccgattatcatcgggctgagcggctttaacaccgcctatgtgattcagggggctttactggtcgcgctggcggcgatcattgtcgatcgcctgttcgagcgtctggtgctgcgccttaaccggcacgtaaaataa

SEQ ID NO: 72012 - DNA, 951 bp, Citrobacter koseri
atgatgattgaatttagccatgtcagcaaaaccttcggtgcgcagaaggccgtcaacgacctcaatctgcattttcgcgaaggcagcttttcagtgctgattggcacatcggggtcgggaaaatccaccacgctgaagatgattaaccgcctggtggagcatgacagcggggtgatccgttttgccggggaagagatccgcagcttgccggtgctggaactgcgtcgtcgcatggggtatgccatccagtcgatcggccttttcccgcactggacggtggcgcaaaacattgccaccgtaccgcaactgcaaaagtggtcgcgctcgcgtattgatgaccgcacagaagaactgatgacgctgctggggctggacgtgaatttgcgtcaccgttatccgcaccagctctctggcgggcaacagcagcgcgttggggtggcccgcgcgctggctgccgatccgcaggtattgctgatggatgagccgtttggcgcgctggacccggtaacgcgcggggcgcttcagcaggagatgacccgtattcatcggctgcttggccgcaccatcgtgctggtgacgcacgatatcgacgaggcgctgcgtctggcggagcatctggtgctgatggatggcggcggagtggtacagcagggcacgccgctggaaatgctgaccgcgccggcgaatgattttgtgcaggcgttttttgggcgcagcgaactgggcgtgcggctgctgtcgctgcgcagcgtgggggattatgtgcgtcgtcatgagcaagtgggcggtgacgcgctggcggaagagatgacgctgcgcgatgcgctgtctgtctttgtggcgcgagggtgcgacgtattgccggtggtggatcagcagggcgctccctgcgggacgctccattttcgcgatctgctttcggaggcgctgcccggtgaaacgactgtctga

SEQ ID NO: 72013 - DNA, 1158 bp, Citrobacter koseri
gtgtcaaaagtcagtcttaaccgtgtgttgctgctgttggtgatcctgacgggggttgccgccgcgctgcctttcgttaactacgcccccaatcgcctggtgtcaggggtggggcgtcagatctgggatatctggccgggttcggtttctctgctggcgggcgccgggtgcgcattgctggtgttgtgctttgtccctgggaaaaagggcagcgtgctgacgcttgtgctggcgcaggcgctggtgatcgccatgctctggagcgtggggaaagcggcaacgcatctggcgcaggccggcagcccgctggcgcgcaccagcctggggagcggcctgtggctgggtcttgggctcaccctgctggcctgtagcgatgccattcgccgtatcaccacccaaccgctctggcgctggcttctgcatgcgcaaattgcgctcttaccgctggcgctgctgctcaccggcgcattcaacgatctctctttactcaaagagtacgcgaaccggcaggatatttttgataatgcgctggttcagcacctgacgctgctggcgggaaccgtgttgcccgcgttgctgattggcgtaccgctgggcatctggtgctcgtttgcaacggcgcggcaggggccggtctttgccgttctgaatgttatccagaccatcccttccgttgcgctgtttggcctgctgattgccccgcttgccgggctggtgaaggcgtggccctggctgggaacgcttggcgtggcgggaaccgggttaacacccgccctgattgcgctggtgctctatgcgttactgccgctggtgcgcggcgtggttgccgggcttaaccaggtgccgcgagacgtgctggaaagcgcgcgggcgatggggatgagcgcttctcaacgctttatccatgtacaactgccgctggcgttgccggtttttttacgcagcctgcgcgtggtcatggtgcaaacggtggggatggcggtcatcgccgccctgattggggcgggagggtttggcgccctggtctttcagggactgctcagcagcgccgttgatctggttctgctgggggtgatcccggtcattgcgctggccgtgctgatcgacgcgctgtttgatttatggatcgcactcctgaaggtaacgaatgatgattga

SEQ ID NO: 72014 - DNA, 918 bp, Citrobacter koseri
atgacaatttcaaaaacaggggcgggggcgctgctgctgttagcggcggttagcctgccgttgcaggccgcatcacccgtaacggtcggatcaaaaatcgatacggaaggcgccttgcttggcaacctgattttacaggtgctggaaagccacggcgttaaaacggtgaataaagtgcaactgggtacaaccccggtagtacgcggcgcgattacctccggcgagctggatatttacccggaatataccggaaacggcgcattcttctttaaagacgaaaacgatccggcatggaaaaacacacaggcggggtttgaaaaagtcaaaaaactggatgctgagcagaacaagctggtctggttaacgccagcgcctgcaaacaatacctggacgattgcggtacgccaggatgttgcggaaaagaataaactggtttcgcttgcggatctcggacgctatctgaaagagggcggaacgttcaaactggccgcctccgccgagttcatcgaacgcgccgatgcgctgcctgcctttgaaaaagcctacgattttaaactgaatcagaaccagttgctgtcgctggctggcggcgatacggcggtgaccattaaagcggccgcccagcaaacgtccggcgtaaacgcggcaatggcctatggtaccgacggcccggttgcggcgctggggctgcaaacactgagcgatccgcaaggcgtccagcctatctatgcgcctgctccggtggttcgtgagtcggtgctaaaagaatatccgcagatggcggaatggttgcagccggtctttgccagcctggatgaaaaaacgctgcaacagttgaatgccagtatcgccgttgaagggctggatgcgaaaaaagtcgcggcagattacctgaagcaaaaaggctgggtgaagtaa

SEQ ID NO: 72015 - DNA, 2298 bp, Citrobacter koseri
atgaaatggctatgttctgtaggtgttgcggtaagccttgcgttgcagccagcgctggcggaagcgttgtctggcaaccatccgctgacgcctgaagctcgggatgcgtttgtcactgaattgctcacgaaaatgaccgtcgatgaaaaaatcggtcagctgcgtttgataagcgttgggcccgacaacccgaaagaagccatccgggagatgatcaaaaacgggcaggtcggggcgatttttaacaccgtcacccgccaggatatccgaaaaatgcaggatcaggtgatggaactgagccgcctgaaaatccctctctttttcgcctatgacgtgctgcacgggcagcgtaccgttttccctatcagccttggcctggcctcctcgtttaatctggaggcggtaaaaaccgtgggccgcgtctcggcgtatgaggcggctgacgatggcctgaacatgacctgggcgccaatggtggatgtgtcccgcgatccgcgctggggacgcgcgtcggaaggctttggtgaagatacgtatctgacggcgatcatgggcaaaacgatggtcgaggcgatgcagggcaaaagcccggcggatcgctattcggtgatgaccagcgtgaaacatttcgccgcctatggcgcggttgagggcgggaaggaatacaacactgtcgatatgagcccgcagcgcctgtttaacgactatatgccgccgtataaagccgggctggacgcgggcagcggcgcggtgatggtggcgctcaactcactgaacggcacgcctgcgacgtcagattcatggctgttgaaagaggtgctgcgcgacgagtggggctttaaaggcatcaccgtttccgatcacggcgcgatcaaagagctgattaaacacggcacggcatccgacccggaagacgcggtgcgcgtggcgctcaagtccggcatcaacatgagtatgagcgatgagtattacagcaaatacctgccggggctggtcaaatcaggcaaagtaacgatggcggaactggacgatgccgcgcgccatgtgctgaacgtgaaatatgacatggggttgtttaacgatccgtacagccacctgggcgcaaaagagtccgatccgcaggacacgaacgctgagagccgcctgcatcgcaaagacgcgcgcgacgttgcgcgcgaaagtctggtgctgctgaagaaccgtctggaaacgctgccgttgaataaatccggcaccattgcggtggtggggccgctggccgacagtcagcgtgatgtgatgggaagctggtctgccgctggcgtcgccagccagtccgttacggtgctgacggggattaaaaacgcgctgggcgacaaaggcaaagtgatatacgccaaaggggcgaatgtcactaatgacaaaggcattgttgatttcctcaatcagtatgaggaggcggtgaaagtagaccctcgttcgccagaagcgatgattgacgaggccgttaatgccgcgaaacagtccgatgtggttgtggccgttgtcggggaagcgcagggtatggcgcatgaggcttccagccgcaccgacattcagatcccgcaaagccagcgcgatctgatcgcggcgttgaaggcgacgggtaaaccgttggtgctggtgctgatgaacggtcgtccgctggcgctggtgaaagaagatcagcaggctgacgccattctggaaacctggtttgccggaacggaaggcggtaacgccattgctgacgttctgttcggcgactataacccgtcgggtaaactgccgatgtccttcccgcgctctgtcgggcagatcccggtttactacagccatctcaacaccggtcgtccgtataacgccgacaagccgaacaagtacacctcccgctactttgacgaggcgaatggcccactgtatccgtttggttatggtctgagctacaccacgtttaccgtttccgatgtgacgctctctgcgcccaccatgaagcgcgatggcgcggtaacggccagcgtgcgggtgacgaataccggcaagcgcgagggggcgacggtaatccagatgtatttgcaggatgtcacggcatcgatgagtcgtccggtaaaacagctgaaaggctttgagaaggtaacgctgaagccgggagaaacgcagaccgttagcttcccgattgatattgaggcgctgaaattctggaaccagcgtatgaagtatgacgcggagcccggcaagtttaacgtctttattggcgtcgattccgcccgtgtgaagcagggcgagtttgaactgctgtag

SEQ ID NO: 72016 - DNA, 1731 bp, Citrobacter koseri
atgtcttccattacaacgacagataataaagcctttcttaatgagctcacccgtctggtgggtcattcgcacctgctcaccgatcctgcaaaaaccgcccgctaccgcaaggggttccgttccggtcagggcgaagcgctggccgtggtcttccccggctcgctgctggaattgtggcgcgtactgaacgcctgcgtaaacgccgataaaatcattctgatgcaggccgccaataccggcctgactgaaggttccacgccgaacggcaatgattacgatcgcgaaattgtcatcatcagcacgctacgcctcgacaagctgcacgtcctcagtaaaggcgaacaggtgctggcatacccaggcaccacgctgtactcactggaaaaagcgcttaaaccttttggtcgcgaaccgcactcggttattggttcctcctgtatcggcgcgtcagttattggcggcatctgcaataactccggcgggtcgctggtacaacgcggcccggcgtataccgaaatgtcgctgttcgcgcgtattgatgaacagggcaaattacagctggtgaaccatctgggcatcgaactgggccagaccccggaacagatcctcagcacactcgatgatgaacgcatcaaagatgaagatgtgcgccacgatggccgccacgcccacgattacgattacgtgactcgcgtcagggacattgaggccgatacccctgcccgctataacgctgacccggatcgcctgttcgaatcctccggctgcgcgggtaagctggcggtgttcgccgtgcggctggacactttcgaggcggaaaaaaaccagcaggtcttttacatcggcaccaatcagcccgatgtgctgaccgagattcgtcgtcatatcctggcgaagttcgacaacctgccggttgccggtgaatatatgcaccgcgatatttacgacatcgcggagaaatatggcaaagatacgttcctgatgatcgacaagctcggcaccgacaaaatgccgttcttctttacgctcaaaggccgtaccgacgcgatgctggaaaaggtaaaaatcttccgcccgcatttcaccgaccgcgcgatgcagaagttcggccatttattccctaaccatctgccgccgcgcatgaaaagctggcgcgacaaatatgagcatcatctgctgttaaaaatggcgggagacggagtggcggaagcgcaaagctggctgaccgagtttttcaaaaccgccgagggcgatttctttgcctgtaccccggaggaaggcagcaaagcgttcctgcaccgttttgccgcggcaggcgcggcgatccgttatcaggcggtgcatgccgatgaggtggaggatattctcgcactggatatcgccttacggcgtaacgacaccgaatggtatgagcatctgccgccggaaattgacagccaactggtgcataaactctattacggtcatttcatgtgctatgtcttccatcaggattacatcgtgaagaaaggcgtcgatgcccatgcgctgaaagagcaaatgctggaactgctgcgccagcgcggcgcgcaatatccggcagagcataacgttggtcatttgtacaaagcgccggagacgctggcgcgtttttatcgtgaaaatgaccccaccaacagcatgaatccgggtattggtaaaacaagtaagctgaaattctggaaagaagcggcgtccgacgagacgcattga

SEQ ID NO: 72017 - DNA, 807 bp, Citrobacter koseri
atgattgttgatctgaacaccaacaaagtgatctattcgaaccacccggatcttgtgcgtccgattgcgtcgatcaccaaattaatgacggcgatggtggtgcttgatgcgcgactgccgctggatgaaaaactgaaagtcgatatcagccagacgccggaaatgaaaggcgtttactcacgcgtgcgtctgaacagtgaaatcagccgtaaaaatatgttgctgctggcgctgatgtcttcggaaaaccgggcggcggcaagcctggcgcatcattatccgggtggctataacgcttttattaaagcgatgaatgctaaagccaaagcgttgggcatgacccacacccgttttgtggagccgacgggactgtcgattcataacgtatcgaccgcccgtgacctgacgaaactgctgattgccagcaagcagtacccgctgattggtcagttaagcaccacgcgtgaggatatggcgacctttgcaaacccggcatacaccttgccgtttcgcaatacgaatcacctggtgtaccgcgataactggaatattcagttgaccaagaccgggtttaccaacgctgcgggtcattgcctggtgatgcgcacgatgatcaacaacaaaccggtggcgttagtggtgatggatgcctttggcaaatatacccattttgccgatgccagccgtttacgcacctggattgaaaccggcaaagcgatgcccgttccggccgccgcgttgagttataaaaagcagaaagctgcgcagatggccgcagcaggcgagcagaccgcgcaaaacgattga

SEQ ID NO: 72018 - DNA, 132 bp, Citrobacter koseri
atggacaacagcagcgcgcctgcggcccgaaacagggaagagacgggtgtaaaagccagcatgcagcatttcgtgacgattctcttatggcgacaacgctgtcgggtcgctatgatgccggagctagcttga

SEQ ID NO: 72019 - DNA, 588 bp, Citrobacter koseri
atgaaccatgtctgggggctattttcccatcccgatcgtgaaatgcgcgtgatcaaaagcgaaaacgaaacggtgtcgcatcactatacccaccatgtgctgctgatggcggcgatcccggtgatttgcgcctttattggcaccacgcaaattggctggaattttggtgatggcaatgtgctgcgcttgtctctgtttacggggctggcgttcgcggttctgttttacggcatgatgctggccggggttgccgtgatgggtcgggtcatctggtggatggcgcgcaactacccgcaacggccttccctggggcactgtatggtctttgccgggtatgtcgcaacgccgctgtttttaagtggtctggtggcgctttatccgctggtgtggctctgtgcgttagtcggtactgtcgcactgttttataccggctatctgctgtatctcggcatcccgacattcctgaacatcagtaaagaggaaggtctgagcttttccagttcgacgctggctatcggcgtgctggtactggaagtgctgctggcgatgacggtgatcctgtggggatatggataccggttattctga

SEQ ID NO: 72020 - DNA, 570 bp, Citrobacter koseri
atggatatcaacagtcttatcacgcattacggttacgccgcgctgattattggcagtatggcggaaggcgagaccatcaccctgttaggcggcgtggcagcccatcagggattgcttaaattccctctggtggtgctctctgtcgcactcggcggcatgattggcgatcaggtgctctatttgttgggtcgtcgctatggcggcaaaattttgcggcgcttttcccggcaccgcgccaaaattcatctggcgcagaaaatgatccagcgtcgcccgtacctgtttgtgatcggttcccgatttatgtacggctttcgcattattgggccgctattgattggcgccagccacctgccgcctaaaatctttctgccgctgaatattctgggggcgatgatctgggctttgctgtttaccaccctgggctatattggcggcgaggtgatcgcgccgtggctgcacagtttcgaccagcatataaagcatgtgatttggctggcgctggtggttgggctggtttttggcgctcgctggtggttaaaacggcgcaataagcctgatgcgccttag

SEQ ID NO: 72021 - DNA, 1437 bp, Citrobacter koseri
atgaaccgcgattctctcctggccacaacggtgtgcctgtctctttttacgctgctggcgggttgcgcgccgatgcacgatacccgccagtcgctgacgcgacaaacgcctgctgcacaggttgattcaccattaccgacggcaataaaaaacggttggccggacagccagtggtggaaggcgtaccacgatccccagcttgatgccttaattgacaacgcattacagcattctcctgatatgcaggtagctgaacagcgtatacaactcgccgaggcgcaggcgaaggcggttgaagcgcaggatggcccccggctggatttatctgcggatgttgagcgccagaaaatgtctgcggaagggttgatggggccgtttgccatcaccgatccggcggcgggaaccaccgggccgtggtacaccaacgggacgttcggcttaaccgccggttgggatctggatctctggggcaagaatcgggctgaagtcagcgcgagaatcggcgtagtgaaagcgcgtgaagcggaagaggcgcaaacccggcaactgctggcaagcggcgtcgcgcgtttatactgggaatggcagacgcaggcggcgcttaaagcggtgctgacgcaaatcgaacatgaacagcaaaacgtcattacggttgatcgccagctgtatcaaaacggtattacctcctcggtcgaaggggtggaaaccgatattgatgccggtaaaacgcagcagcagctaaatgatgtggccggtaaaatgaagattattgaggcgcgtctgagtgcgctgaccaatgcgcaatcggcctcgctgaccctgcatacggttgctctgccagtgactgaaagccagttgcccgctcagttgagctatgaacttctggctcgccgacccgatttacaggcggcgcactggtacattgagtcctctttaggcagcgttgacgccgcaaaagcggcgttttatcccgatatcaacctgatggcgtttctgcaacaggacgccctgcacctgagcgatctgtttcgccattccgcacagcagatgggcgtcaccgccgggctgacgctgccgatctttgacagcggcaggctgaacgccagtcttgatatcgcgaaagcgcaaagtaatctctctgtcgcgaattacaacaaagcggtggtggatgcggtgaatgatgtggcgcgcgccgccagtcaggttgaaacgatggctgaaaaaaatcagcaccaacggcagattgagcatgacgcacagcgggtggttggtctggcacaggcgcggtttaatgccggaattattgcgggctcccgcgtcagccaggcgaagatcccggcgctgcgggaacattgcaacggcctgattttgcaagggcaatggctggatgcgtccatccagctcaccagcgcgctgggcggcggttatcatctttga

SEQ ID NO: 72022 - DNA, 939 bp, Citrobacter koseri
atgcgtgttttactggcgccgatggaaggcgtgctcgactctctggtgcgcgagctactgaccgaggttaatgattacgatctgtgcatcacggagtttttacgcgtggtggatcagcttctgccggtaaaagtgtttcatcgcatctgcccggaactgcacaatgccagccgcacggcgtccggcacagtcgtgcgtattcaactgctggggcaatacccgcagtggctggcggaaaacgccgcccgcgcggtggagctgggctcatacggcgtggatttaaactgcggctgtccgtcgaaaatggtgaacggcagcggaggcggggcgacgttgctcaaagatcctgagcttatctatcagggggcaaaagcgatgcgcgaagccgtgcctgcgcatttaccggtcacggtgaaagtgcgtctgggctgggacagcggcgaaagaaaatttgaaattgccgatgccgtccagcaggcaggggcgacagagcttgtcgtgcatgggcgaaccaaagagcagggttataaagccgaacatattgactggcaggcgattggcgagatccgccagcgactcactattccggttatcgccaatggtgaaatctgggactggcagagcgcgcaagagtgtatggcggtcagcggctgcgacgcggtgatgatgggacgtggagcgttaaacatcccgaatctcagccgcgtggtgaaatataacgaaccgcgtatgccctggccggaagtggtcttactgctgcaaaaatacacccggctggaaaagcagggagataccgggctgtatcatgtcgcgcgtattaagcagtggctggggtatttgcgtaaggaatatacggaagccaccgcgctatttcaggaaatccgagcgcttaataattcccctgatattgctcgcgccattcagtccattgatatttaa

SEQ ID NO: 72023 - DNA, 1194 bp, Citrobacter koseri
atggctaaagtgacaagcgcaattatcgtgggtggcggtattggcggcgcagcgaccgcgctgtcgctggcgtgccagggcattaaagtgatgctgctggaaaaggctcatgaaattggtgagattggggcggggattcagctcgggccgaatgcgttttccgcgctggacagcctcggcgttggcgaagtggctcgccagcgcgcggtctttaccgatcatattacgatgatggacgccgtgaatgccgaagaggtcgtgcgcattgaaaccggccaggcctttcgcgaccattttggcggcccgtatgccgtgattcaccgggtggatattcatgccaccgtctgggaagcggcgctgacccacccgggcgtggagtaccggacttcgacgaatattgtcgatatccgccagacgccggacgatgtaacggtgtttgacgagcaggggaatagctggacggcagatattctgctgggctgcgatggcgtgaaatcggtcgtgcgccagagtctacttggtgatacgccgcgcgtgaccgggcatgtggtgtaccgggccgtggtggagtgcggcgacatgccggaagatttgcgcatcaacgcaccggtactgtgggccgggccgcattgccatctggtgcattatccgttgcgcggcgggaaacagtacaatctggtggtgacgttccatagccgtcagcaggaggagtggggcgtgaaagacggaagcaaagaagaggtgctctcttattttgccgggattcacccgcgtccgcgtcaaatgctcgacaaacccacctcctggcgccgctgggcgaccgctgaccgggaaccggtagagaaatggggaaccgaccgcatcacgctggtgggcgacgccgcgcacccggttgcgcaatatatggcgcagggcgcctgcatggcgctggaagatgccgttacgctgggtaaagcgctggagcgttgtcatggtgatgcgcagcaggcctttgcgttgtatgagtcggtgcgtattccccgcacggcgcgaattgtctggtcaacccgcgagatggggcgcgtctaccatgccgcaggcgtggagcgacaggtgcgtaatctgctgtggaaaggcaaatcccagcaggagttttatcgcggcattgagtggctgtatggctggaaggaagataactgccttgagccgcgctga

SEQ ID NO: 72024 - DNA, 645 bp, Citrobacter koseri
atgaagctgtacagtttttttaatagctcggcgtcttatcgcgtgcgtatcgcgctggcattaaaaggcatcgattatgagacggtgggcgtcaacattcgtatcggccagcagaatgcgctgagctaccgacggatgaacccgatcgggctggtgccgacgctggtgactgatgacggtgaatctctcgggcaatcgctggcaattatcgactggctggatcgccacttcccgcagacgccgttgctgccgcaggtcgatccggcgcgcagccaggcgctggaaattgtctatgccattgcctgtgatattcacccggtgaacaacctgcgcgtactgcgctacctgactgacgagctgaagatcggcgaagaagacaagaaacgctggtacgcccactgggtgcaacaagggcttagcgcggtggaacagctgttgcgccaggggcagtccgggcagttttgcgtgggggatgcgcccacgctggcggattgctgcctgattccacaatgggccaatgcgctgcgaatgggatgcgacctgagcggttatccgcgctgcaaggcggtttatgacgcctgcacccggcttccggcctttatcgccgctgcccccgaaaatcaacaagacaaaatttcagcctga

SEQ ID NO: 72025 - DNA, 702 bp, Citrobacter koseri
atgagcaaatatgtattcgaacctcaggcgccagtcgcggtgccggttgttggcagcgatgagcaattcccggttcgccgcgtctactgcgttggccgtaactacgccgcccatgcccgtgagatggggttcgatcccgatcgtgagccgccgttcttcttctgcaaaccggccgatgcggtcgtaccggttacggctggcgaaacgctggcgctggcctatccgtcgcagaccgataactatcactatgaaattgaactggtggtggcgataggcaagcagggcagcgatattccgcttgagcaggcgcatgagtatgtctggggctatgccaccgggctggatatgacccgccgcgaccgtcagatggaaatgcgtcagatggggcgcccgtgggaaatcggcaaagcgtttgatttgtccgcgccgattgcgccgctgcataaagcgaccgatgtggcagacgtcaacaacgcgccgatttggttacaggtaaacggggaagatcaccagcgcagcgatattcgccatctgatctggtccgtcaatgaaaccatcagctacctgtccggcttttttgaactgcaaccgggcgacctgattttcaccggtacgccggaaggggttggggcagtggtgaaaggggatgtgattaccggtaatgtggaagggttaacgccgatcgccgtgaagattgtctga

SEQ ID NO: 72026 - DNA, 1038 bp, Citrobacter koseri
atgtctgaagtgaatcaggatgttaaacacaaccgtcagcagttttatcagcacatttccgggcaaaacctgacgccgctctgggagtcgctgcaccacctggtgccgcaaacgccgaatgccaattgcgcgcctgcgtactggaactatcaggagatccgcccgctgttgctggaaagcggcaacctgattggcgcgaaagaggctgtccgccgggtgctggtgctggaaaacccggcgctgcgcggacagtcgtcaattaccgcgacgctgtacgcagggctgcaattgattttaccgggcgaggtggcgccgagtcatcgccacaaccagtcggcgctgcgttttattgtggaagggcaaggagcgttcaccgccgttgacggcgagcggacgcagatgcacccgggcgactttattctgacgccgcagtggcgctggcacgatcacggcaaccctggcgacgagccggtggtatggctggacggtctggatctgccgctggtgaatacgctgggctgcgggtttgcggaagattacccggaagaacagcagccggtgacgcgcaaagaaggcgattacctgccgcgctacgccgccaacatgctgccgctacgccaccaggtcggcaattcctcgccgattttcaactaccgctacgaccgtagccgtgaagcgctgcatgacctgacccggatgggggaacctgacgagtgggatggctacaagatgcgctacgtcaacccggtcaccgggggctatccgatgccttcgatgggcgcgtttttgcaactgttgccgaaagggtttgcgtcgcgcgtggcgcgcacgaccgacagcaccatttatcacgttgtggaaggttccgggcaggtcaccattggcaatgagacgttccacttcacggcgaaagatatctttgtagtgccgacatggcacggggtgtcgttccagaccacggaagataccgttttattcagtttttcggacaaaccggttcaggaagccctcggcttgttccgcgaagcgcgttattaa

SEQ ID NO: 72027 - DNA, 1359 bp, Citrobacter koseri
atgactcaacgacgtgatctacaagcactgattgacgccgcccccgtcggcaaaatgcagtggcgcgttatcatctgctgctttctggtggtaatgctcgacggttttgatacggccgcaattggctttattgcgccggatatccgtacgcactggcaattgagcgccagcgatctggctccgctgttcggcgcgggtctgctggggctgacggcaggggcgctattgtgcggcccgctgtcagaccgttttggccgtaaacgggtgattgaactgtgcgtggcgctgtttggcgccttgagcctgctttccgccttctcgccggatttgcaaacgttggtggtactgcgctttttaaccgggctggggctgggcggcgcgatgccgaataccatcacgatgacgtcggaatatcttcccgcccgccgtcgcggggcgctggtgacgctgatgttctgcgggtttaccctcggttcggcgatgggcggcatcgtcagcgcgcaactggtgccgctgattggctggcacggcattctggtgctcggcggcgtattacccttaatgctgttcttcgccttgctgtttgttctgcccgagtcgccacgctggcaggtgcgtcgtcagcgcccgcaggcggcgattgccagaacggttagcgccatcaccggcgaacgctacgacaatacgcatttctatcttcatgaagccgccgccatttcaaaaggcagtatccgccagctttttgtcgggcgtcagcttcccattaccctgatgttatgggtcgtgttcttcatgagcctgctcattatctacctgctctccagctggatgccgacgctcctgaatcaccggggaatcgatttgcagcatgcctcctgggtcactgccgcattccaggtcggcggtacgctcggcgcgctgttactcggcgtactgatggacaaacacaatccgttccgggtgctggccgtgagctacgcgctgggcgcggtctgcatcgtgatgattggcctgagcgaaaacggactgtggctgatggcgctggcgatttttggtacgggcattggcatcagcggatcgcaggtggggttgaatgccttaactgcgacgctgtacccgactcaaagccgtgcaaccggcgtgagctggtctaatgccgtcgggcgctgcggcgccattgtcggttcgctctccggcggcatgatgatggcgatgaatttctctttcgatacgctgtttttcgtcatcgcgattccggcagccattagcgcggtgatgctcgccatgttgacggcggttgtccgccactctgcctctgaacctgacgtgctgccccgggcaggcgtcgtgaacgaataa

SEQ ID NO: 72028 - DNA, 909 bp, Citrobacter koseri
atggcgaattgggcgcaaaaattgaagctgcaccacctgcaaatgctggtcgcgctgggggaacaagggaatctgacccacgttgcgcgaatgatgaacatcacccagcccgcgctgtcgaagtggctgtcacagcttgaagatgagatcggaatcacgctttttgaacgccacagcaaggggttacgcccttcagaagggggcaaactgttgctccagcatgcgcagcggctcatcaacgatatggaacgttcgcagtatgagatcgcgcgctttaagcaaggtgggctggtgggaagcctgaaaatcggctgttcaccggtcgcgacagactgcgtgtcgcaggcgatcctctgcctgctcaatgagatgccgacgctgcacctgaatattgaagagaaagtcatgaccccgcttttacacgatctgctcgccgggtcgctggacgtggtggtaggccgcgtgggcggtcgggcgctccagctgccgttaaattatcaggtactctacaccgaaccggtctgctttgtcgcccgcccccatcatcctctggcctcacacgccacgctttcctggaacgacctcgcccactggcgctggattgtctggccgaccggtacgccaattcgcatcagcattgataacgccctggtggacaacggcgtgatgctgccggaaaacaccatcgaatccgcctcgatgaacgtcagcaccaatttgctgcaaagcagcgatatgatctctattctttctctacgcctggcgcaacgctatgccagccagggccagttggctatcttaaacctgccgaaaatagaacagaaaggaagcgtgggcatgttctggcgcaagaacgagaccccttctcttgcgttgagtcgttttctgcattttctggcgcaggtttag

SEQ ID NO: 72029 - DNA, 399 bp, Citrobacter koseri
atgagtaaatcactgaatatcatctggcagtatttacgcgcatttgtactgatatatgcctgtttgtatgcgggtattttcattgcatcgctgcttcctatcacgattcccggcagcatcatcggcatgttgattctgtttgttttactggcgctacaaattctgccagcgaagtgggtaaacccgggatgctatgtcctgatccgttacatggcgctgctgtttgtgccgattggcgtcggcgtcatgcagtacttcgatttgctgcgcgcgcagtttggcccggtggtggtctcctgtgcgatcagtacgctggttgttttcctggtcgtgagctggagttcgcatatcgtacacggtgaacgaaaagtgttagggcagaaaggatcgaaaaaatga

SEQ ID NO: 72030 - DNA, 696 bp, Citrobacter koseri
atgatgtcgtatatctggtggtcgttacccctgacgctggcggtctttttcgccgcccgcaaactggctgcgcgctttaagatgccgttgcttaacccgttgctggttgccatggtggtaatcatcccgtttctgatgctgaccggcattccttacgatcactattttaaaggcagcgaggtgctcaacgacctgctgcaacccgccgtcgtggcgctggcgtaccctttatatgaacaactgcaccaaatccgcgcccgctggaaatccatcatcacgatctgcttcgtcggcagcgtggtcgccatggtgaccggaaccactgtcgccttactgatgggcgccacgccggaaatcgccgcatcggtattaccgaaatcggttacaaccccaatcgcaatggcggtgggcggcagcatcggcggcattcccgccattagcgccgtctgcgttattttcgtcgggatactgggcgccgtatttggtcataccctgctcaacctcatgcgtatccgtaccaaagccgcacgcggtctggcaatgggaaccgcctcgcacgccctgggcactgcgcgctgcgccgagctggattaccaggaaggggcgttcagttcgctggcgctggtgatctgcgggatcatcacctcgctgctggcaccgtttctcttcccgattattctggcggtagcgggttaa

SEQ ID NO: 72031 - DNA, 885 bp, Citrobacter koseri
atgcatccacgttttcaaactgcttttggccaacttgcggataatctgcaatcagcgctggcgccgattctggcagatgagcattttcccgccatgctgactgcggagcaggtctcgacgcttaagcgtgaatcggggctggacgaagacgcgctggctttcgcgctcctgccgctggctgccgcctgcgcacgcaccgacctttcccactttaacgttggcgctatcgcgcgcggcatcagtggggcctggtatttcggtgggaatatggagttcctgggcgcgacgatgcagcaaaccgttcatgccgagcaaagcgcgatcggccacgcctggctgcgcggtgaaaaagggctcgccgccatcacggttaactacaccccttgcggtcattgccgtcagtttatgaacgaactgaacagcggcctggatctgcgtatccacctgccggggcgcgtaccgcataccttacgcgactatctgcctgacgctttcggcccgaaagacctggagatcaaaacgctgctgatggacgagcaggatcacggtttcgcgctggagggcgacgcgctgactcaggcagcgattgccgccgccaataaatgtcatatgccttacagccactccccaagcggcgtggcgctggaatgcaaagacgggcgtattttcaccggcagctatgccgagaacgccgcctttaaccctacgctgccgcctttgcagggcgcactgaatctgctgaacctgaacgggtatgactatccagatattcagcgcgcaattctggcggagaaagccgacgcgccgttaatccagtgggacgccaccgccgccacgctgaaagcgttaggctgcaataatatcgaccgcgtactgctgggttaa

SEQ ID NO: 72032 - DNA, 720 bp, Citrobacter koseri
atgttaaagcgcgtgttttacagcctgttagtcctgatcggcttgctgctgttgactgtgcttggtctcgacagatggatgagctggaaaaccgcgccctatatttacgacgaattacaggatctcccctaccgccaggtgggagtggtattaggcaccgcaaaatactatcgcaccggcgtcattaatcagtattaccgctaccgcattcagggcgcgttaaacgcctacaacagcggcaaggtcaattatctgctgctcagcggcgataacgcgttgcaaagctataacgaaccgatgacgatgcgtaaggatctgatcgccgggggcgttgatcctgccgacatcgtgctcgattatgccggttttcgcacgctggactccattgtgcgcacgcgcaaagtgtttgataccaacgacttcatcatcattacccagcgtttccactgtgaacgcgcgctgtttattgcgctgcatatgggaattcaggctcagtgctatgcggtgccgtcgccaaaagatatgttaacggtacgcgtacgtgaatttggcgcccgattcggcgcgctggcagacctttatattttcaaacgggaacctcgcttcttaggcccgttagttcccattccaacaatgcatcaggtgccggatgacgcccagggctacccggcagtaacgcctgagcaattgctggaactgcaaaagaaacaaggaaaataa

SEQ ID NO: 72033 - DNA, 240 bp, Citrobacter koseri
gtggaagggaaaacgatctttgtggtcatcgccgtcctgatggtgatgctgtttagcttacgggaagcctacaaaggctggcgctctggcgccgtggataaaatcgtcaggaacgcccgcgaccccgtatacgcctaccgtgcagaaacccctctcctttactggagctacatcgggttatatctgtgcatgtcggtttgtacgctcgccgcaggcatttattttctgttctttagataa

SEQ ID NO: 72034 - DNA, 1011 bp, Citrobacter koseri
atgagtgcgttaaataagaaaagttttcttacttatctgaaagaaggcggaatttacgttgttcttttagtcttgctggccattattattttccaggaccctacatttttaagtctgctgaacttaagtaacattctgacgcagtcctccgtgcgtattattatcgcgctgggtgtggcagggttgattgtcacccaggggactgacctgtctgcggggcgtcaggttggcctggcggccgtggtcgccgcaacgctgttgcagtccgtggaaaacgccaataaggtcttcccggaaatggccaccatgccgattccgctggtgatcctgattgtctgcgcaattggggccgtcattggtttacttaacggtattatcattgcgtacctcaatgtgacgccgttcatcacgaccctgggcacgatgattatcgtttatggcatcaactccctgtattacgactttgtcggggcgtcgccgatttcggggtttgatagcgggttctcgacgtttgcgcagggctttattgcgctgggcagtttccggctctcctacattaccttctatgcgctgattgcggtggcgttcgtctggatcctgtggaataaaacccgtttcggtaagaacattttcgctatcggcggcaacccggaagcggcaaaagtgtccggcgttaacgtggggctgaacctgctgatgatctatgcgttgtccggtgtgttctacgcattcggcggtttgctggaagcggggcgtatcggttctgcgaccaacaacctcggctttatgtatgagctggatgcgattgccgcctgcgtggtcggcggcgtgtcgtttagcggcggcgtcgggacggtattcggcgttgtgaccggtgtgattatctttaccgtcatcaactacggcctgacctatatcggcgtgaacccttactggcagtacatcattaaaggcggcatcattatcttcgcggtggcgctggactcgctgaaatacgcccgtaagaagtaa

SEQ ID NO: 72035 - DNA, 1521 bp, Citrobacter koseri
atggtcagcactactactccgtcgtcaggcgaatacttgttggaaatgagcggcatcaacaagtcttttcccggcgtaaaggcacttgacaatgttaatttaaaagtccgcccgcactcgattcacgccttaatgggggagaatggcgcaggaaaatcaacattattaaaatgcctttttgggatctatcaaaaagattccggtagcattttatttcaggggaaagagatcgattttcattctgccaaagaagccctggagaatggtatttcgatggttcaccaggagctaaacctggtgttacagcgctccgtcatggataacatgtggttagggcgttacccaaccaaaggtatgtttgtcgatcaggataaaatgtaccgggataccaaagcgatatttgatgaactggatattgatatcgatccgcgtgcgcgtgtcgggacattatccgtttcacaaatgcagatgatcgaaattgcgaaggcgttttcctacaatgccaaaattgtgatcatggatgagccgacctcctcattaacggaaaaagaggttaaccatctgttcactattattcgcaaactgaaggagcgcggctgcggtattgtgtatatctcgcataaaatggaagagattttccagctgtgcgatgaagtcaccgttttgcgcgacggccagtggattgcgacgcagccgctggaagggctggatatggacaagatcatcgccatgatggtgggtcgttccctgaaccagcgtttcccggacaagcaaaacaagccgggagaggtcattctggaagtgcgtaacctgacgtctctgcgccagccgtcgatccgcgacgtctcttttgatctgcataaaggggaaattctcgggattgcgggtctggtaggggcaaagcgtaccgatattgttgaaacgctttttggtatccgggaaaaatcatcgggtacgattacgctgcacggcaaaaagattaataaccacaacgcgaacgaagccattaatcacggtttcgcgctggtaacggaagaacgtcgttcaaccgggatctacgcgtatctggatattggttttaactctttaatttccaacatccgcaattacagaaataaagtcggtttgctggataattcccgcatgaagagcgatacccagtgggttattgactcaatgcgcgtgaaaacgccaggtcatcgcacgcaaattggctctctttcggggggcaaccagcagaaggtcattattggccggtggctgttaacgcagccagaaatattaatgctggatgagccaacgcgcggtattgatgtcggcgcaaaatttgaaatctatcaactgattgcggaactggcgaaaaaagagaaggggattattatcatttcttccgaaatgccggaattgttagggattacagatcgtattctggtaatgagcaatggccttgttgccgggattgttgacacaaaaacaacaacgcaaaacgaaattctgcgtcttgcgtctttgcacctttaa

SEQ ID NO: 72036 - DNA, 999 bp, Citrobacter koseri
atgaataagaaggcgttaactctgtctgctgtgatggcaagcatgttatttggcgcggctgcgcacgctgctgatactcgcattggtgtgacgatttataaatatgacgataactttatgtccgtcgtgcgtaaggctatcgaaagagacgcccaggcggcgcctgatgtgcagttgctgatgaatgactcgcagaacgatcagtccaagcaaaacgaccagatcgacgtgctgttggcaaaaggggtaaaagcgctggcgatcaacctggttgacccggctgcggcaggtacggtaattgagaaagcgcgtggtcagaatgtcccgattgtgttcttcaacaaagaaccttcccgcaaagcgctggatagctatgacaaagcctattacgtcggcactgactccaaagaatccggtatcatccagggcgatctgatcgccaaacactggcaggctaaccagggttgggatctgaacaaagatggccaaatccagttcgtactgctgaaaggcgagccgggccacccggatgctgaagcgcgtaccacctatgttatcaaagagctgaacgacaaaggcatcaaaactgagcagctgcaaatggataccgcaatgtgggataccgcaatggcgaaagacaagatggacgcatggctgtccggcccgaacgccaacaaaattgaagtggttatcgcgaataacgacgcaatggcgatgggcgcggtagaagcgctgaaagcgcacaataaaaccagcgttccggtattcggcgtggatgcgttacctgaagcgctggcgctggtgaaatccggcgcgctggcaggtaccgtgctgaacgatgctaacaaccaggcgaaagccacctttgatctggcgaaaaacctggccgatggtaaaggcgcggctgacggcaccgactggaaaatcgagaacaaaattgttcgcgttccgtacgtaggtgttgataaagacaatctggctgagtttaccaacaagtaa

SEQ ID NO: 72037 - DNA, 1041 bp, Citrobacter koseri
atggtaaccattcgtgatgtggcacgtcaggctggcgtttccgtagcgaccgtttctcgcgtgctgaataacagtgcgctggtcagtcccgatacgcgcgaagcggtaatgaaggcggtcacgctgctgggttaccgtcctaatgctaatgcgcaagcgctggcgacgcagataagcgacactatcggcgtggtggtgatggacgtgtcagatgcgttttttggcgcactggtcaaagcggtggatgtggttgcccaacaacacaacaaatatgtgctgatcggcaacagttatcatgaggctgaaaaagagcgtcatgccatcgaggttctgattcgacaacgctgtaacgcattgattgtccactcgaaagcattaagtgaccaggaactgggggcgtttatggaccagatcccaggcatggtgctgatcaatcgtattgtgccgggttatgcccaccgttgcgtgtgcctggacaatatcagcggcgcaaaaatggcgacccgcatgctgctcaataatggtcatcaacggattggttatctggcttccagccaccgcattgaagatgacactatgcgtaaagaagggtggctgagtgcgttgcaggagcagggggttacaccgccagaaagctggattggcacgggttccccggacatgcagggcggtgaagcggcgatggtggaactgctggggcgaaacctgcaactgaccgccgtattcgcctataacgacagcatggccgctggcgcgctcacggcgttaaaagacaatggcattgccatcccgttacatctttccatcatcggttttgatgatattcctattgcccgttacaccgacccgcagctgaccacggtgcgttatcccattgcttctatggcgaaaatggcaacggaactggcgttgcagggcgcggccggcacgctggattcaacggcgacgcactgttttatgccaacgctggtgcgtcgtcattcggttgcgctaagacagaatgcggccccgatcactaaccagcaacgtcaggggatgtaa

SEQ ID NO: 72038 - DNA, 1158 bp, Citrobacter koseri
atggagcgtaatgtcacgctggattttattcgtggcgtcgccatcctcggtatcctgcttcttaatatcagcgcctttggcttgccaaaggcggcttaccttaatcccgcctggtatggcaagatcaccgcgtctgacgcatggacgtgggcgattctcgacctgttcgcgcaggtaaaatttcttacgctttttgcgctgttattcggcgcgggtctgcaaatgctgctgccgcgcggcaaacgctggattcagtcgcgtctgacgctgctcgtcctgttgggctttatccacggtttgctgttctgggatggcgacattctgctggcgtatggccttgtcggcctgatttgctggcggctggtgcgcgacgcgccgtcggtaaaaagtttatttaataccggtattttgctctatctggcggggattggcgtgttgctgctgttagggtccatctcggcgagtgaaaccagccgcgcctggacgccggatgcctctgccttgttgtatgaaaaatactggaagattaacggcggcatggaggcggtcagcaaccgggtcgatctgctgtcgaacagtctgctggcgctgggagcgcagtatggctggcagctggcgggaatgatgctgctgggcgcggcgctgatgcgcagcggctggctgaagggtcagtacagcctgcaacactaccggcgtacgggcgtattgcttgtcgtcgtcggcgtgctgattaaccttccggccattattgtacagtggcggctggactgggcgtatcgctggtgcgcttttctgttacaggcgccgcgtgaattgagcgcgccgtttcagactataggatacaccgcgttgatgctggggttctggccgcagctcagccgttttaaactggtcattgccattgcctgcgtagggcggatggcgttgagcaactatctgttgcagacgctgatctgcaccacgctgttctaccagttcggtttatttatgaaattcgaccgactgacgctgctgatattcgtcattcctgtctggctggcgaacctgcttttctcctggatttggctgcgtttctatcggcaagggccggtggaatggctctggcggcaattaaccctccgtgcttccgggacgtcattatcgggaacatccagataa

SEQ ID NO: 72039 - DNA, 669 bp, Citrobacter koseri
atgtcatcactcagtaaagaagcggccctggttcatgaagcgctggttgcgcgtggtctggaaacgccgctgcgcccgcccgtgcatgagatggataacgaaacgcgcaaacgtcttatttcggggcatatgaccgagattatgcagttgctgaatctcgacttgagcgatgacagtctgatggaaacgccgcatcgcatcgctaaaatgtatgtcgatgagattttctccggccttgattacgccaatttcccgaagatcaccgtgattgaaaacaagatgaaagtggatgaaatggtgacggtgcgcgatatcacgcttaccagcacctgcgaacaccatttcgtcacgatcgacgggaaagcgacggtggcctatatcccgaaagattcggtgattggcctgtcgaagattaaccgtattgtgcagttctttgcgcagcgcccgcaggttcaggagcgtctgacccaacagattctgaccgcgctgcaaacgctgcttggcaccaataacgtcgcagtctcaatcgacgctgtgcattactgcgtgaaagcgcgcggcattcgcgatgcgaccagcgccaccaccacgacttccctcggcggattgtttaaatccagccagaacacgcgccaggagttcctgcgcgctgtgcgtcaccacaactga

SEQ ID NO: 72040 - DNA, 837 bp, Citrobacter koseri
atggatatgctcgaagagcaccgttgttttgaaggctggcagcaacgctggcgacacgactccaccacgctgaattgcgccatgacattcagcatctttctcccgccgccccgcaatacaacaccgcctccggtgctgtactggctgtcagggttaacctgtaatgatgagaacttcaccaccaaagccggtgcgcaacgcattgccgctgaactgggcattgtgctggtgatgtcggacaccagtccgcgcggcgaacaggttgccgatgacgaaggttatgatttaggtaaaggcgcgggattctatctcaacgcgacgcagcagccctgggccgcgcatttccgcatgtacgactacctgcgcgatgaactcccggcgctgatccagtcgcagtttaacgtgggtgaacgttgcgcgatcagcggacattcaatgggcgggcacggcgcattgatcatggcgctgaagaatccggggaaatacaccagcgtttccgcctttgcgcccatcgtgaatccgtgccgcgtaccgtggggagaaaaagcgtttacggcctatctgggggaagagagatcggcctgggctgaatgggacagttgcgcgctgatgctcgccagccagccggaacacgccattccaacgctgattgatcaaggcgataacgatcagttcctcgccgatcagctacaaccggcggtactggccgaagccgcgcgccagaaggactggccgatgacgttacgtattcaaccgggctacgaccacagttattactttatcgcctcgtttattgaggatcatctgcgcttccatgcacagcatctgctgagctga

SEQ ID NO: 72041 - DNA, 363 bp, Citrobacter koseri
atgaataatgacgagatcgtctggtcgctctgcgcgcgtatcaaggaaacgcggatttccctgtctatgacgcaacagcagcttgccgatcgcgcgcaggtaggcatcgcgacgatcaagcgtattgagaaaggcgctggcctgaacctcgatacgctgatttctctcctgcgcgcgcttgataaactgcacaatctggatgcgattttgtttgaatcagaaatgcgcaattttagcgagagcgagagtgtcgggcgacttcagattcgccagcaggttgctgatttaaaccggaaatcgtctgcgccgcaagccgatgacaataacgatattgcggcgctggaaaaagccgtttactggtga

SEQ ID NO: 72042 - DNA, 1368 bp, Citrobacter koseri
atggaaagttgcgttgatatattcaaaattgttataggtccatccagttcaagaaccgtggggccaatgcgtgcggcttgcaatttcatttcgcagctaaaacggcaggatacgctgccgttactcaggaatattgaaattgaactgtttggcgcattatcgttaagccgtaaatgccacaatgttgatgccgcgctttatctgggattgctgggaaatcagccggagaaggtggatttacgtatgcaactgaccgccatcaggcgtgcggaaaatgacggtatgcttgacgtgcctgccccggcgaacagtacggtgacagtggcggtgaaaattattgcgaatcaccatgcgcatcctggacatccttatgcgatgacctttcgcgccaaagatgattactttacgttatacgaggagacgtggttttcgaccggcgccgggcaggtacgaaaatacggtgagtctgcgcccgtggcgacagatcagacacgcgcctctccctttgcctttcgcaacgccgcgcagttgcagacgctgtgccaacgcaacgggctttccgttgcggcgctgatgatgaaaaatgagctgaacagccattctcagccctcattacagcgctatttaacgcaggtctgggaggttatgaagcaggccgttcaccgtggcctgcataccgaagggctgcttcccggcccttatcagatcccgcgtcgggcctgcgcattgcataaatcgttgtgtatgaagccttcggcagcggattttctgacaaccctgaactgggttaacgtgtttgctattgccgtgagtgaagagaatgcggcaggcgggcagattgtcacggcgccgacgaatggcgcaagtggcattattccggcggtattgagctggtacgataagtttgtttgtccgctggacgcgggcgccatcacccgtttttttcttacggcaggtgccgtcgcgctgttgtttaaacagaatgcgtcgattttaggatcggaagtgggatgccagggggaaatcggcgtcgcatgttcgatggcggcggcagggctggcggagctgatgggcgcatccgtcgggcaggtattaagcgctgcggaaattgcgatggagcaccatctggggttgacctgcgatccggttggcgggcaggtgcaaattccctgtatagaaagaaacgccatctctgccgtaaaagccattaatgcggcgacgatggcgatgagccgcatcagcgagccttgtatttctctggatgaaattattgccgccatgtatgaaaccggcaaagacatgagcgcaaaatatcgcgagacttaccacggatgcctcggaaaaattcagccaagaaaaaggtgctag

SEQ ID NO: 72043 - DNA, 888 bp, Citrobacter koseri
atggcaataacttacttcgtcacatcaacaaacacagagcaacttcagacgtggttatataatgattttcttcgttctcacgcaatgcaatgtcattatttattagagcgtcggcatctggcattaatcaataaggattatttaaaacttacgctacccgatgaaatgctgacgcaggctatttatcagaaattacgcgctgcatcactgcaattgcagtttgatttttttgtcaaacctcagagcatccccacaaagggactgattgcatttgatatggactcaacgtttattgaagaggaaggcgtggatgaaatcgctcacacgcttggcatctctgcgcaaatcgcggagatgacccaacaggcgatggaagggaaagtagattttgacaccagttttacccgccgtattcgcatgttaaaaggcacgcactgtgatgtcctcaatgccgtttgcgatcgaatgacgatttcccccggccttgccgctatgttgccggtactgaaaaacaaagggtttaaaacggccattatttccggcggtctggatatttttacccaacgactgaaagaaaagtatcagctcgactacgccttttccaacacggttgaaataaaagataacgtcctgacggacaatattaccttcccgatcatgaatgccggaaaaaaacggcaaacgctctctgcgctggcaacacaactcaacctcgctgtacacaacattattgcctgcggcgacggcgcaaacgatctgccgatgctaacgtacgcaggaaccggtatcgcgtggcgggcaaaacccgttgtcagagaaacaatccatcatcagattaattttcatggattcgaatcacttctgttctttattgaagatgaattataa

SEQ ID NO: 72044 - DNA, 1323 bp, Citrobacter koseri
atgaacataaaagcatttattttcagtcaggccgatcggcctgttatgaacgcgaaaaaagagattgatcatacttataaaaaatttcgcacagagatcatcacctcggtatttatctcttatgccgtattctatctgacccgtaaaaacttttctgctgcgatgccagccatgctggcggatacgtcgctaaccgcagaagatttcgccatcatgtcctccattttttacattctttatggttccatgaagtttgttggcggcatgctggttgataaaattaaccctaaagccatgaccggcccggtgctgattggcgtcggcatcgtcaatattctctttggcttttccgatagcgtcgcggcgttctacgtattgtacagcctcaatgcgattctccagggcaccagcttcccgccaatggcgaaaattatggcctcctggttctcaaaaaacgaacgcgggcgctggtgggcaatcgttgaagcagcgcataacattggcggcagccttgccccgctgctcaccagcttcgccattgcctttagcggcagctggaaaatgggcttctatgtccctggagtcatttcccttctgatgggggttgtcgcgctgtttacgattcaggatcgtcccggcaccctcgggctacccaatgtcggcgaatggcgtaacgaccctaccgagcttgcacaggtaaaagccagcccggtcaatctgagcttctggcaggtgttcgttaaatacattctgaccaacccactggtatggatcatcatcgtaggcgatatgtccgtgtatattgcgcgcactattctcaatgactggccgcaaatctattactcgcaggtacacggctggagcctgattaaagcaaactccattatctcgtggttcgaagctggcgggctggcagggggactgctggccggatatttgtcagactttatgtttaaaagcaaccgctggatgacggggttaattttcgccttaatgctctgcgtatgcatcgtgcttatcccactggtgcaggatacctcttacaccatcaccgccgtacttttcaccatcatgggatttgcactgtacgggccgcatatgctttttgccgtcggctgcctggacgtcactcacaaagatgctgcgggttctattaccggtttccggggattattcagttatgttggcgcggcaatggccggcgtaccggtcattctggtgaaaaatagctgggaatggtctggcgtctatatttacgccttcatcgctattttattaaccacgctctccctggcgctactttctcgtctccatcgtctgtaa

SEQ ID NO: 72045 - DNA, 1986 bp, Citrobacter koseri
atgaccatacctcacgttaaggctatcgctgccgcagtatgcgcagcgtgtctcccatcgctcgtctatgctgccgatcaggacaccgtcgttgtaaccgccacgggatttgagcagaaaatccagaacgcccccgcgtctatctccgttatcaccaaacagcagatcgaagacaaagcctatcgcgatgtcaccgatgcgctgaaagatgtgcccggagtcgttgttaccggcggcggcagcagtagcgatatcagcatccgcgggatggcttcgcaatacacgctgttcctggtcaacggtaagcgcatcagcacgcgcggcacgcgtccgaacagcgataactccgggatcgagcaaggctggctaccgccgctggaatcgatcgagcgtattgaagttattcgcgggccaatgtcatcgctttacggttcagatgcgatgggcggcgtcattaacgtgatcaccaaaaaagtgtccaacacgaaaggctggaccggctccctgcatggcgacgccaccttccaggaagacagggactccggtgatttgtaccagaccaacgcttatgcgtccggcccgctgattgacggattgctgggagcgaaagtgaccgggctgctctctcgccgtgcggaagacaaaatcgtcaatggctacaacgagcagcgcctgcgcaacggggctttaacgctaaactttacgccggatgataaaaacgattttgacttcgacatcgcgcgtgaattgcaggatcgcgacagtacgccaggcaagtcaatggcagaagaaagctgccgcaacggtagctgtaagccaaacagcaaaagcgaaaaccgctatgagcacaccacttattccttaacccacagcggttattacgacgacttcaacaccaccagctacattcagcaggaagagaccaacaaccccggtcgccagatgaagtcttacaacaccatctttaataaccagaaccagatcttcctcggcgcgcataccctgacattaggtggacagtatcgttacgagaaactgagcgataacggcaaccagttaaaagcctacgaagacgtgaacaagctgacccgctggagctgggcgctgtttgctgaagatgagtgggcgatgaccgacagctttacgctgaccggcggtatccgtatggataaagatgaaaactatggcgacaactggacgccacgtggctatggcgtatggcatcttaccgatcagtggaccttaaaaggcggcgtctctgcgggctaccgcgcgccggatctgcgccagtcctccccgacctggggacagattaccggcggcggtcgtctgaacggtattattgtcggtaacgcagacctgaaaccagagaagagcctgagcgaagagttgggcctgctgtgggataacggagataaccttaacgctggcgtgacgctgttcaataccgacttcaaagataagataactgaagtgcgtcgctgcaacagcagttcagatccggcctgtactattggtggtgagaaatacgactttgtcagcgatcgcgtcaacgttgataaagccaatatgcgcggcgtggagtccacctttggctggaagatcacccgcgatctcaactggacggcgaactacacctataccgaatctgagcagaaaagcggccagttctctggcaagccgttgaataaaatgccgaagcatatgttcaataccacgctggactggcaggcaacgcaggatgttggcttctggagccgtctgaacttccgcggcaagacctccgaatacctgagccgtacttcaatggcccagggaacgccgtcttatacgcaggttgatgttggtgtgcgttattacgcgtacaaaaatctactgttaaccgcgggcgtgtataacgttctggacaaacagatcgattacgagacttacgataccattctcgacggtcgtcgttacacggttggcctgacttataacttctaa

SEQ ID NO: 72046 - DNA, 1470 bp, Citrobacter koseri
atggtttccgaaactaaaaccacagaagcgcccgcgttacgtcgcgaattaaaggcgcgtcacctgacaatgatcgccattggcggttccatcggtacgggtcttttcgttgcatctggtgcaaccatttctgcggcgggtccaggcggcgcgctgttttcttatatcctgatcggtctgatggtctacttcctgatgaccagtctcggcgaactggcggcgtatatgccggtatccggttcatttgcgacttacggtcagaactatgttgaagaaggctttggcttcgcgctcggctggaactactggtacaactgggcggtgaccatcgccgtagacctcgtggccgcacagctggtgatgaactggtggttcccggatacgccgggttggatctggagtgcgctgttcctcggcgtgatcttcctgctgaactacatctcggtcagaggctttggcgaagcagaatactggttctcgctgatcaaagtggcgaccgtcattatctttatcatcgtgggcgtcatgatgatcgtcggcatcttcaaaggggcgcagccagtgggctggagcaactggacgaccggcgatgcgccgtttgccgggggttttgcggcgatgattggcgtggcgatgattgtcggcttctccttccaggggacggaactgattggtatcgcggcgggtgagtctgaagatccagagaaaaacattccgcgcgcggtgcgtcaggtattctggcgtatcctgctgttctatgtgttcgcgatcctgattatcagcctgattatcccgtataccgacccgagcctgctgcgtaacgatgtgaaagacattagcgtcagcccgttcactctggtgttccagcatgcgggtctgctttccgctgcggcggtaatgaacgcggttatcctgacggcggtgctgtcggcgggtaactccgggatgtacgcgtctacccgtatgctctacaccctggcctgtgacggtaaagcgccgcgtattttcgcgcagctgtcacgcggcggcgttccgcgtaacgcgctgtatgcgacgacggtaattgcggggctttgtttcctgacgtcgatgtttggcaaccagacggtatacctgtggctgctgaatacctccgggatgacgggctttatcgcctggctggggattgccatcagccattatcgtttccgccgtggctatgtgttgcagggtaacgatgtgaaagatctgccgtatcgttctggattcttcccgctggggccgatctttgcgtttgtgctgtgtctgaccatcacgctggggcagaactatgaagccttcctgaaagacaccattgactggggcggcgtagcggcaacctatatcgggattccgctgttcctggctatctggtttggctacaagctgacaaagggaacgcactttgttcgctacagtgaaatgcacttcccggagcgtgtgaagaaataa

SEQ ID NO: 72047 - DNA, 864 bp, Citrobacter koseri
atgcatatcacgctacgacaactagaagtttttactgaggtgctaaaaagcggctcgacgacccaggcatcagtcatgctgtcgctgtcgcagtcggccgtaagcgcagcattgaccgatctggaaggtcagcttggcgtacagctatttgaccgcgttggaaaacggctggtggtcaatgaacacgggcgcttgctgtacccgcgcgcgctggcgctgctggagcaggctgtcgaaattgagcaactgtttcgggaagacaacggcgcaatccgcgtttatgccagtagcaccatcggtaattacatcctgcctgcggtaattgcccgttacaggaaagactttcccgatctgccgctggaacttagcgtgggcaacagccaggatgtcattacggcggtgctcgattttcgggtagatatcggcctgattgaaggtccgtgccacaatactgagattatttctgagccgtggctggacgatgaactggtggtgtttgccgcaccgtcctcgccgttggcgcaagggccggtaacgcttgaacaacttgccgccgcgccctggatactgcgcgagcgcggttccggtacgcgtgagattgtcgactacctgttgctttcgcacttgccaaaattcgaaatggcgatggagttgggtaactccgaagcgatcaaacacgccgtgcgtcatggtctgggcatcagctgcctgtcgcggcgggttattgaggaacagcttcaggcgggaacgttgagtgaaatcgcggtgcctttgccgcgcctggtgcgaaccctgtggcgaatccaccatcgccagaaacacctttccaatgccttacagcgttttctgcgctactgcgaataa

SEQ ID NO: 72048 - DNA, 1050 bp, Citrobacter koseri
atgacagaactcaccttacagaatcaccatcgtacagtgtggcattttataccggggcttgccctgagcgcagtcatcacaggggccgccctgtggggtggatctattcctgccgtcgcgggagccgggttcagcgccctcaccttagccatcttactgggaatggtcatcggcaatacggtgtatccgcaaatctggaaaagctgtgacggcggcgtgctgttcgctaaacaacatctattacgcctggggatcattctctacgggtttcgcctcaccttctcacagattgcagacgtgggcgtcagcggaattgtgattgatgtactgacgctctccagcacttttttactcgcctgtttcctcgggcagaaagtgtttggtctggacaagcacaccagttggctgattggcgccggaagcagcatttgcggagcggcggcagtgctggcaacggagcccgtcgttaaagcggaggccagtaaagttacggtggccgtcgcgacggtggtgattttcggtacgctggcaatcttcctctacccggcaatgtatccgctgctggcgcactggttcagcccggaaacctacggcatctatattggttcgactatgcatgaagtagcccaggtcgttgccgccgggcacgccattaacccggacgcggaaaacgccgcggtgattgccaaaatgctacgcgtaatgatgctggcgccgtttctgattctgctggccgcccgcgtgaaacaactttctccggcgacgggcgcggagaaaagcaaaatcaccatcccgtggtttgcggtgctgttcatcgtagtggcaatcgttaactcgttccatccgctgccgcaggcggtggtaaacatgttgattacgctggatacggttctgctggcgatggcaatggccgcgctgggtcttacaacgcacgtcagcgcgctgaagaaagccggggcgaaaccgttactgatggcgctggtgctgtttgtctggctgattgttggcggcggcgtgattaacgtactgattcaccatcttatcgcataa

SEQ ID NO: 72049 - DNA, 858 bp, Citrobacter koseri
atgaaatatatcggagcgcatgtcagcgccgctggcgggttagccaacgctgcaattcgcgccgcagaaattgacgcaaccgcatttgcgctgttcacgaaaaatcagcgtcaatggcgcgccgcgccgctcactgcccaaatcattgatgactttaaggccgcctgcgagaaataccactattcgcctgcgcagatccttccccacgacagctatctgatcaacctcgggcaccctgtcagcgaagcgctggaaaaatcgcgcgatgcgtttattgatgaaatgcagcgttgtgagcaactggggctatcgctgctcaatttccacccgggtagccatttacagcaaatcccggaagaggaatgtctggcgcgaattgcggagtcgatcaacattgcccttgagaaaacccaaggggtcacggcagtcattgaaaacactgcgggtcaggggagcaatctgggattcaggtttgagcatctcgccgccatcatcgacggcgtggacgataagtcccgcgtgggcgtctgtattgatacctgtcacgcgttcgcggccggttacgatctgcgtaccaccgacgaatgtgaaaaaacattcgccgattttgagcgtgttgtgggctttacatacctgcgtggcatgcacctgaacgacgcaaaaagcgcctttggcagccgcgttgaccgtcaccacagtttgggcgaaggcaacattggtcatgatgcatttcgctggatcatgcaggacgatcgttttgacggtattccgctgattctggaaactatcaacccggatatctgggcagaagagatcgcctggctgaaagcgcagcaaacggcaaaggtggttgcgtaa

SEQ ID NO: 72050 - DNA, 1098 bp, Citrobacter koseri
atgatgaacgacagggaaaagcagatcctcaagatcctgcgccgcaatccgctcattcagcaaaatgaaatcgctgatattttgcagatcagtcgctcacgcgtggcggcccatattatggatctgatgcgcaaagggatgatcaaaggcaaaggctatatcctcaccgagcaggagtattgcgtggtggtcggggcgatcaatatggatattcgcggcgtggcggatatccattatccgcaggcggcttccaaccctggcagcattcactgttctgctggcggcgtggggcgcaatattgcgcataatctggcgctgctgggtcgcgatgtgcatttgctctctgcggtcggtagcgatttttatggtgaaacgctgctggagcagactcgtcaggctggcgtgaacatctccagctgtatccgtctgcatgggcataacacttcaacctatctgtccatcgccaaccagcaggaagagacggtgctggcgattaacgacacccacattctgcaacagctgacgccgcagttgctgaatagctcgcgggatcttatccgtcacgctggcgtggtgctggcggactgcaacctgacgccggaagccatcgaatgggtctttaccattgcggatgaaatcccggtctttattgataccgtttcagagttcaaagcggaaaaaatcaggacctggtattcacgcattcatacgttaaaacccacgcaaaaagagctggagattctgtgggggaaagcggtgcgttccgatgccgaccgtgtacaggccgtcaatgacctgcataagcaaggcgtacagcgaatcttcgtttgcctggaagatgaagcggtcttttgtagcgagaaaaatggcgagcagtttttactcaccccgccgtctcacacccgcgtggacagcttcggcgcggatgatggctttatggccgggttgctctacagctttctggagggaagtgattttcgcgatagcgcgaatttcgcgatggcctgcgcggcgttatcgcgcgccagcatcagtattaacaaccccaccctctccgccgataacgcgctttatctgctgaaaacaaccctggcataa

SEQ ID NO: 72051 - DNA, 237 bp, Citrobacter koseri
atgcctgatggcgctgcgcttatcatgcctacggagtgcgtcactgtgggtcggatatgcctgatggcgctgcgcttatcaggcctacgggtgcgttactgtaggccggataaggcaaagccgccatccggcaaaatcgtccactacaactacgccagcccgataaagaaccccgcgatagtggcgctcatcaggttagagaacgttgccgccgccagcgcacgcattccaagctga

SEQ ID NO: 72052 - DNA, 1251 bp, Citrobacter koseri
atggatataatgagaagtgttgtgggtatggtggtactactggcaatcgcatttctgctgtcagtgaataaaaaacgtatcagcctgcgtaccgttggcgcggcgctggtgctgcaaatcgccatcggtgggatcatgctttatttcccgccggggaaatggctggtggagcaggccgcgcttggcgtccacaaggtgatgtcctacagcgacgcgggtagcgcatttatctttggctcattagtagggccaaaaatggatgtgctgtttgacggcgccgggtttatcttcgcctttcgcgtgttgcctgccatcatctttgtgactgcgctgatcagcttgctttactacattggcgtgatgggactgctgatccgtatcctcggcggtattttccagaaagcgctgaacatcagcaagatcgagtcgttcgttgcggtcactaccattttcctcgggcaaaacgagatcccggcgattgttaagccgtttatcgatcgtctcaaccgcaacgagctgtttaccgctatttgtagcggcatggcttcaatcgccggttcgatgatgatcggctatgccggaatgggggtgccgattgattatctgctggcggcgtccttaatggcgatccctggcggcattctgtttgcccgtatgctgagcccggcgacggaagaatcgaaggtgacgtttgaaaatctgtcatttaccgaaacgccgccaaaaagcatcatcgaagcggcggccagcggcgcgatgaccgggctgaaaatcgccgccggtgtggcgacggtggtgatggcgtttgtggcgattatcgcgctgattaacggcatcatcggcggcgttggcggctggttcggctttggtcacgccacgctagaagggatcttcggctgggttttagcgccgctggcctggattatgggcgtggactggagcgatgcgacgcttgccggtagcctgattgggcaaaaactggcgattaacgagtttgtcgcttatctcaatttctcaccgtatctgcaagctgccggtacgctggatgtgaagacgatagcgatcatctctttcgcgttgtgtggctttgccaactttggttcgattggtgtggtggttggcgcgttttctgcgattgcgccacatcgtgcgccggaaatcgctcagcttggaatgcgtgcgctggcggcggcaacgttctctaacctgatgagcgccactatcgcggggttctttatcgggctggcgtag

SEQ ID NO: 72053 - DNA, 936 bp, Citrobacter koseri
atgtctgaattaactctttcctctgaattattacaaatttcgccagaagtacaggacgcattaaagagtaagaaacccattgttgcgctggaatcaaccattatttcccacggcatgccttttccgcaaaatgcgcaaacggcaattgaagttgaagaaaccattcgtaagcatggcgccgtgcccgcaaccattgccattattggcggtgtaatgaaagtgggcctgaataaagaagaaattgaattattaggtcgtgaaggacataacgttacaaaagtcagtcgtcgtgacttaccgtttgtggttgccgctggaaaaaatggcgcaacgacggtcgcatccaccatgattattgccgcactggccggaattaaagtatttgcaactggcggtatcggtggcgtacatcgtggcgcagaacatacgtttgatatttctgctgacttgcaggagctggcgcataccaatgtcacggtagtttgtgcgggggcgaaatcaattctcgacctgggattaaccaccgaatatttagagacttttggcgtgccgttaattggctatcagacccaggcattaccggcatttttctgccgtaccagtccgtttgacgtcagtattcgcctggacagcgcgcaagacatcgcccgcgcaatggcggtgaaatggcaaaccggcctgaacggtggtctggttgtggcaaacccgatcccggaacagtttgcgatggcggaagagaaaatcaacgcggcgatcgatcaggccgtgaaagaagcggaagagcagggcgtcgtggggaaagaaagcacgccattcttgctggcgcgcgtggcggaactgaccggcggcgatagcctgaaatccaatatccaactggtgttcaacaacgctgtactggcctgtgaaatagcgaaggaatatcaacgcctcgcctga

SEQ ID NO: 72054 - DNA, 942 bp, Citrobacter koseri
atgcgtgaaacggaatacatagtgacgattggctcagccaatatggatgttgccgggtattcgcatgcttctttaaattatgcggactccaatccgggaaaaataaaatttacccccggcggcgtggggcgcaatattgcgcataatctggcgctgctgggaaaaaactcatggctactgacggccgtcgggagtgatttctatgggcagtcattaatggcgcaaacgaatcaatccggtgtgcacgttgataaatgtctgattgtgccgggagaaaatacgtcaagttacttatccttgctcgacaataccggagaaatgctggtcgccataaatgacatgagcattaccgactttatttcggctgaatttttatcacagcatgctgattttattcgtggggcaaaagtgattgtcgccgattgtaatatcagcgaagaggcactgaactgggtgctggaaaatgcaggcgatgtgccggtgtttgttgatccggtttctgcctggaagtgtgtcaaaattcgcgagcgacttggcaaaattcacacgctgaaacccaaccggcttgaagctgaaaccctcagcggcattcccctctccgggcgggaagatgtcgggagcgttgcggcatggtttcatgaacatggcctgaaccgtctggtgctcagtatgggtggcgacggcgtttattacagcgatatcaacggcgaaaacggctggtcgctccccattaaaaccaacgtcgtcaatgtgaccggcgctggcgacgccatgatggcgggactcgccgcctgctggatggacggcttaccctttatagattcggttcgatttgcacagggttgttcatcaatggcgcttgcctgtgaatataccaataaccctgatttatctgtcgcgaatgttacatcgttagtggagaacacagaatgtctgaattaa

SEQ ID NO: 72055 - DNA, 147 bp, Citrobacter koseri
atggggggggataaaaaaggcagaaaaatgccggatggcgacgctaatgcgttttatccggcctacaggatcggtatccgtaggccggataaggcgctcacgccgccatccggcacaaggttttacattatgccgctttcgcgataa

SEQ ID NO: 72056 - DNA, 1692 bp, Citrobacter koseri
atgaaaacgctgctgattattgacgccaatctcggccaggctcgcgcttacatggcgaagaccctgctcggcgcggcggcacataaagcaaatctggaaattatcgacaatccgaatgacgcagagttggccattgtgttggctgacgctgtgccgaacgacagcgcgctgaacggtaaaaaagtctggctgggcgatattgcccgtgccgtggcgcacccggaactgttcctcaatgaagcgaaaggacacgcgacgccatacagcgcgccgacagcggttgccgccccggcagcggccagcggcccgaaacgcgtcgtggcggtgacggcgtgtccgacaggcgtcgcgcatacctttatggcggctgaagcgattgaaaccgaagcgaaaaaacgtggctggtgggtgaaggtcgaaacccgtggctccgtgggcgcaggcaatgccatcacgccggaagaggttgcggaagcggatctggtgatcgtggcggctgatatcgaagtggatctggcgaagtttgccggaaaaccgatgtaccgcacgtcaaccggcctggcgctgaagaaaaccgcgcaggaactggacaaagccgtagcggaagcgacgccgtatgcgcctacgggcaaagcgcaggccgctgcgacagaagggaaaaaagagagcgctggcgcatatcgccatctgctgacgggcgtttcctacatgctgccaatggtggttgcaggtgggttgtgtatcgcgctctcctttgcgtttggtattgaggcgtttaaagaagaaggtacgctggctgcggcgctgatgcagatcggcggcggttccgccttcgcgctaatggtgccggtactggcgggatatatcgcgttttccatcgcggatcgtccaggcctgacgccgggtcttatcggcggtatgctggcagtgagcaccggatctggctttatcggcggtatcatcgcgggcttcctggccggttatgtcgcgaaacttatcagcactaaactgaaacttccgcagagtatggaagcgctgaaaccgatcctgatcattccactgatttccagtctgattgtcggtctggcgatgatttaccttattggtaaaccggttgccggtattctggaagggctgactcactggctgcaaacgatggggacggcgaatgcggtactgctgggcgcgatcctcggcggtatgatgtgtactgatatgggcggcccggttaacaaagcggcgtatgcgttcggtgttggtctgctgagtacccagacttatgcgccgatggcggccattatggcggcaggcatggttcctccgctggctcttgggctggcaactctggttgcgcgtcgtaagttcgacaaggcgcagcaggaagggggcaaagccgcgctggtgctggggctgtgcttcattaccgaaggcgcgatcccgtttgcggcgcgcgacccgatgcgtgtcctgccatgctgtatcgtcggcggcgcgctgacaggcgcaatctcaatgtgggttggcgcgaaactgatggcgccgcacggcggtctgtttgtgctgctgattcctggcgcgattacaccggtgctgggctatctgctggcgattgttgcgggtacgctggttgccggtctggcctatgcgttcctgaaacgcccggaagctgaagttatcgcgaaagcggcataa

SEQ ID NO: 72057 - DNA, 939 bp, Citrobacter koseri
atgagcagacgtgttgctactatcacccttaatccggcatacgacctggtcggtttctgcccggagattgaacgcggcgaagtgaacctggtgaaaaccacgggtctgcatgcggcgggtaaaggcatcaacgttgccagggttctgaaagatttaggtattgatgtcacggttggcggtttcctgggtaaagacaaccaggacggtttccagcagttgttcagcgagctgggcattgccaaccgttttcaggtggtgcaggggcgcacccgcatcaacgttaagctgacggaaaaagacggtgaagtgaccgactttaacttctccggttttgacgtgactccggctgactgggaacgttttgtgaacgattcgctgagctggctgggtcagttcgatatggtctgcgtcagcggcagcttgccgacaggcgtcagcccggaagcgtttaccgactggatgacgcgtctgcgtagccagtgcccatgcattatctttgatagtagtcgtgaagcgttggtggcgggtctgaaagcggcgccgtggctggtgaaaccgaaccgtcgtgaattagaaatctgggcaggccgtaagctgccggaaatgaaagatgtgatcgacgcggcgcacgccctgcgtgagcaaggtattgcgcatgtggtgatctctctcggtgcggaaggggcgctgtgggtgaacgcatccggcgaatggatcgcgaagccaccgtccgttgatgtggtgagtaccgtaggtgcaggggattctatggttggcggtctgatttacggcctgctgatgcgtgaatccagtgaacatacgttgcgtctggcgacagccgttgccgcgcttgcggtaagccagagcaatgtgggcattaccgatcgtcctcagttggccgcaatgatggcgcgcgtcgacttaaaaccgtttaactga

SEQ ID NO: 72058 - DNA, 1131 bp, Citrobacter koseri
atgttccagttatcggttcaggacattcatccgggcgaacaggccggaaacaaagaagaggccattcgccaggttgccgctgcgttagtgcaggcgggcaacgtcgcagacggctacgtcgacggcatgctggcgcgtgagcaacagacatccactttccttggcaacggtatcgccattccgcacggaacgaccgacacgcgcgatcaggtgctgaaaaccggcgtgcaggtgttccagtttccgcagggtgtaacctggggcgaagggcaggtggcctatgtggcgattggtattgccgccagctccgatgagcatctcgggttgctgcgtcagctgacgcacgtattaagcgatgactctgtggctgaacagctgaaatccgccacgacggcagaagaactgcgcgcgttgctgatgggtgaaaagcagagcgaacagttgaagctggataacgacaccctgacgctgggtgtgacggccagcgacctggtgacgctacaggcgctgaacgccgcgcgcctgaaagaagcaggcgctgtggatgccgcgtttgtcgccagaaccatcaatgaacagccgatgaatctcggccagggcatctggctgaacgacagcgcggacggcaacctgcgcagcgctatcgctgtgagccgtgcggccacggcgtttgacgtagagggcgaagcggctgcgctgctggtgaccgtcgcgatgaatgacgatcagcccgtcgccgtgctgaagcgccttggcgatctgctgctgaacaataaagctgaccgtttgctgaaagcggatgccgccaccgtgctggcgctgctgaccagtgatgaagcattgactgacgacgtgctgagcgccgaatttgtcgtgcgcaatgagcatggcttacacgcccgtccgggcaccatgctggtgaataccattaaacaatttaatagcgaaattaccgtggcaaaccttgatggaaccggaaaaccggcaaatggacgcagtttgatgaaagtggtggcgttgggcgtgaagaaaggccatcgcctgcgctttacggcgcagggcgaagatgctgaacaggcgctgaaagcgattggcgacgccattgccgctggtcttggggagggcgcgtaa

SEQ ID NO: 72059 - DNA, 1182 bp, Citrobacter koseri
atgcataacacccccgttgccgccacaccaaaaacgtttgatttgacgtcttcggcattcctgctcgtcgcatttctgacgggtatcgccggtgcgttacagacgccgacgctcagtctttttctgacggatgaggtacacgctcgtccggggatggttggcttcttttttaccggcagcgccgttatcggcattctggtgagccagtttctggccgggcgctccgacaaaaaaggcgatcgcaaaagcctgatcgttttttgctgtgtgctgggcatgttggcctgcgtgctgtttgcctggaaccgcaactattttattttgctgttcgtcggcgttttcctgagtagttttggttcgaccgcgaacccgcaaatgttcgcccttgcccgcgaacatgccgatcgcaccggtcgcgaagccgtgatgttcagctcgatattgcgcgcccaggtttcgctggcgtgggtgattgggccgccgctggcctatgcgctggcgatggggttcagctttaccgtgatgtacctgagcgcggcggcggcgtttgtcgtctgtggcgtaatggtctggctgtttttaccgtcaatgcgtaaagatgcgccgcttgctgccggaacccttgaagcgccgcgccgtaatcgccgcgatacgctgctgctctttgttatctgcacattaatgtggggaaccaacagcctctatatcattaatatgccgctgtttatcattaacgaactgcatctgccggaaaaacttgccggcgtcatgatggggactgccgccgggctggaaattcccaccatgttgattgcaggctattttgctaaacgtctggggaaacgcctgctgatgcggatcgccatcgtggcggggttctgcttttacgcgggtatgctgctggcgcactcgcctgtcgttctgctcggcttgcagttgctgaacgcaatttacatcggcattctcggcggcatcgggatgctctattttcaggatctgatgcccggccaggcgggttcagcaactacgctgtataccaataccatccgcgtaggctggattatcgccggatcgctggcggggattgcggcggaaatctggaattaccacgccgtattctggtttgcgctggtgatggccctcgcaacgatggtttgtctggcacgcattaaagacgtttaa

SEQ ID NO: 72060 - DNA, 255 bp, Citrobacter koseri
atggaatgccgcccggattgcggagcatgttgcaccgcgccttcaatctccagccccattccgggtatgcctgacggtaaacccgcaaacacgccgtgcgtccagcttgatgaacatcaacgctgtaagatcttcggttcgccgctgcgtccaaaggtctgcgcaggcctgcaacccagcgccgatatgtgcggtcagacaagggggcaggcaatgatctacctcattgaactggaaacgctcacggcgccttaa

SEQ ID NO: 72061 - DNA, 573 bp, Citrobacter koseri
atgccaagagcgaacgaaattaaaaaaggtatggtactgaactacaacggcaagctgctgattgtaaaagatattgatattcagtcaccgaccgcccgcggtgccgcgacgctgtacaaaatgcgtttttccgacgtccgtacgggtctgaaagtcgaagagcgtttcaaaggcgacgacatcgttgataccgtcaccctgagccgccgtggcgtcgatttctcttatatcgacggcaacgaatatgtgttcatggataaagaagactataccccgtataccttcaccaaagatcagattgaagaagagttgctgtttattcctgaaggcggaatgccggatatgcaggtgctgacctgggacggtcagttactggcgctcgaactgccgcagacggttgatctggaaatcgtggaaaccgcaccgggcattaaaggcgcgtcagccagcgcccgcaacaaacccgcaacgctgagcaccggtctggtgattcaggtgccggaatacctgagcgccggtgaaaaaatccgtattcacattgaagaacgccgctacatgggccgcgcggactaa

SEQ ID NO: 72062 - DNA, 1191 bp, Citrobacter koseri
atggaacaaacctggcgttggtacgggcctaacgatccggtatcgcttgatgatgtgcgtcaggctggcgcaacgggggttgtgacggcattgcaccacattccgaacggtgatgtgtggccggttgaagagattaaaaagcgccaggccattctggctgagaaagggctgacctggtctgttgtcgaaagtattccggtgcatgaagagattaaaacacgctccgggcagtaccagacctggattgcaaactatcagcaaagcatccgtaatctggccgcctgcggtattgataccgtgtgctacaactttatgccgattctcgactggacgcgtaccgaccttgaatatccgttgcccgatggttccagagcgctgcgtttcgatcagattgcctttgcggctttcgaactgcacatcctgaagcgtgacggcgcgcaagcggactacagcgaagaagaacagcgccaggcgctggactacttcaacgccatgagcgctgcggatatcgaaaaactgacccggaatattatcgccgggctgcctggcgctgaagagggttatacgctggatcagttccgtgcgcgtctggcggaatataacggtatcagcaaagaggatttacgcgaaaatatggcggtattcctgcgtgcgattgtgccggtggcagaagaagtcggcgtgcgcctggcggtgcatcctgacgatccgccgcgccccatcctcggcctgccgcgcatcgtttctaccattgaagatatgcagtggctgaaagaaaccgtagacagcattaacaacgggttcaccatgtgtaccggttcgtacggcgtacgcgcggataacgacctggtgaaaatgatcgagacgtttggcgaccgcattcactttacccatttacgctcaacctgccgtgaagataacccgaaaaccttccacgaaggcgcgcatttgcaaggggatgtcgatatggtcgcggtgattaccgcaattcttacggaagaacagcgtcgtaagctggcaggcgatctgcgtccgatcccaatgcgcccggatcacggtcatcagatgcttgacgatctgcataagaaaaccaaccccggctactccgctattggtcgtctgaaagggctggcggaaattcgtggcgttgaactggcgctgaaaaagacccagttccgcgatttgctgtaa

SEQ ID NO: 72063 - DNA, 1467 bp, Citrobacter koseri
atgaagactattgcctctgccccactcccggaaggcgtactgacgccccgctacgatcgacaacaactacaaacccggattgtgcacttcggttttggcgcgtttcaccgcgcccatcaggcattattgaccgacagagtgctgaatgcgcaaggcggagactgggggatctgcgagatcagcctgttcagcggcgatcgcctgatgagccagcttcgcgagcagaatcacttgtacaccgtgctggaaaaaggcgcgaacggcaatcaggcgattatcgtcggcgcggtcaaggagtgtctgaacgcaaagctggattcgcttgccgctattatcgaaaagttttgcgagccgcaggtggcgatagtgtcactcactatcaccgaaaaaggatattgcatcgatccggcaaccggttcgctcgacgtgtcaaacccgcgcattattcacgatatgcaacaccccacggagccgcactcggcgccggggattcttgtggaggccctgcatcgtcggcgtgagcgcgggttgtcgcctttcacggttctctcctgcgataacatcccggataacggccatgtggttaaaaacgccgttctgggcatggcggaaaaacgcgcggcggagctggcggcgtggattcagcagcacgtcagcttcccgggaacgatggtagacagaatcgtgcctgccgccacagaggagtcgctggacgaaattacccgcgagctgggcgtcgccgatccctgcgccatcagttgtgaaccgtttatacagtgggtcattgaagataactttgtggcaggccgcccgcagtgggaagtcgctggcgtgcagatggttgatgacgtgctgccctgggagcaaatgaaactacgcatgctcaacggcagccattcgttccttgcatatctcggctatctggccgggttccagcacatcagcgattgtatgcaggacagcgcgtttcgcgaggccgcttaccgcctgatgatgaatgaacaggcgccgacattgcgcatcaccaacgtcgatttatcccgctatgccgccagcctgattgaacgcttcgccaatccggcgctgaagcaccggacctggcaaatcgcgatggacggcagccagaaattaccgcagcggatgctggaaggcattcgcgaacatctggcgcgtgggagtgactggccgctgctggcgctgggcgtcgcaggctggatgcgctacgtcagcggcgtggacgacgcaggtgcaacgattgatattcgggacccgctcagcgaaaaaattcgcctgcttgttgaaagcagcagtgacgcggagcgggttagcgcgctgctgtcgttgcaggaggttttcggcacggatctcgtgaaaaatcccctgtttgtgcaggccattgagcaagcctggcggcgcattgcgcaacatggcgcgcatcaggcggtcattgatacgttaaaaaattaa

SEQ ID NO: 72064 - DNA, 987 bp, Citrobacter koseri
gtgaccaaaaccaacctcattaccggctttctcggcagtggaaaaacaacctctattcttcatctgttagccaacaaagatcctgcggaaaaatgggccgtgctggtcaacgaatttggcgaagtgggcattgacggcgcactgcttgcggacagcggcgcattgctgaaagagatccccggtggttgcatgtgttgcgtgaacggattaccaatgcaggtggggctaaataccctgctgcgccagggcaagccggatcgcttgctgatcgaaccgacaggacttggccatccgaaacagatcctcgatttgttaaccgcgccggtttacgagccgtggatcgacctgcgcgccacgctgtgcatccttgatccgcgtttactgctggatgaaaagagcgtcgccaacgaaaacttccgcgaccagctggccgccgccgatgtcatcgtcgcgaataaaaccgatcgcgctacgccggaaagcaaaagcgccctgcaaacctggtggcaacagtacggcgacaatcgtcaactggttcatgccgaccacgggcaaatcaacggacagctgctggatttaccgcgccagaacctgtcggaactgcccgccagcgccgcccacgcgcaccagcatgccgaaaggaaagggctcgccgcgcttagcctgccagcgcaacagcgctggcgtcgtagcctgaacagcggccaggggcatcaggcctgcggctggatttttgatgcggataccgtgttcgacaccatcggcctgctcgaatgggcgcgcctcgcgccggttggacgagtgaaaggcgttatgcgcattaaggagggtctggtgcgtattaatcgtcagggcgacgatcttcatattgagacccaaaacgtcgcgccgccggacagccgcatcgaactcatctcagaccgtgaaacagactggaacacattacagaccgcattgttgaagcttcgtttagccgaggacgcgtaa

SEQ ID NO: 72065 - DNA, 714 bp, Citrobacter koseri
atgaaaacccggtatcccctcatactgctgattaacgctgcgggtctggcgttgtttttgtcgtggtatattccagtcaatcacggattctggtctcctctcgacgcaaacattttccacttctttaaccagaagctggttgaaagccgcgcatttctctggctggtggcgatcaccaataaccgggcgtttgatggttgcgcgctgctggcgatgggctgcctgatgctgagtttctggttaaaagagaccccggcgggccgtcggcgtattatcatcatcggcctggtgatgcttttatctgcggttgtggtgaatcagttaggtcaggcgtttattccggtcaaacgcgccagccctacgctgacgcttgaaaatattcaccgcgtcagcgatctcctgcatattccaaccaaagatgcgtcaaaagacagtttccctggcgatcacggaatgatgctgcttattttttccgcatttatgctgcgttatttcggaaaagtcgcaggtttcatcgcccttattatatttgtggtttttgcctttccgcgcgtaatgatcggcgcccactggttcacggatattgcggtcggttcgctgacaacggtgctgattggattgccctggctgttaatgacgtcgttcagcgatcgcgtgatacggtttttcgataattatctgcccggtaaaaacaaacaaaatttaaacaaataa

SEQ ID NO: 72066 - DNA, 570 bp, Citrobacter koseri
atggtcaggtctcaaccgattttgagatatatcctgcggggaattcccgcgattgcagtggcggttctgctttctgcatgtagcactacaaataccgcaaagaacgtgcattctgagacgcatgctgtgggcaatggagataactcttcactgcaagcctctcaggatgaatttgaaaatatggtgcgtaacctcgatgttaaatcgcggattatggatcagtatgctgactggaaaggcgtgcgttaccgccttggcggcagcaccaaaaaaggtgtcgattgttccagctttgtacagcgtacattccgtgaacaatttggtttagaactgcctcgctcaacctatgagcagcaggaaatgggcaaatccgtttcgcgcaataacctgcgcacgggcgatctggttctgttccgcgccggttcgacgggccgtcatgtaggcatctacatcggcaacaaccagtttgttcatgcgtctaccagtagcggcgttattatttccagcatgaacgagccttactggaaaaaacgttacaacgaagggcgtcgggttctgagccgcagttaa

SEQ ID NO: 72067 - DNA, 1557 bp, Citrobacter koseri
atgttcacacgcgcctcctcgtcctcgcgaaaaatcctgctcacctgcattctcacaggggtcatcgtcgcgttacttatcagtagcctgcaatttttaatgtcatggcataaacgtgaagtcaaatacgacacgctgatatccgacgtacaacattatctggtgagctacttcgccgaccttaaagccacgacggatgtgttacagcccctgacgcttaatgactgccagcaagtctcttccgagctgacctcccgcgccgcttttagcctgaatgtgcgcgcctttttgctcgtcaaagacaaaatcgccttctgctcgtcggcgaccgggccgatggacacgccgcttaccgacctggtatccaatatcgacatccgcaaagagattgatatggcgatacttcccggcacgccgatgatgccggataaaccggcgatggcgatttggtatcgcaacccgttattaaaagagagcggcgtatttacctcactgaatatcaacctgacgccctaccttatttacaccgcccgacaggaagattttgatggcatcgcattaattattggcgataccgtgctctcgacgttttcttcgcatttaatgaccgtgaaagagctgtcgggcacgccttcgcgccaggcgacaataaaagggctgccgctgaagatacagttatacgccgacagctggacctataacgacgtgggctatgccctgctgctgggcagtatgagcggtatcatcgccgccctgctctgctactacatcagctctatccgcctgaagccggggcgagagatcctggtggctatcaagcgcgaacaattttatgtggtctatcaaccggtcgttgatacccaaacgctcagggtcacgggtctggaagtgctgttacgctggcgtcaccctacggcaggcgaaatcccgcctgacgcgtttattcattacgcagaagcccagcagcttattgtgccgctcacccagcatctgtttaaactcgtggcgcgcgacgcccccgcgttgcagaaggtactgcctgtcggggcaaagtttggcatcaatatcgcgcctgaccacctgcacagcaacagctttaaagaggacatccgtctcctggcggaatccttaccgccgcatcattttcagatcgtactggaaattaccgaacgcgatatgctcaatcagcatgaagcggctaaattatttgagtggctgcactgcgctggattcgaaatcgcaattgatgattttggcaccggccatagcgccctcatctatctggaacgctttacgctggactacctgaaaatcgaccggggctttattaatgcgattggtacggaaaccgtgacctctccagttctggatgcggttttgatgctctctaagcgcctgcatatgctgaccgttgcggaaggagtggaaaccccggagcaggcccgatggctacgcgatcatggcgtcaacttcctccaggggtactggattagccgccctttagcgcttgaggacttcgttcactggatgaatacccggcccgcgccaaaatggtga

SEQ ID NO: 72068 - DNA, 1815 bp, Citrobacter koseri
atgattgctcgcgtaatgcttctgtttgtcgccctggccagctttggcgtacaggctcaggccatcaaagaaagttacgccttttccgtgcttggcgaacccaaatacgccttcaattttaatcatttcgattatgtcaatccggcggcgccaaaaggggggcggataacgctttccgcgaccgggacattcgataatttcaaccgctattccatgcgcggtaatcctggcgcacgtaccgagcagctttacgacacgctttttaccacctctgacgatgaacccggcagctactacccgctcattgccgacaacgcgcgatatgcggaggattactcctgggtggaagtgaccatcaacccacgcgcccgttttcatgatggttcgcccatcactgcccgcgacgtcgccttcaccttccataaatttatgaccgagggcgtgccgcagtttcgtctggtgtacaaaggcacgaccgtcaaagccatcgctccgcttaccgtccgcattgaattagccaaacccggtaaagaggatatgctcagcctgttttctttaccggtcatgccggaaaaattctggaaggatcataagctcagcgacccgctctctaagcctcctcttgccagcggcccgtaccgcataacccagtggaaaatgggccagtacattgtctattcccggataaaaaactattgggctgctaacctgccggtaaaccgggggcgctggaactttgatactatccgctacgactactaccttgatgacaacgtcgcgtttgaagcctttaaggccggggcgtttgatctgcgtctggagaatgacgcgaaaaactgggcgacgcgctacaccggtaaaaacttcgataaccattacatcgttaaagacgaacagaaaaatgaatccgcacaggatacgcgctggctggcctttaatattcagcgtccggtatttaacgatcgtcgcgtgcgtgaagcgataaccctggcatttgatttcgaatggatgaacaaagcattgttttataatgcctggagccgggcaaacagctatttccagaataccgagtatgccgccagaaactaccccagtgcagacgaactggtcttactcgcgcccatgaaaaaggatctgccgccggaggtctttacccggatttatcagccgccagtctcaaacggcgatggctacgatcgggaaaacctgctgaaggccgataaattactcacagaggcgggatgggtactgaaaggccagcgacgcattaacagcgcgaccggcaaaacgctgagctttgaactgctgcttccggcaggcggcaacagccagtgggttcttcccttccagcataatttgcagcgtcttggcatcacgatgaacatccgccaggttgataactcgcaaatcaccaaccgcatgcgcagtcgcgactacgacatgatgccgcgactgtggcgcgccatgccgtggcccagctccgatctacaaatatcctgggcgtctgaatacattgactccagctataacgcgccaggcgtgcaaagctcggtcattgataaactgattgcccaaatcattgccgcccaaggcgataaaacgaagctggttcccctcgggcgggcgctggatcgggtattgacctggaattactacatgctgccaatgtggtatatggcggaagacaggctcgcctggtgggataaattttcccatccggccatccggccgatctacaccattgggctggatacctggtggtatgacgtcaacaaagcggcaaaacttcccgccgccagacgacagggagaataa

SEQ ID NO: 72069 - DNA, 1095 bp, Citrobacter koseri
atgggcgcctacctgattcgacgtctgttactggtgatcccgacgctgtgggccatcattacaatcaacttttttattgtccagatcgcaccgggcggcccggttgaccaggcgatcgcggccattgaattcggccagtctggcgccctgcccggcgccggtagcgaaggcgttcgcgccagccacgcccagaccggcgtagggaatattagcgacagccactatcgcggcggacgtgggttagatcccgaggtgatcgcggagatcacgcatcgctacggctttgataagcctgttcatgagcgctactttaaaatgctctgggactatgttcgtttcgatttcggcgacagcctgtttcgcagcgcatccgtactgacgttaatcaaagacagtctgcccgtgtccattacgctcggattgtggagtacgctcatcatttatctggtgtcgatcccgctgggcatccgcaaagcggtatataacggcagccgtttcgacatctggagcagcgcttttatcatcgttggctacgctatccccgccttcctgttcgccatcttattgatcgttttctttgctggcggtagctattacgacctcttcccgctgcgcggcctggtatccgccaattttgattccctgccctggtatcagaaaattaccgactacctctggcatatcacgttaccggtactggcgacggtgatcggcgggttcgccgcgctgaccatgttgaccaaaaactcttttctggatgaagtccgcaaacagtacgttgtcaccgcgcgcgcaaaaggggtgagcgaaaaaaacattctgtggaagcacgttttccgcaacgccatgctgctggtgatcgccggttttccggccacctttatcagcatgtttttcaccggttcgctgctcattgaagtgatgttttccttaaacgggctggggttgctgggctacgaagcgaccgtgtcacgcgactacccggtaatgtttggcacgttatacattttcaccctgatcggcttgctgctgaatatcctgagcgatatcagctatacgctggttgatccacgcattgattttgagggacgctga

SEQ ID NO: 72070 - DNA, 1026 bp, Citrobacter koseri
atgccgcgattaagccctgcaaaccaggcccgctgggcgcgttttcgtcataatcgccgggggtactggtcactgtggattttcctggtgctgtttggcctgagtctgtgcgccgaactggtcgccaacgataaaccgctgctggtacgctatgagggaagctggtactttccgctggtcaaaaactacagcgaaagcgatttcggcgggccgttcgcaacgcaggcggattatcaggacccctggctgcaaaagcagcttgaaaaccacggatgggtgctgtgggcgcccgtgcgttttggcgccaccagcatcaactttgccactgataaacccttcccctctccgccatccacacaaaactggctgggaaccgacgcgaatggcggcgacgtgctggcgcgcatcctctacggcacgcgaatctctatcctgtttggtttgatgcttaccctctgttccagcgtaatgggcgtgctggcaggcgcgttgcaggggtattacggcggaaaaatcgacctgtgggggcaacggttcatcgaagtgtggtcaggaatgccgacgctgtttctgattattctgctctcaagcgtagtgcaacccaatttctggtggctgctggctattaccgtcctgtttggctggatgagcctggtcggggtggttcgcgcggaattcctgcgcacgcgcaatttcgactacatccgcgccgcacaggcgctgggcgtcagcgatcgcagcattatcctgcgtcacatgctgcccaacgcgatggtcgccacgctgacctttttaccgttcattttgtgcagctcgattaccacattgacgtcgctggattttctcggatttggcctgccgctcggctccccttccctcggcgaattactcctgcaaggtaaaaataatttgcaggcgccgtggcttgggatcaccgcgttcctgtccgtcgcggtgttattgtcgctgctgatttttattggcgaagcagtacgcgacgcgtttgatcccaacaaggcggtataa

SEQ ID NO: 72071 - DNA, 1590 bp, Citrobacter koseri
atgacgcatcctctgttaactattgagaatttatcggtaggttttcgccatcaggagaacgtgcgcacggttgttaacgacatctctctacaggttgacgcaggcgaaacgctggcgctggtgggcgaatccggctccggtaaaagcgtcaccgcgctgtcgattctgcggttgctgccctctccacctgcggtgtatctcgcgggcgatatccgttttcatggcgagtcattgctccacgccagcgagcagacgctgcgcggcgtgcggggcaataaaatcgccatgatttttcaggaaccgatggtatcgctaaacccgttgcatacgctggaaaaacagctctacgaagtgctgtccctgcaccggggaatgcgccgtgaggccgccagggccgaaatcctgagctgcctggatcgcgtagggattcgtcaggccgcgaaacggctgagcgattatccccatcagctctcaggcggcgaacgccagcgcgtgatgatcgcaatggcgttgctcacgcatcctgaactgttaatcgccgatgaacccacgaccgctctggatgtctccgtacaggcgcaaatcctgcaactgctgcgtgaactgcaacgcgaactgaatatgggtatgctgtttatcacccataatctcagcattgtgaaaaaactggcggacgccgtggcggtgatgcaaaacggacgatgcgtggagcaaaaccgtgcgttgccgttgcttagcgcgcctgagcatccctatacgcagaagttgctgaacagcgaacccaccggctccccggttccattgcccggtgagtcgtcgccgctgctggaagtgagccagcttcgcgtcgcattcccgattcgaaaaggggttctgaaacgcgtggtggatcataacgtcgtggttaacgaggtgagtttcgcgcttcgacccggtgaaacgctggggctggtcggtgaatccgggtcaggaaaaagcaccaccggtctggccttactgcggttgattcgctcgcagggcagcatcacttttgacggccagccgttgcaaaatttaacccgccgtcagttgctgccggttcgtcaccgtattcaggtggtatttcaggacccgaactcatcgctgaacccccgcctcaacgtattgcaaattattgaagaaggcttacgcgttcatcaaccggccctttccgccgggcagcgcgaagaacaggttatcgccgtcatgaaggaagtgggtctggatgctgagacgcgccatcgttacccggcggaattttccggcggccagcgccagcgtatcgctatcgccagggcgctaatactgaaaccgtcgctgattattctggatgaaccgacatcatcgctggacagaacggttcaggcacaaatcctggcgctgctgaaatctttacaacaaaagcatcgcctggcttacattttcatcagccacgatctgcatgttgtgcgcgcattatgccatcaggtcattgtactgcgacaaggagaagtggtggaacaggggcaatgtgagcgtgtctttaccgcaccgcaacaggagtatacgcgtcagttgctcgcgctaagctga

SEQ ID NO: 72072 - DNA, 366 bp, Citrobacter koseri
atgtgcttccggggaaagaaagtgactacattacaactctcaatcattcatcgtttaccgcagaactatcggtggtcaacgggttttgcaggttcaaaagttgaaccgattccgcaaaacgggcagaacacagaaaacagtctggtggcgctcaaactcctgagccccgatggcgacagcgcatggccggtgatgcatacacttagccaggcgcttagcgacatcgaagtgccttgctccgttctggagtgcgaaggcgagccgtgcctgtttgttaatcgtcaggacgaatttgccgcgacctgccgcctgaaaaatttcggcgtagcgatagcggaacccttttcgaacaacaatcctttttga

SEQ ID NO: 72073 - DNA, 1134 bp, Citrobacter koseri
atgctgatgccgctgtcgattgatatgtatcttccggcgctgccggtgatttctgcccagtttggcgtaccggcgggcagcgcgcagatgaccctcagcacctatattctggggttcgccgtggggcagcttatttacggcccgatggcggatagtctcgggcgcaagccggttatcctcggcgggacgctggtgtttgcggcggcggcggtggcatgcgcgctggcgcagactatcgaccagctgatcatcatgcgtttcttccacggtcttgccgccgctgcggcgagcgtggtgatcaatgccctgatgcgcgatatctacccgaaagaagagttctcccgcatgatgtcattcgtcatgctggtgacgacaatcgcgccgctgatggcgccgattattggtgggtgggttctggtgtggttgagctggcattacatcttctggattctggcggtggcggcgattctggcatcggtgatgatcttcttgttgattaacgagacgcttcccgttgaacgccgtcagccgttccatattcgtaccacgatagggaactttgcctcgctgttccgacacaaacgcgtactgagctatatgctggccagcggatttagctttgcgggaatgttctcgtttctcagcgccggcccgtttgtgtatatcgagattaaccatgtgtcgccgcagcattttggctattactttgcgctgaacattgtgttcttgtttgtgatgaccattatcaacagccgcttcgtgcgccgggttggggcgttgaatatgttccgtaccgggttatggattcagtttgtgatggcggcctggatggtattcagcgcgctgtttggcgtgggcttttgggcgctggtggttggcgtcgcggcgtttgtcggatgcgtttctatggtctcttcaaacgcgatggccgttattctggatgaatttccgcatatggcgggcaccgcctcgtcgctggccggtacgttccggtttggcattggcgcgattgtcggggcgctgctgtcgctggcaacctttacctccgcctggccgatgatttggtcgattgctttctgcgcaacctgctccattctcttctatctctacgccagccgtccgaaaaaacggtga

SEQ ID NO: 72074 - DNA, 738 bp, Citrobacter koseri
atgcccgatttccgtattattacaggcaaaatcaaactcatgcgacttgataaatttatcgctcagcaactcggcgtcagccgtgctattgccgggcgtgagattcgtagtaaccgtattaccgtcgatggcgaaatcatccgaaacgcggcgtttaaactcctgccagaacataatgtcgagtacgatggcaacacgctggttcagcaaaatggcccgcgctactttatgcttaataagcctcagggctatgtctgttcaacggacgacccggatcatcccacggtactctatttccttgatgaacctgttgcgtacaagctgcatgccgccgggcggctggatatcgacaccacgggactggtgttgatgacggatgatggccagtggtcgcaccggatcacctctccgcgccatcattgtgagaaaacctatctggtcacgctggaatcgccggtagctgcggataccgccgaacagtttgccaaaggcgtgcaactgcataatgagaaagatctcaccaaaccggccgtgctggaggtgatcaccccgacgcaggtgcgtctgactattagcgaagggcgctaccaccaggtgaagcggatgttcgccgccgtggggaaccatgttgtcgaactgcaccgcgaacgcatcggcgcaattgtgctggatgacgacctcgaacctggcgagtatcgcccgttgaccgaagaagaaatcgccagcgtcggtttatag

SEQ ID NO: 72075 - DNA, 1761 bp, Citrobacter koseri
atgatttttacacttcgcccttaccagcaagaagccgtggatgccacgctcaaccattttcgccgccaccgcacgcctgccgtgattgtcctgccaaccggcgcaggcaaaagtctggtgattgccgagctggcgcgagtggcgcgtgggcgcgtgctggtgctggcgcacgtaaaagagctggtcgcgcaaaaccatgccaaatattgcgcgctggggctggaggccgacattttcgccgccggtctgaagcgtaaagagagccacggcaaggtggtgtttggcagcgtgcagtcggtcgcccgtaaccttgacgccttccagggcgagttttcgctgttgattgtcgatgaatgtcaccgcatcggcgacgatgaagagagtcagtatcagcaaatcctggcgcacctgagtaaagtgaatccccacttacgtctgctcggcctgacggccacccctttccggttaggcaaaggctggatttatcatttccattaccacggcatagtgcgcggcgacgaaaaagcgctctttcgcgactgcatttatgagttaccgctgcgctacatgattaaacatggttatctgacgccgccggagcgtctggatatgcccgtggtgcagtatgattttagccgcttgcaggcacagagtaacggcctgttcagcgaagctgacctcaatcgcgagctgaaaaagcagcagcgcgtgaccccgcacatcatcagccagattgttgaatttgcccaaacccgcaaaggggtgatgattttcgccgccaccgtcgaacatgccaaagagattgtgggtttgctgcccgccgatgatgcggcgctgattaccggggacacgccgggcgcagagcgcgacgtgatgattaacgatttcaaagcccagcgctttcgttacctggtgaacgtcgccgtgctgacgaccgggtttgacgcgccgcatgtcgatcttatcgctatcctgcgcccgacagagtctgtcagtctttaccaacaaatcgtggggcgtggtctgcggcttgcgcctggaaaaactgactgtctgatcctcgactatgccggaaacccgcacgatctgtatgcgccggaagtgggcacgccaaaaggcaaaagtgacaacgttcccgtgcaggtgttctgccctgcctgcgggttcgccaataccttctgggggaaaaccaccgctgacggcacgctgattgagcatttcggtcgccgctgccagggctggtttgaagatgatgacgggcatcgcgaacagtgcgattttcgcttccgctttaaaaactgcccgcagtgcaacgcggaaaacgatatcgccgcccggcgctgccgggagtgcgacacgattctggtcgacccggacgatatgctgaaagcggcgctaaaactcaaagatgcgctggtattgcgctgtagcgggatggcgttacaacacgggcatgatgagaaaggcgaatggctgaaaatcacctactacgatgaggacggcgccgatgtgagtgagcgcttccgattgcagacgcccgctcaacgcaccgcctttgaacagttgtttattcgcccgcatacccgcacgccgggtattccgttacgctggattactgcggcggatatcctggcgcaacaggcgctgcttcgccaccctgattttgtcgtcgcccgcatgaaaggtcagtactggcaggtgcgcgaaaaagtcttcgattatgaaggccgcttccggcgggcacatgaattgcgcggttaa

SEQ ID NO: 72076 - DNA, 285 bp, Citrobacter koseri
atgtttactatcaacgcagaagtacgtaaagagcagggtaagggtgcgagccgccgcctgcgcgccgctaacaagttcccggcaatcatctacggtggcgctgaagccccgattgctatcgaactggaccacgaccaggttatgaacatgcaagctaaagctgagttctacagcgaagttctgaccatcgttgttgacggtaaagaagtaaaagttaaagctcaggctgtacagcgtcacgcgttcaagccgaagctgactcacatcgacttcgttcgcgcgtaa

SEQ ID NO: 72077 - DNA, 1008 bp, Citrobacter koseri
atgagtctggatatcaaccagattgccctgcaccagcttatcaaacgtgatgagcaaaatcttgagctggtcttgcgcgattcattactggagccgacaaccaccgttgtcgatatggtggctgaactgcaccgggtctatagcgccaagaacaaagcgtacggcctgttcagcgaagagagtgaactggcgcaaacgctgcggttgcagcgtcagggcgaggaggattttcttgcctttagccgtgcggcgaccggccgtttacgcgacgaactggcgaaatacccgtttgcggacggcggtattgtcctgttctgccattaccgttatctggcggtggagtatctgctggtggcggtgctgaacaacttaagcagcatgcgcgtgaatgagaacctggatatcaacccgacgcactatctggatattaaccatgcggatattgtggcgcgtatcgatttgaccgaatgggaaacgaacccggaatccacccgttatctgaccttcctgaaaggccgggtagggcgcaaagtggccgatttctttatggatttcctgggcgccagcgaagggctgaacgcgaaagcgcaaaaccgggggctgttgcaagcggtggacgatttcaccgcagaagcgcagctggacaaagctgaacgtcagaatgtccgtcagcaggtgtacagctactgcaatgagcaattgcagtctggtgaagagattgagcttgaatcgctgtcgaaagagttatccggcgtcagcgaagtcagcttcagagaatttaccgctgacaaaggctatgagctggaagagagtttcccggcggaccgcagcacgctgcgtcagctgacgaaatatgccgggagcggcggtgggttaaccatcaacttcgacgccatgctgttaggtgagcggattttctgggacccggcgaccgatacgctgacgatcaagggaacgccgccaaacctgcgcgatcagctccagcgtcggacgtccggcggtaattaa

SEQ ID NO: 72078 - DNA, 228 bp, Citrobacter koseri
atgccacaacactcccgctatagtgacgaacacgttgaacaattactgagtgacctgctcaacgtactggaaaaacataaggcaccgaccgacctttccctgatggtgctgggaaatatggtcaccaaccttatcaacaccagcatcgcaccggctcaacgccaggcgattgcgaactcttttgcccgcgcattacagtcttcaattaacgacgacaaagcgcattaa

SEQ ID NO: 72079 - DNA, 1761 bp, Citrobacter koseri
atggtaactcatcgtcagcgctaccgtgaaaaagtctcccagatggttagctgggggcactggtttgcactgttcaacattctgctggccatggtgctcggtagccgttacctgtttgtcgcagactggccgacaacgcttgcagggcgtatttactcgtacctgagcattgtcgggcacttcagctttctggtgttcgccgcctacctgctgatcctgtttcctctgacatttattgtcatgtcccagcggctgatgcgttttttgtcagctatcctggcaacggcgggtatgacgctgttgctgatcgacagcgaagtttttacccgcttccacctgcacctgaatcccattgtctgggaactggtcattaaccccgaccagaacgagatggcgcgcgactggcagctgatgtttattagcgtgccggtcatcctgttaatcgaaatgctgtttgcgacctggagctggcaaaagctgcgcagcctgacgcgacgtcgccatttcgccaaaccgcttgccgcgttctttttcgtctcatttatcgcttcgcatgtggtgtatatctgggcagacgccaacttctatcgcccaatcaccatgcagcgcgcgaatttaccgctgtcatacccgatgacggcgcgccgttttctggaaaaacacggtctgctggatgcgcaggagtatcagcgccgtctggtggaacaaggcaacccggaagccgtttccgttcagtatccgctgagcgatttgcagtatcgcgacatgggcaccggccagaacgtactgttaattacggtcgacgcgctgaattactcccgctatgaaaaacagatgcccgcgttggccgcattcgccgaacagaatacgtcgttcacgcgccacatgagttcaggcaacacgtctgacaatggaatatttggtctgttctatggcgtatcgcccagctatatggacggtattctgtcaaccagaacgcctgccgcgctgatctcggcgctgaaccagcaaggctatcagttagggctattctcttctgacggcttcaccagcccgctctaccgccaggcgctgctgtcagacttctccatgccaaccgtgcaaacgcagtccgacgagcagacggcgagccagtggattaactggttaggacgttacgcccaggaagataaccgctggttctcatgggtttccttcaacggcacaaacgttgacgacagcaaccagaaagactttgcgaaacggtatgcccgcgccgcagagaacgtggatgcccagattaaccgggtgctcagcgcactgcgtgacgcagggaaactcaacaacaccgtggtgatcattacgggggggcgcggcgtaccgttgacgcaggaagagagccatttcgcctggtctcgcggccatctgcaagtgccgttgatcattcactggccgggcacgccagcgcagcgaatcaacactctgaccgaccatacggatttgatgacgacgctgatgcagcgactgttgcacgtcagtacgccagccaatgagtactcgcagggacaggatctgttcaatgccacgcgccgccattactgggtgaccgcggcggacggcagtacgctggcgattaccacgccggaaatgacgctggtactgaacaataacggcacctatcagacgtacgatctacacggcgagaagatcaaagaccagaagccgcagctgagcctgttgttgcaggtactgaccgacgagaaacgattcattgctaactga

SEQ ID NO: 72080 - DNA, 648 bp, Citrobacter koseri
atgcctgaagcaacgccttttcaggtgcttattgtggacgatcatccacttatgcgacgaggtattcgtcaattactggaactggataccgcatttaatgtcgttgccgaagctggcgatggggcgagtgctatcgatctggcaagccgtctcgatcttgatctgatcctgcttgacctgaatatgaaaggcctgagcgggcttgatacgctgaatgcgctgcgtcgggatggcgtcaccgcacagatcattatcctgacggtttccgactctgccagtgacgtgtacgcgctgattgatgccggggcggacggctatttactgaaagacagcgacccggaagtgctgctggaagcgattcgtgctggcgccaacggtggcaaggtattcagcgatcgcgtcagcgaatacctgcgcgaacgggaactgtttggcgcagaggaagatccctttagcgtgctcactgaacgcgaactggacgtactgcacgaactggctcaggggctgtcgaacaaacagattgcctccgtgctgaatatttctgagcagacggttaaggtgcatattcgtaatttactgcgaaagctgaatgtgcgctcgcgcgtcgcggcgaccattctctttttacaaacacgcggaatgcagtaa

SEQ ID NO: 72081 - DNA, 1050 bp, Citrobacter koseri
atgagattcttactgggcgtgctgatgctggtgatctccggctcgtcgctggctgccattgatgttatgcagttcaaagatgaagcgcaggagcagcagttccgccagctcaccgagcagctgcgctgcccgaaatgccagaacaacagcatcgcggactctaactcgatgattgccaccgacctgcgtcagaaggtttatgaactgatgcaggaaggtaaaagcaagcaggagatcgttgattacatggtggcgcgctatggtaacttcgtcacctacgatccgccgctgacgccgcttaccgtgctgttgtggatcttgccgatcgccgctattggcgctggcggctggattatcttcgcccgttcgcggcggcgcgtacgtgtaaaacaggaaaccttttctgatgaggtgacgccgaagggacgccaggccggattatggctgtttgctcccggggttgtgatcgcgctgattgtcggggcggtaagttactaccagaccggtaactatcagcaggtaaaaatctggcaacaggctacggcgcagacgccagcgctgctggagcgtgcgctgaaccctgacgcgcagccgctgaatgaagaagagatgacacgcctggcgcttggtttgcgtacccgactgcaaagcgatgctggcaatgtggaaggctggattatgcttgggcgtatcggcatggtgctggggaatgccagcacggcgacggaagcgtatgccaatgcgtacagactggaccccaaaaatagcgatgccgcattagggtatgcggaagcgctgacccgttcttccgatcctgatgataatcgtcggggaggggagctgttgcgccagctggtgagaagcgatcatgccaacattcggacgttgagtatgtatgcgtttaatgccttcgagcagcagcgtttcggcgaggcggtcgcagcctgggagatgatgctgaaattgctgcccgccaatgattcccgccgggcagtgattgaacgcagtattaagcaggcattagcgcagctttcgccgcaggcggaataa

SEQ ID NO: 72082 - DNA, 558 bp, Citrobacter koseri
atgaagcgcaacgtactgttaatacctttcgtcatttttctggttattgcggcggcgttgctgtggcagctggcgcgtaatgcggaaggggacgatccgacgaatctggaatcggcgctgattggcaaaccggtgccgaccttccgtctcgaatcgctggaaaatcctggtcagcactatcaggcagacgtgctgactcaggggaaaccggtgctgctcaacgtgtgggcgacctggtgcccgacctgccgcgctgaacatcagtatctgaatcagttgtctgcgcagggaattcgcgtggttggtctgaattacaaagacgatcgccagaaagcgattacctggctgaaagagttagggaatccttatgcgctaagcctgtttgatggcgacggtatgcttgggctggatctgggcgtttacggcgcgccggaaaccttcctgatcgacggtaaagggatcattcgttatcgccatgctggcgatctgaacgccagggtatgggaaagtgaaataaaaccgctctgggagcagtacagcaaggaggccgcgcaatga

SEQ ID NO: 72083 - DNA, 1938 bp, Citrobacter koseri
atgatgcctgaaattggcaacgcgctgctgtgtctcgcactcggcgtggcgctgttgctgtccgtttatccgctgtggggcgtggggcgcggcgatgtgcgcatgatggcctcggcgaggccattctcctggctgctgtttatcctggtgatgggcgcgtttctggtgctgatcaatgccttcgtggtgaatgattttaccgttacctatgtcgccagcaactccaacacgcaattgccggtctggtatcgcgtcgccgcgacctggggagcgcacgaagggtcgcttctgctatgggtattgctgatgagcggctggacgtttgccgtggccgtgttcagtcagcggatgccgctggatatcgtcgcccgcgtactggcggtgatggggatggttagcgtcggttttctgctgtttattctgttcacctccaacccgttttcccgtacgttgcccaactttccgattgaagggcgcgacctgaacccgctgttgcaggacccggggctgatcttccacccgccgctgctctatatgggctatgtcggtttctcggtggcgttcgcgatcgccgcgctgatgagtgggcgtctggacagcacctttgcccgcttttcccgcccctggacgctggccgcatgggtattcttaacgctgggtatcgtgcttggctctgcctgggcctattacgagctgggctggggcggctggtggttctgggacccggtggaaaacgcctcatttatgccgtggctggtgggcaccgcgttgatgcactccctggcggtgactgaacagcgcgccagcttcaaagcctggacgctcctgctttcaatatgcgccttctcactctgcctgctcggtactttcctggtgcgttctggcgtgctggtgtcggtgcatgcttttgcctccgatccatcgcgcgggatgtttattctcgcctttatggtactggtgatcggcggttcgctgctgctgttcgcgacgcgcggacacaaggttcgctcgcgggtgaataacgcgctctggtcgcgtgagtcactgctgttagccaataacgtcctgcttatcgccgccatgctggtggtgttgctgggaacattgctgccgttggtgcataaacagctcggtctgggcagtatttcaatcggcgaaccgttctttaataccatgttcacctggctgatggcgccgttcgcgctgctgctgggcatcgggccgctggttcgctggggacgtgacagaccgcgcaagttgcagcggttgttggttatcgcgctggtgagcacgttagtgttgtcgatgctgctgccgtggctgtttgaagacaagattgtcgccatgacggtggtcgggctggcgatggcgtgctgggtatttgtgctggcggtagcggaagtcgcgcagcgcgtttcgcgcggtacgaaaatgacgctcagctactggggaatggtcgccgggcacgttgggctggcggtgacgattgtcggcatcgcgtttagccaaaactacagcgtggaacgtgatgtccgcatgaaagcgggcgacagcgtcagcatccacgactatcaattcaccttccgtgaagtgaaggagattaccggcccgaattatcgcggcggggtggcgattatcggcgtgacgcgggaaggtaaagcagaagcgacgttgcatgcggaaaaacgtttttataacagcaccagctcaatgatgacggaagcggcgatcgatggcgggatcacccgcgatctgtatgccgctctcggcgaagagctggacaatggcgcatgggcggtgcgcctgtattacaaaccgtttatccgctggatctgggcgggagggctgttgatggcgcttggcgggttgttctgcctgtttgatccgcgctatcgccagcgttcatgcccgcaaaaaaccgcgccggaggctgtatga

SEQ ID NO: 72084 - DNA, 480 bp, Citrobacter koseri
atgaatctccgtcgtaaaaatcgtttgtggatagcctgcgcggtgctggccggtttggctctgactatcacgctggtactttatgcgcttcgttccaatatcgacctgttctatacgccaggcgaaattctctacggtaaacgcgaaacgcaccaactgcctgaagtggggcaacgcctgcgcgtcggcggcatggtcatgcccggaagcgtgaagcgcgacccggattcgctgaaagtgaatttcagcatctacgacgccgaaggcgtggtggatgtgacgtacgaaggcattctgccggacctgttccgcgaagggcagggcgtggtagtgcagggggaactgggcgagaaaaaccatgtgcaggcgaaagaggtgctcgccaaacatgatgaaaactataccccgccggaagttgaaaaagcgatgcaggaaaaccatcgtcgcccggaaagcgtttataaggataaagcatcatga

SEQ ID NO: 72085 - DNA, 213 bp, Citrobacter koseri
atgaccagcgcatttgcatcctggagtgatttctttgctatgggcggttacgccttttatgtctggctggcggttgtgatgacagtgatcccgctggcggcgctggtggtgcataccgccatgcagcaccgcgtgattttgcgcggtgtggcgcagcagcgagcgcgtgaagcgcggatgcgtgcggcgcaggcgcagcgggaggccgcatga

SEQ ID NO: 72086 - DNA, 738 bp, Citrobacter koseri
atgtggaaaacacttcatcaactggcgattcccccacggctttatcagatctgtggctggttcatcccgtggctggcgatagccagcgtggtggtgctggcggcgggctgggtctgggggtttggcttcgcgcctgcggattatcagcaggggcaaagctaccgcatcatctacctgcatgtcccggcggcgatctggtcgatggggatttacgcctcgatggcggttgccgcattcatcggtctggtctggcaaatgaaaatggctaacctggcggtggcggcgatggcgcctgttggcgcggtgtttacctttatcgcgctggttaccggttccgcctggggaaaaccgatgtggggaacctggtgggtatgggacgcgcgattgacctccgaactggtgctgctgttcctgtacgtcggggcgatagcgttgtggcacgcctttgacgatcgccgcctggcggggcgcgcggcgggcattctggtgctgattggcgtcgttaatctgccgatcatccactactcggtggagtggtggaatacgctacatcagggatcaactcgtatgcagcagagcattgacccggcgatgcgcgcgccgctgcgcctggcgattatcggttatctgctgctgtttatcacgctggcgctgatgcggatgcgtaacctgattttgttaatggaaaaacgtcgcccgtgggtgagtgaactgattttaaaaagaggccgccaatga

SEQ ID NO: 72087 - DNA, 660 bp, Citrobacter koseri
atgatgtggcaaatctttcgtcttgagctgcgcgtggcgtttcgtcatagcgcggaaatcgctaacccgctgtggttctttctgattgttatcacgcttttcccactgagcattggcccggagccgcagctgctggcgcgcattgttcccggcattatctgggtggcggcgttgctctcctcgctgctggcgctggagcgtctgtttcgcgatgacttacaggacggcagcctggagcaactgatgctcctgccgctgccgttaccggcggtggtgctggcgaaagtgatggcgcactgggttgtgaccggcctgccgctgctgatcctctctccgctggtggcgttattgctgggaatggatatgtacggctggcaaatcatggcgctgactctgctgcttggcacgccgaccctgagttttcttggcgcgccgggcgtggggttaacggtgggcctgaagcgcggcggcgtattgctgagcgtgctggtgctgccgctgaccattccgttactgattttcgccactgcggcgatggatgcggcctccatgcatttgcccgttgagggatatatggcgattttgggcgcgttgctggcgggcagcgcaacgttaagcccttttgctacggcggcagcgttacgtatcagcatgcagtag

SEQ ID NO: 72088 - DNA, 621 bp, Citrobacter koseri
atgcttgaagccagagaactgctctgcgagcgggatgacagaatactgttcagtgggctgtcgtttcgcgtgaacgcaggggaatgggtacaaattaccgggggcaacggcgcggggaaaaccacccttttgcggttgctcaccgggctggcgcgccccgacgcaggggaagtgtgctggcaagagcaggcgttgcaccgcgtgcgcgacagctaccatcaaaatctgttgtggattggacatcagccggggattaaaacccggctttcggcgttggagaacctgcgctttttccaccatgacggcgatacggcgcagtgtctggccgcgctggcgcaggcggggctggccggatacgaagacatccccgtcaaccagctttccgctggacagcaacggcgcgtggcgctggcgcgtctgtggctgacccgcgcgacgctctggatcctcgacgagccgtttaccgccattgatgtcaatggcgttgagcgtctgacgcagcgcatggctgaacatacacagcagggcgggatcgtcatcctcaccacacaccagccgctgaatgtcgcgactgacaaaatacggcgcatcgcgctgaccggcgagagggtagcgcaatga

SEQ ID NO: 72089 - DNA, 603 bp, Citrobacter koseri
atggaaaattctaaccgtaaacctggcgtgattaagcgggtctggcaatggtggcgtcgccccagccgcctggcgatcggcacgttgctgttaatcggttttgttggcggcattattttctggggcggtttcaacaccgggatggaaaaggccaacaccgaagagttctgtatcagctgccacgaaatgcgcaacaccgtctatcaggaatacatggaaaccgtgcactacaacaaccgcagcggcgttcgcgccacctgtcctgactgtcacgttccgcacgagtggggcccgaaaatgatccgtaagatcaaggccagtaaagagctgtacgggaaggtgttcggcattatagatactccgcagaagtttgaagatcaccgtctgacaatggcgcagagcgagtggcgacggatgaaagacaccaattcgcgggagtgccgtaactgccacaacttcgaatttatggatctcaccgctcagaaaggcgttgccgccaaaatgcacgaccaggcagtgaaagaggggcaaacctgtatcgactgccacaaagggattgcgcataaactcccggatatgcgcgaagtgaaaccgggcttttaa

SEQ ID NO: 72090 - DNA, 450 bp, Citrobacter koseri
atgaaaagccatgacctgaagaaagcgctgtgtcaatggacggccctgcttgccctggtggtgagtggtgcggtttgggcagcaaacggagtggatctgagccagtcgccggaagtttcggggacgcaggaaggggcgattcgcatgccgaaagagcaggaacgtatgccgctgaactatgttaatcagccgccgatgatcccgcatagcgttgaaggttatcaggtaacgaccaataccaaccgctgcctgcaatgtcatggtgtggaaagctaccgtacgaccggcgcgccgcgtattagcccaacgcactttatggacagcgacggcaaagttttaggcgaagtcgcgccgcgtcgttacttctgtttgcagtgccatgtgccgcaggcggatgccgcgccgatcgtgggtaatacctttaccccgtcgaaaggttacgggaaataa

SEQ ID NO: 72091 - DNA, 864 bp, Citrobacter koseri
atggcaaatcgtaaacgcgatgccgggcgcgaagcgcgagcgaaaaaaggctggtggcgcagccatcgctggctggttttgcggcggataagtcagtttctggtgctgggaatgtttctcagtggcccgtgggcgggcgtctggattctgcacggtaactacagcagtagcttgttgctggataccattcctttaaccgacccgctgataacgttgcaaagccttgccagcgggcatttaccggccgccgttgcgctgaccggcgccgccattattacggtgctgtatgccctggcaggaaagcgattattttgcagttgggtctgtccgctgaacccaattaccgattttgcgaactggctacgcagaaggtttgacctgaatcagtccgcaacgattccgcgtcatatacggtacgtccttctggttgtcgtgctggtgggatcggcgctaaccggaacgctactgtgggaatggataaacccggtttccctgctggggcgtagcctggtgatgggattcggtagcggcgcactgctgattatcgctctgtttttatttgatttactggtcgttgaacacggctggtgcggacatatctgccctttgggcgcgttgtatggcgtgctgggaagtaaaggcgcgctaacggtggcggcgaaagatcgcgagaaatgtaaccgctgtatggattgttttcatgtttgcccggaaccgcacgtcctgcgtgcgccggtgctggatgagcaaagcccggtgcaggtcaccagccgcgattgcatgacgtgcggtcgctgcgtggatgtctgttctgaggacgtatttacaataacaacacgatggagttcgggagcgaaatcatga

SEQ ID NO: 72092 - DNA, 696 bp, Citrobacter koseri
atgtcccggtcagcgaaacctcaaaatggccgccgccgctttttgcgcgatatggttcgcacggcaggcgggctggctgccgttggcgtggcgctggggttacagcagcaaaccgctcgcgcaacgggcgtgcggttgcgcccgccgggggcattgagtgaagacgcgttcgccagcgcctgcgtgcgctgcgggcagtgcgttcaggcatgtccgtatgacaccctgaagctggcgacgctggcttcgggtttgtctgccggtacgccttactttgtcgcccgcgatattccctgcgaaatgtgtgaagacattccatgcgccaaagtttgccccagtggggcgttggatcgagagatcgaatctattgacgatgcgcgcatggggctggcggtactgctggaccaggagaactgccttaactttcagggactgcgctgcgacgtttgttatcgcgagtgcccaaaaatcgatgaggcgatcacgctggagctggatcgcaatatgcgcaccggcaaacatgcgcgctttcttcccaccgttcacagcgacgcctgcaccggctgcggtaagtgcgaaaaagtctgtgtgctggagcaaccggcgataaaagtgttgccgctgtcgctggcgaaaggggagttggggcaccactaccgcttcggctggctggaggggaaagatggcaaatcgtaa

SEQ ID NO: 72093 - DNA, 2487 bp, Citrobacter koseri
atgaaactcagtcgtcgtagctttatgaaagctaacgccgttgcggccgctgcggcggctgccgggctaagcgtgccgggcgtcgcccgcgcagtggttggtcagcaggaagccatcaaatgggacaaagccccgtgccgtttttgcggaacgggttgcggcgtgctggtcggtactcagcagggccgtattgtggcctgtcagggcgatcctgatgcgccggtcaaccgtggccttaactgcattaagggctacttcctgcccaagatcatgtatggcaaagatcgtttaacgcagccgatgctgcgcatgaaagacggccagtacaacaaagaaggcgaatttaccccaatcagttgggatcaggccttcgatgtgatggaagagaaatttaaggcctccctgaaagaaaaagggccggaagcgattggtatgtttggttccgggcagtggacggtctgggaaggttatgccgccgcgaagctgttcaaagccggtttccgttccaacaatatcgacccgaacgcgcgccactgcatggcgtcggcggtggtgggcttcatgcgtacttttggtatggatgagccgatggggtgctacgacgatatcgaacaagccgacgcctttgtgctatggggctctaacatggcggagatgcacccgatcctgtggtcgcgcatcaccaaccgccgtctgtccgatccgaacgttaatgtcgcggttctctcaaccttccagcatcgtagctttgagctggcggataacggcatcgtctttacgccgcaaagcgatctggtgatcctcaactatatcgccaattacatcattcaaaacaatgcgataaatcaggatttcttcagcaaatacgtcaacctgcgtaaagggacgaccgacatcggttatggcctgcgtccaacgcacccgctggaaaaagcggcgaagaatccgggctctgacgcctctgagccgatgagcttcgacgagtacaaagcgtttgtcgcggagtacacgctggagaaaaccgcagaaatgaccggcgtgccgaaagatcagctggagcagctggcgcagctgtatgccgatccgaagaaaaaagtgatctcctactggacgatgggctttaaccagcatacgcgtggcgtatgggccaacaacctggtgtataacctgcacctgttgaccggcaagatctcccagccaggctgtggtccgttctccctgaccggtcagccttccgcctgtggtacggcgcgtgaagttgggacattctcccaccgtctgcctgcggacatggtggtcaccaatgaaaaacaccgtgatatctgcgaaaagcactggcagatcccaacgggcaccatcccggcgaaaatcggtctgcacgccgtagcgcaggatcgtgcgctgaaagacggcaagctgaacgtctactgggtgatgtgcaacaacaacatgcaggccgggccgaacatcaatgaagagcgtatgccgggctggcgcgatccgcgtaacttcgtcatcgtctccgatccgtacccgaccgtcagcgcgctggccgctgacctgattctgccaacggcgatgtgggtggagaaagaaggggcctacggtaacgctgagcgtcgtacccagttctggcgtcaacaaattaaagcgccgggtgaagcgaaatcagacctgtggcagctggtgcagttcgctcgtcgtttcaaaacggaagaggtctggccggaagatctgctggcgcaaaaaccagaactgcgcggcaaaaccctctacgacgttctgtttgccacgcctgcggtcagcaaattccctctgaccgatctggcggaagaccagctgaacgatgaatcccgtgagctgggtttctacctgcaaaaagggctgtttgaagagtacgcctggtttggtcgtggacacggccacgatctcgcgccgttcgatgattatcacaaagcgcgtggtctgcgctggccggtggttgacggtaaagagacccagtggcgttacagcgaaggccatgacccgtatgtcaaagcgggagaaggctacaagttttacggtaaaccggacggcaaagcggtgattttcgccctgccgtttgaacccgccgcggaagcgccggataaagagtatgacctgtggctttctaccggtcgcgtactggagcactggcacaccggcagcatgacgcgccgcgtgcctgagctgcatcgcgccttcccggaagcggtgctctttattcatccgctggacgcgaaaacgcgtgacctgcgccgtggcgataaggtcaaagtcatctcccgccgtggggaagtgatttcggttgttgaaacgcgcgggcgtaaccgcccgccgcaaggactggtgtacatgccgttcttcgacgccgcacagctggtgaacaacctgacgctggatgcgacggacccgctctctaaagagacggatttcaagaagtgcgccgtcaaactggcgaaggtgtaa

SEQ ID NO: 72094 - DNA, 267 bp, Citrobacter koseri
atgcagcacagtaactggcaggtctgtagcctggtcgtccaggccaaaagtcagcacatcaccgacattagcacacaattgcaccagtttccgggctgtgaagtcgcgctgagcgatgtcgacagcggtcagttgatcgtggtggtggaagcagaacacagcggaacgctgatgcaaacaattgagtcggtacgcaacgttgcgggcgtgctggcggtgtcgctggtttatcaccagcaggatgagcaaggtgaggaaacaccatga

SEQ ID NO: 72095 - DNA, 495 bp, Citrobacter koseri
atggttgatctatcccgtcgaggaatactgacaggcagttggcgcaaagccaacagcgggctccgtccgccctggtctggggacgaatcacacttcctgacgcactgcatccgttgcgacgcctgcattcaggcatgtgaaaccgacattttacagcgggggcagggcggctatccgggcgttaattttaagcagggtgaatgcagcttttgttatgcctgcgcgcaagcctgtcctgaatcactcttccttccgcgccacaccagggcctgggatctgaactttacgattgggcagaattgtctggcgtatcagtccgttgagtgtcatcgctgccaggatagctgcgaaccactggcgataacgtttcgccccacgctgtcaggcatttatcagccgcaactcgacaatcaggcatgcagcggatgcggggcgtgtgtcgccatttgcccgacatcagcgatcaatgcggagtacaaccatgcagcacagtaa

SEQ ID NO: 72096 - DNA, 510 bp, Citrobacter koseri
gtgaactcgaaaatgaagacaattgtacctgccgtactgttagcggctttcgccagtacctccgcatgggcggcgaccagcgatgccaatacgcaacctctggaaaaaatcgcgccgtatccgaaagcggaaaaagggatgaagcgccaggttatccagcttactccccaggaagatgagtctaccctgaaagtggaactgctgatcggccagacgctggaagtggattgcaaccatcaccgtcctggcggcgaactggcgagcaaaacgctggaaggctggggttacgactactacgtttttgataaagtaacctccccggtttctaccatgatggcctgcccggatggcaagaaagagcagaagtttgtgacggcctatctgggcgatgccggaatggtgcgttataacagcaagctgccgatcgtggtgtacaccccggctaacgtggaggtgaaataccgtatctggaaagcggaagataaagtacaggacgcagtgacgcgttaa

SEQ ID NO: 72097 - DNA, 1662 bp, Citrobacter koseri
atgaaaaaagtgactgccatgctcttcaccatggctgtggggctgaatgctgtctcgatggcggcaaaagcgaaagcgaccgaagagcaggaaacggatgtactgttgattggcggcggcatcatgagcgccacgttgggaacctatttgcaggagctggaaccggagtggtcaatgaccatggttgagcgactggatggggttgcacaggagagttctaacggctggaacaacgccggaacaggccactccgcgctgatggaactgaactacacgccgaaaaaagccgacggttccgtcagcatcgaaaaggcagtcgacattaacgaagccttccaggtttcccgccagttctgggcgcatcaggtacagagcggcgttctgcacgaaccacactcgtttatcaataccgttccgcacatgagctttgtctggggcgatgataacgtcaatttcctgcgcgcccgctataccgcgttgcagcagagcacgctgttccgcggtatgcgttactccgaagatcatgcgcaaattaaagagtgggcgccgctggtcatggaaggtcgcgacccgaaacagaaggttgccgcgacccgcactgaaatcggtactgacgtgaactacggggaaatcacgcgtcagctggtggcatcgttgcagaaaaaaccgaactttgcgctgcaactgaataccgaagtccgtggatttaaacgtaacgcggataactcctggaccgtgaccgtcgccgatctgaaaaacggtgaagcagaacatgcgattaaggcgaaatttgtctttatcggcgcgggcggcgcggcgctgaagctgttgcaggagacgggcattcctgaagcgaaagattacgcgggattcccggttggcggccagttcctggtttcagagaacccggatgtggttaacaaccacctggcgaaggtatacggccaggcgtcggtcggcgcgccgccgatgtccgtaccgcacatcgatacccgtattctggatggcaaacgcgtcgtgctgtttgggccgttcgcgacgttctccacgaagttcctgaaaaacggttcgctgtgggatctgctgagttcgaccacgacctctaactttatgccgatggttaacgtagggatggataacttcgatctggtgaaatacctgattagccaggtgatgctgagcgatgatgaacgctttgaagcgctgaaagagtactatccgcaggcgaagaaagaagactggcgtttgtggcaggcgggccagcgcgtgcagatcatcaagcgtgatgaagacaagggcggcgtactgcgtctgggcactgaagtggtcagcgacaaagacggtacgattgccgcgctgctgggcgcgtctccgggggcatccactgctgcgccgatcatgctgcatctgatggaaaaagtgtttaaagagaaagtggccagcccggaatggcaggcgaagctgaaaacgattgttccgtcttacgggactaagctgaacggcaatattgaggccacggaacaagagctgcaatacaccagcgacgttctggggctgaaatatgacaagccgcaggtggtggacgaagcgccaaaaccgcagcttaagccgcaggttcaaccgcagccggcgcataaagctgtcgcggatatcgcgctgtaa

SEQ ID NO: 72098 - DNA, 1437 bp, Citrobacter koseri
atgtccgcaatgaccaaaaacagcgccagactgcgcgatgaagagcgtgcgcgtcttatctggctgctcaccaccgataaagcgattatttccgccctgtcaggcaagctcaccctggctgagcaatatgatgtcggtacgctggccgacgatattgctgaggtaggggcgctggtggctcacctgccgccgccggacctggcggatacccttgaagcgctgccttccgaagaacgtcatgccttatggcggctggtcgagaatgaaaaacgcggcaaagtgctgctggaagcgtccgaaaacgtctgggatgacctgattgatgaaatgaccgaccgcgcgctgttggacgcgctgcaatacctcgacattgacgaacagatttatctcgttcagcacctgccgcgtaacctcaccgggcgactgctggcgacgctgccgccagaggagcgcgcccgcgtccgtcaggttatgcactacgagaagaatcgcgtcggggcgatcatggagttcgaggtcatcaccgtgcgcccggacgtgacgctggaggtggtgcagcgctatttacgccgtctgggaaaaatgccggaaaacaccgacaaactctttgtaacgaaccggaataaaatactggtcggcgagctgtctctgacgcgtattctgctcagtgacgcgcagcgtaaagtcagcgacgtgatggatgacgatccgctgacctttgccccggaagatatctctgagaatgcggcgcgcacctttgaacgtgacaacctggttagcgccgccgtgatcgatccttccggcaaactgatgggacgcctgaccatcgatgagatcgttgatgtggtctacgaagaaaccgacaccgatctgcgtcgcatggggggcctgagcgccgaagaagatgtctttgcgcccgtcgccaaagcggtaaaaacccgttgggcatggctggcgataaacctgtgcacggcgtttatcgcctcccgggtgatcgacggctttgaacacacgatctcgcaactggtggcgctggcttctctcatgccgattgtcgccgggattggcggcaataccgggaatcaaaccattactatgattgttcgcgcgctggcgctgcaaaatattcagcccggcaacctgacctttctcattttgcgtgaaatgggcgtggcgctggtcaacggccttgtctggggcggcatcatgggcggcgtgacctggtggctctacgacgatatcgcccttggcggcgttatgacgctggcgatggtgctgaatttactggtggcggcgctgatgggcgtgatcatcccgatgacgatggtaaagctcgggcgtgacccggcggtcggctcaagcgtgatgattaccgccattaccgataccggcggtttctttatttttctggggctggcgacggtatttctgctttaa

SEQ ID NO: 72099 - DNA, 1644 bp, Citrobacter koseri
atggaactacttcttcttgtctggcggcagtatcgctggccatttatcagcgtgatggcgctcagcctcgccagcgctgcgctggggattggtctgattgcctttatcaatcagcgcctcatcgaaacggtggataccacgctgatggtgctgccggaatttctcgcgctgctgcttttactgatggcggtgacgctgggctcccaactggccttaaccgcgttagggcaccattttgtctatcgcctgcgcagcgaatttatcaaacgtattctggacacgcaggttgagcgcatcgaacaactgggcagcgcctcgctgctggcagggttaaccagtgatatccgcaacatcacgatcgcgttcgtgcgcctgccggagctggttcaggggatcatcctgacggtgggttccgccgcgtatctggcgatgttatccaccaaaatgctgctggtgacggcaatctggatggcaatcaccatctggggcgggtttgtgctggtggcgcgcgtgtataagcacatggcgacgctgcgcgaaacggaagataagctgtatcaggattttcagacggtgctggaagggcgcaaagagctgaccctgaaccgtgagcgcgcggaacatatctttaaccattcgtatatcccggatgcgaaagagtatcgccaccatattattcgcgccgatacgttccacctgagcgccgttaactggtcaaacattatgatgctgggcgcgattggtctggtgttctggatggcgaacagcctgggctgggcggataccaacgtggcggcgatctattcgctgacgctgctgttcctgcgcacgccgctgctctctgcggttggcgcgttgccgacgctgctcaccgcgcaggtggctttcaacaagctgaataaattttcgctggcgccgtttaaagcggaatttcctcgtcctgacgcctttcctgactggaaaacgctggagttacgcaatgtcgttttccattatcaggataatgcgttttcagtagggccgatcaacctgaccatccagcgcggggaactgctgtttctgattggcggcaatggtagcgggaaatcgacgctggcgatgctgctgacggggctgtaccagcctcagtcaggcgaaattttactggatggcaaaacgctttccgcagagcgtcctgaggactaccggaaactcttttccgctgtgtttaccgatgtctggctgtttgatcaactgctggggccggaaggcaaaccggccaaagcggaactggtggaaaagtggcttgagcaactgaaaatggcgcacaagctggagctgcgcgatggccggattctgaacctgaagctgtcgaaagggcagaaaaagcgcgtggcgttgctgctggcgctggcggaggagcgtgacatcattctgctggatgaatgggccgccgatcaggacccgcatttccgccgtgaattttatcaggtgctgctgccgctgatgcaggagatgggcaaaaccatctttgcgatcagtcatgacgatcattactttattcacgccgatcgcctgctggagatgcgtaacgggcagttgagtgagctggtcggtgatgaacgcgacgccgcctcccgcgatgcggttgcgcgtaccgcctga

SEQ ID NO: 72100 - DNA, 651 bp, Citrobacter koseri
atgctggacttatttgcggatgctgaaccctggcaagagccgctggcgtccggcgcggttatcttgcgccgtttcgcctttcgcgaggcgccatcgctgattgaggccatcgcggcggtcgccgcgcagtcgccatttcgccagatggtgacgcccggcggctataccatgtcggtggcgatgacaaattgcggtcagctcggctggacgacggatcaacatggatatctctattctcccgtcgatccgttaaccgggcggcgttggccgctgctgcctgaggtctttaccagcctgtgccatcgcgcggcgatcgcggcgggctatgctgattttcagccggatgcctgtcttatcaatcgctatgcgcccggctcaaagttgtcgttgcatcaggataaagacgaaccggatctgcgcgcgccgattgtgtcggtttctttgggccttccggccatttttcagtttggcggcctgcgtcgtaacgatccgttaaaacgccttttgctggagcacggcgatgtggtggtctggggcggtgaatcgcggctgttttaccacagcatacaaccgcttaaagcgggctttcatccgctgacggcggactgtcgttacaacctgacgtttcgccaggcgggtaaaaaagaataa

SEQ ID NO: 72101 - DNA, 1065 bp, Citrobacter koseri
atgaaaaatctctcacgcataaacgacgatgcacgctggcagtcggtgctggatcgcgatcctgacgccgatggtcagtttgtttttgcggtacagaccaccggcatcttttgccgaccgtcctgtcgggcaaaacacgcgttgcggcaaaacgttcgtttctttgccagtgcggagcaggcgctggccgcaggattccgcccctgcaaacgctgccagccagacaaagacaacgcccgacagcatcagctggataaaatcacgcacgcctgccgtttactggaacaggatgcccccatcacgctggacgccctggcgcagcaggtggcaatgagcccatttcatctgcaccggttgttcaaagccacgacgggaatgacgccaaaagcctggcagcaatcctggcgcgcccgccgtctgcgcgatgcgctgacgaaaggagagacggtaacgcaggcgatcctgaacgccggttttcccgacagcggcagttactatcgcaaagcggatgagacgctcggcatgacggcgaagcagtttcgtaagggcggcgataatctccccgttcgctatgccctcgcggattgtgcgctgggacgctgcctggttgcggagagcgagcggggaatctgcgcgattttgctgggcgatgatgatgccgggcttattgccagcctgcatgaactgtttcccgccgcgcaggatgaacccgctgatcgccctttccagcagcgcgtgcgccaggttatcgccagtattaatgcacgcgatatgccgctgtcactgccgttagatattcagggcaccgcgttccagcagcaggtctggcaggcgctgcgcacgattccctgtggggaaatcgtcagctatcagcagatcgccagcgcaattggcaagccgaaggcggttcgtgccgttgccagcgcctgcggggcaaataaactggcgattgtgatcccgtgccatcgggtggtgcgcggcgacggcgcgctatcgggttaccgttggggcgtggcgcgcaaggcgcagcttctgcaacgagaggcgcgacatgaggataaatga

SEQ ID NO: 72102 - DNA, 1056 bp, Citrobacter koseri
atggaaatgaccttttgtcgggcagcgctgctggccacgacgatcttttttgtggggtgcgatgatgccccaaaaccggctgatacagcgtcacctgctgcaaccgtactggaagggaaaacgatgggcaccttctggcgggtcagcgtggtggatgtggacgccagccgtgctgaggaattacgtaacagaattcagacgcagcttgatgccgacgatcagctgttgtccacgtacaaaaatgactcggcgctgatgcgcttcaaccattcgcaaagtctttctccctggccggttagcgaagcaatggccgatatcattacctcggcgctgcgcattggcgcgaaaaccgacggcgcgatggatatcaccgtggggccgctggtgaatctgtgggggttcggcccggagcaacagccgctacatgttcccacacagccgcagattgacagcgcaaaagcaaagaccgggctgcaatatctgcgggttatcaatcaggcgcgacagcaatatctgcaaaaagatctgccggatctgttcgtcgatctctcaaccgtgggagaagggtatgcggccgatcatctggcgcgcttgatggaacaggaaggcattgcccgctatctggtctccgtcggcggcgccctgaacagtcgcggcatgaatgcgcaggggcaaccctggcgtgtggcgatccaaaaaccgaccgatcaagaaaacgcggtacaggcgattgtcgatattaacgggcatggcatcagtacctccggcagctaccgtaactattacgaactggacgggaagcgcctgtctcacgtcattgatccgcagaccgggcgtcccatagaacacaatctggtctccgtgacggttatcgccccgacggcgctggaagcggacggctgggataccgggttgatggtgctcggcacggaaaaggccaaagaggtggtgcgccgggaagggctggcggtgtacatgatcatgaaagagggcgaggggtttaaaacctggatgtcgccgcagttcaaaagcttcctcgtgagtgataaaaattaa

SEQ ID NO: 72103 - DNA, 1128 bp, Citrobacter koseri
atgaaagttaaagtactgtccctcctggtaccggctctgctggtagcaggcgcagcaaatgcggctgaagtttataacaaagacggcaacaaattggacctgttcggtaaagtcgacggtctgcactatttctctgatgacgatggcaacgacggcgatcagacctatatgcgtctcggcttcaaaggcgaaacccaggttaacgatcagatcaccggctacggtcagtgggaatatcagattcagggcaacgacgctgaaaccactaacaactcctggacccgtgtggcgtttgctggtgtgaaatttggcgatgcaggttccttcgactacggtcgtaactacggcgtaatctacgatgtaacggcctggaccgacgttctgccggaattcggcggcgacacctacggcgcggataacttcatgcagcagcgtgctaacggcctggcaacctaccgtaatactgacttcttcggtctggttgaaggtctgaattttgcgttgcagtatcagggtaaaaacggcagcgccagcggtgaaaacgacgttgcggatggtcgtagcctgctgaaacagaacggcgacggcttcggcggatctctgacctatgatatcggcgaaggcttcagcgttggtggtgcaatcacctcttccaaacgtactgctgaccagaattcggctggcgtatacggcagcggcgatcgtgcgaccgtttataccggtggtctgaaatacgacgctaacaacgtttacctggcagcgcagtactctcagacttacaacgcaacccgctttggttcttcccagaacagccgtagcgactcttatggcttcgctgataaagcgcaaaacttcgaagtggttgcacagtaccagttcgacttcggtctgcgtccgtccgtggcttacctgcaatctaaaggtaaggacatctccaacggcaccaccaactacggcgatcaggatatcctgaaatacgttgatgttggcgcgacctactacttcaacaaaaacatgtctacctacgttgattacaaaatcaacctgctggatgacaacacctttacccgtaacgcgggtatcagcactgatgacatcgttgctctgggcctggtttaccagttctga

SEQ ID NO: 72104 - DNA, 2670 bp, Citrobacter koseri
atgagtcagtctgatacaacggtttctacccgattctcccttctgccgggaagcattacccgtttcttcttattactgatcattgtgttacttgtaacgatgggcgtgatggtgcaaagcgcggtcaacgcctggctgaaagacaagagctatcagattgtcgatatcacccatgctattcataagcgcgtagacacctggcgctacgtgacctggcaaatctatgacaacattgccgcgacggctagcccatccacgagcgagggtttgcaggaaacgcgtctgaaacaagacgtctactaccttgaaaaaccgcgccgtaagaccgaagcgcttatctttggctcacatgacagctcaacgctggaaatgacccagcggatttccacctatctcgatacgctgtggggcgcggagaacgtgccctggtcgatgtattatctgaacgggcaggacaacagcctgattctcatctccaccctgccgctcaaggatctctcctccggctttaaagagtccgcgattggcaatattgtcgattcccgtcgggcggagatgctgcaacaggcgaatgcgctggatgaacgcgaaagcttctcttcgttacgtcgtctggcgtggcaaaacggccattactttacgctgcgcaccacttttaatcagccggggcatctggcgacggttgtggcgttcgatttgccgatcaacgacctgatcccgccgggaatgccgctggacagcttccgcctggaacccgactcctcaaccacgacggtacgtaatacagagaaagagtctccagacagcgtcagcatcagcttcaacagcgccaaaattgagatttcttccgcgctgaactcaaccgatatgcggctggtctggcaggttcctttcggcacgctattgcttgatacgctgcaaaatatcctgctgccgttactgttgaatatcggcctgcttgcgctggcgctgtttggctacaccaccttccgccaccagcctggccgttcaacggaagtggcgacaagcaataccgcaaataatgaactgcgtattctgcgcgcgattaatgaagagatcgtctccctgctgccgctggggctgctggtgcatgaccaggaggccaatcgcaccgtcatcagcaataaaatcgccgaccatttgctgccgcatttaaatctgcaaaacatcaccagcatggcggagcagcatcagggcatcattcaggcgacgatcaataacgagctgtatgaaattcgcctgttccgcagccaggtcgcccctcgcacgcagatctttattattcgcgatcaggaccgggaagtgctggtgaacaagaagctcaggcaggcgcagcgtctgtatgagaaaaaccagcagggccgcgccgcgtttatgcaaaatattggcaatgccctgaaagaacccgtgcggatactggcgatcaacgccgctgccgcagacacgccggaaagccagaagctggcgagccaggcggatgttctggtgcgtatgatagatgaaattcagctggcgaatattctggagaatgatacctggaaaagcgagccgacgctgttctccattcaggatctgattgacgaagtggtgccggacgttctgcctgcgattaagcgtaagggtctgcaactgctgatcaaaaaccaccttagcgccaacgatgaacgccgtggcgaccgtgacgccctgcgccgcattctgctgttgctgattcagtacgcggtcacgaccacgcagattgggaaaatcacgctggaagtcgatcaggatgagtcggctgaagaacgcctgaccttccgcattctggataccggtgaaggcgtgacgctcaatgagatcgacaatctccatttcccgtatatcaatgaaacgcaaagcgaccgctacgggaaagcgaatccgttaaccttctggttgtgcgatcagctggcgcgtaagctcggcgggcatctgaatattaaagcacgcgatgcgctggggacgcgctataccgtacatgttaaaatgaccccgcatgaccagcatgtaaatgctgaagagcgcttgctggatgacgtttgcgtgatggttgacgtcacctctaatgatgtgcgcaatattgtgttgcgtcagttggaaaactggggagccacctgcatcacgccggatgatcggcaaataagtcaagaatatgatctctttttaactgataatccgtctaatcttactgcctccggcttgcttttaagcgatgatgagtcaggcgtgcggaaaatgggtcctggccaactgcgcgtcaactttaatatgagcaacgctatgcaggaagctgtactacaactgatagaagagcaactggcgcaggaagagattccagagtcgcccctcggcggagatgaaaacgccgaacttcatgccagcggttattacgcactctttgtagacacagtaccggatgatgttaagaggttgtatactgaggcagcgaccagtgatttcgctgcgctggcgcagacagcccaccgcctgaaaggcgtgtttgctatgcttaatctggtacccggcaagcagttatgtgaaacgctggaacatcttattcgtgagaaagatgctccaggtatagaaaaatacatcagcgacattgacagctacgtcaagagcttgctgtag

SEQ ID NO: 72105 - DNA, 651 bp, Citrobacter koseri
atgaacaatatgaacgtaattattgccgatgaccatccgattgtactgttcggtattcgcaaatcacttgaacaaatcgagtgggtgaatgttgtcggcgagtttgaagattccacagcactgatcaacaacctgcctaaattagatgcgcatgtgttgattactgacctctccatgccgggagataaatacggtgacgggattaccctcatcaaatacattaaacgtcatttcccgagcctgtcgatcatcgttctgacgatgaacaacaacccggcaattctgagcgcggtgctggatctcgacattgaggggattgtgctgaaacaaggcgcgccgactgacttgcctaaagcgctggccgcgctgcaaaagggcaagaagtttaccccggaaagcgtctcccgcctgctggagaaaatcagcgcgggcggttatggcgacaaacgtctgtccccgaaagagagtgaagtcctgcgtctgttcgcagaaggtttcctggtgacggaaatcgccaagaaactgaaccgcagcattaagaccatcagtagccagaaaaaatcggcgatgatgaagctgggcgtcgaaaacgatatcgcgctgctgaattacctctcttccgtcacgctgagcccggcggacaaagactga

SEQ ID NO: 72106 - DNA, 3018 bp, Citrobacter koseri
atgctgacatccgtgtggtctttatcaggcaaacgccaattatcgggggttgaggcgcaggtttctcagcggtatatcatattcccgcaaagagagggcattgcgacgccgggcatttaccgctaccttaaccacactctatattatcgcctgaggcggagcttcgcccctttgaaataccttgcttcctttcgtacaaccctgaaagtttcgcgctacctgttcagagcgttggcgttactgatctggctgctgatcgcttttgcttcggtgttttacatcgtcaatgcgctgcatcagagagagtctgaaatccgtcaggaattcaatctcagttccgaccaggcgcagcgctatattcagcgcacgtctgacgtaatgaaagaactcaaatacattgccgagaatcgcttaacggcggaaaacggcgtgatgtccagccgggcgcgcgacgataaaaccgtagtgcccaattttgagccgctgtttgccgactccgactgtgcggcgatggggaatgcctggcgcgggtcgctggagtcgctggcctggtttatgcgctactggcgcgacaatttttctgcggcctacgatctgaatcgtgttttcctgattggcagcgacaatctctgtatggcgaatttcggcctgcgcgatatgccggtcgaacgtgataatgcgctgaaaacgctgcatgagcgcattgttaagtaccgcaatgccccgcaggaagagagcgggaataaccttttctggattagccaggggccgcgccccggcatcggctatttttatgccctgacgccggtttatctggccaaccgcttgcaggcgctgctgggcgtcgagcagtccattcggatggagaactttttcacgccgggaagtttgcctatgggggtgacgatcctcgatgaaaatggtcatccgctgatttcgctgaccgggccggaaagcaacatcaggccggaaccacgctggatgcaggagcgctcctggtttggctacacgccagggttccgtgagctggttctgaagaaaagcctgccgccatcgtcgctcagcattgtctactccgtaccggtcgatctggtgctggagcatattcgaatgctgattctgaatgccattctgctgaatgtgctggtgggcgccgccttgttcacgctggcgcgtatgtatgaacggcgtatctttattccggcggaaagcgatgctcagcggctggaagagcatgagcagtttaaccggaaaatcgtcgcttccgcgccggtggggatctgcatcctgcgcaccattgacggggtcaatattctcagtaatgaactggcgcatacctacctcaatatgctcacccatgaggaccggcaaaggctgacgcaaattatctgtggtcagcaggttaacttcgtcgatgtgttgaccagcaacaataccaatctgcaaatcagctttgtccattcgcgctatcgtaatgaaaacgtggcgatttgcgtgctggtggatgtgagcgcgcgcgtcaaaatggaagagtcgttgcaggagatggcgcaggcggcggagcaggcgagccagtccaaatcaatgttcctcgcgaccgtgagccacgagctgcgcacgccgctgtacgggattatcggtaacctcgatctgctgcaaaccaaagcgctgccgaagggggtcgacaggctggttacggcgatgaacaactcctccagcctgctgctgaaaatcatcagcgatattctcgacttctcaaaaatcgaatccgagcagttgaagattgaaccgcgtgagttctcgccgcgtgaggtgatgaaccatattacggccaactatttaccgctggtggtgagaaaacagcttggcctgtactgctttattgaaccggatgtaccggttgcgctgaacggcgacccgatgcgtctgcaacaggtgatttctaacctgctgagtaacgccatcaaatttaccgataccggttgtattgtgctgcatgtgcagtgtgatggcgattatctcagtattcaggtacgcgataccggcgtggggattccggcgaaagaggttgtgcgtttgttcgatcctttcttccaggtgggaaccggcgtgcagcgtaatttccagggaaccggcctggggctggcgatttgtgaaaaactgatcagcatgatggatggggatatctccgtcgattcagagcccgggatgggcagccagtttacgttacgcattccactttatggcgcgcagtacccgcagaaaaaaggcgtcgaggggctggctcaaacgcgttgctggctggcggtacgcaacgcgtcgctgtgtcattttattgagtccagcctggcgcgaagcggtgtcgatgtgcttcgttacgaagggcaaaaaccggcgccggaggatattctgattacggacgatgtgctggagctggcatggcaggggcgtgcggcggttgttttcagccgccgccatattggtattccgcaggaaagagcgccgggcgagtgggtacacagcgtggcgtcgccgcatgaattgcctgcgctgctggcgcggatttacagtattgagcttgataacgacgcgcttgcaacggcgctgcctgcgccggataaaaccgacgcgacgaatgacgacatgatgatcctcgtggtggacgatcatccgatcaaccgtcgtttgctggccgatcagttgggatcgctggggtatcaatgcaagaccgcgaatgacggcgtcgatgcgttgaacgtgctgagtaaaaaccatattgatatcgtgctgagcgacgtcaacatgccgaatatggacggctaccgtctgacgcagcgcattcgccagctggggttgacgctgccggtggtcggcgtcacggctaacgcgctggcggaagagaaacagcgttgtctggagtccggtatggatagctgcctgtccaagccggtgacgttagatgtgcttaagcagacgctggcggtgtatgcggagcgggtgagaaagacgcgggcataa

SEQ ID NO: 72107 - DNA, 1782 bp, Citrobacter koseri
atgatactgatggctatcctgatggtcatcgtgccgacgctctctattggttatatcgtagaaaccgaaggccgatcagcggtcttatctgaaaaagagaaaaaattatcggctgtcgtgcatctgcttgatgaagcgctgggcgacagcttcaaccagcatgaaaatctgccgcgcgataagcgtatccgcgcgctgaatgcgcagttatcaccggtcactgagcgtatcacccgcgcgtttccgggaattggcgcgggctattacaataaggcgctggacgccattatcacctacgccccttcggcactgtatcaaaacaacgtcggggtcactatcgctcccgaccatcctggccgggaggtcatgggtaccaacgccccggtggtattttcaggccggcaggtgcgcggcgatatcctcaactcaatgattccgatagcgcggcatggcgaggtcattggttatatctgggcgaatgagttgaccgaagatattcgccgacaggcctggaaaatggatgttcgtattattgccgttctggcggcggggcttatcagcagcctgttactgatcattctcttctcacgccgtctgagcgccaatatcgatatcatcactgaaggcttgcctactcttgcgcagaaaacgccggcccagttacccgatctccccggtgaactggggcaaatcagccgcagcgtcaacgctctggcgcagacactgcgggaaaccaagacgctgaacgatctgattattgagaacgccgccgatggggttatcgcgatcgacagacaaggtaatgtcaccacgatgaaccctgccgcagagaccatcacgggttatacgctgcatgaactggccgggcgcccctactcaacgctgttcgccgatcctcatttctccagccctgtgcttgacactctggagaacggcaccgaacatctggctcaggaagtcagcttccccgcgcgtgaccggacaattgaactcagcgtcaccaccagtcgtattcataacgctgacggtgagttgattggcgcgctggtgatgttttccgatttaaccgcccgtaaagaggcgcagcgccgtctggcgcaaacggagagactcgccacgctgggtgaactgatggcaggcgtggcgcatgaagtgcgcaacccgctcaccgccatccggggttatgtgcagattattcgccagcaaatcaatctgcctgtacatcaggagtacctgtccgtcgtactgaaagaaattgattctattaataaagtcatccagcaactattggacttctcccgaccacgacaaagtcagtggcagcaggtatccattaatacgctgatcgaggaggcgttgatcctggtgcagacttccggggtgcaggcgcgaatcaacttcaacacggaattcaacgccgcattgcccacgatcgtcgccgatcgcgaactgctcaaacaggtgctcctgaacatgcttatcaacgcggtgcaggcgataggcgcgcgcggcgaaattcgtatccgaacctggcgctacacgaccacgcatctggcgatcgccattgaagataatggctgcggtattgacgtcgctttgcagaaaaaaatctttgatccgttcttcaccaccaaagcgtcaggaaccggcctcgggctggcgttaagtcagcgcattatcaatgcgcatcagggcgacatatacgttaccagtatgcccggatgcggcgcgacctttacccttattttaccgattaacccgcaggaaacctcgtcagaatga

SEQ ID NO: 72108 - DNA, 1386 bp, Citrobacter koseri
atgaaaactcgctaccgtattctcatcgttgatgacgaagataatgttcgccgtatgctcgccaccgcgttttcgctgcaagggcatgaaacccagtgcgccagtaacggtcagacagcgctgcaacattttgccgacacgccgcccgacgtggtgctgatggacatccgcatgccggagatgaacggcattgaagcgctgaaagtgatgcgcgcacagcatccacgggtccccattattctgatgacagcctacgctgaagtggaaaccgccgtagaagcactgcgcagcggcgcatttgattatgtgattaaaccgttcgacctcgatgaactgaacttattgattcagcgggccttgcagctccaggccatgaagcaggagatccgcagcctgcatcaggcgctgagtaccagctggcaatggggacatattctgaccaacagtccggggatgatggatatctgcaaagataccgcaaaaatcgcgctttcccaggccaacgtgctcattagcggcgaaagcggcactggaaaagagttgatcgcccgcgccattcactataactcacgccgggcaaacggccccttcatcaagattaactgtgcggcgctgccggaatcactgctggaaagcgaactgttcggccacgaaaaaggggcgtttaccggcgcacaaacgcgacgtcaggggctgtttgagcgcgctcatcagggaacgctgctgctggacgaaataggcgaaatgccgctggtgttacaggctaagctgctgcgaatcctccaggagagggagtttgaacgcattggcgggcatcaaaccattcaggttgatatccgcattgtcgccgccaccaaccggaatttgcaggaaatggtgaaagaaggcaccttccgtgaagatctgttttatcggctgaatgtgattcatctgacgcttcctcctttgcgtgagcggcgggaagatattcccctgttggccaaccactttttgcagaaattcagctcagaaaaccagcgggatattattgaaatcgacccttccgccatgtcacttctcaccgcctggccgtggcccggtaatatccgcgaattatccaatgtgattgagcgcgcggtagtgatgaacaccggggcggtgatttttgccgaagacctccctacccagttccgccagtcggtgagtcacgccagcggaataaagccagcccaacccggtgaacggaacctgaaagaagagattaaacgcgaagaacgccgaatcattatggaagttctggagcagcaggagggaaaccgcacgcgcaccgcgttaatgctgggcatcagccgacgcgcgttgatgtacaaattgcaggagtacggcatcgatccggcaggcctctga

SEQ ID NO: 72109 - DNA, 663 bp, Citrobacter koseri
atgaaaacaaaactgattaccttacagaacgcctcaggcttctttcgtgacggcatgaccatcatggttggcggttttatgggggtaggcaccccgccccgccttgttgaagccttacttgaatccggtgtcagggacctgacgctgatcgccaacgataccgcatttgtcgataccggcatcggcccgctcatcgtgaatggccgggtgcgcaaggtcatcgcctcccatatcggcaccaacccggaaacgggtcggcggatgattgccaaagaaatggaggttcaactggttccgcaaggcaccctgattgaacaaatccgctgcggcggcgccgggctgggcggttttctgaccccgactggcgtcggcaccgtggttgaagagggaaagcaaacgcttcagctcgatggcagaacctggctgctggagcgtccactgcgtgcagatctggcgcttattcgcgcccactgcgccgacccgctcggcaacctgacctaccagctcagtgcccgtaattttaaccccctcattgctctcgccgcagacatcaccctggttgagcctgacgaactggttgaaacaggcgatctactgcctgaccagattgtcacccctggcgctgttatcgaccacatcgttattccacaggagagcaaataa

SEQ ID NO: 72110 - DNA, 651 bp, Citrobacter koseri
atggatgctaaacaacgtattgcgcgccgcgtggcgcaagagctgcatgatggcgacgtggttaacctgggaattggtttgccgacgatggtcgcaaactacctgccggatgacattcacatcaccctgcaatctgagaacggctttctgggactggggccggtcacgacggcccacccggatctggtgaacgctggcggtcaaccctgcggcattttgcccggtgcggcaatgttcgacagcgccatgtcgttcgcattgattcgcgggggccatgttgacgcctgcgtactcggcgggctacaggtggatgagcaggcaaacctcgccaactgggtggttcccggcaaaatggttcccggcatggggggcgcaatggatctggtcaccggcgcgcgcaaagtgatcattgcaatggaacattgcgcgaaagacggctcggcgaaaattctgcgccagtgcaccatgccgctcaccgcccagcacgcggtgcatatgctggttaccgaactggctgtatttcgctttatcgacggcaagatgtggctgacagaaatcgccgaagggtgtgatttggaaaccctgcgggcaaaaactgaagcgcactttgaggttgcggccgatctggtcattcagagaggtgacgcatga

SEQ ID NO: 72111 - DNA, 1323 bp, Citrobacter koseri
atgattgggcgtatttcacgctttatgacgcgggtcgtcagccgctggcttcctgatccgctgatcttcgcaatgctgttaaccctgctgacgttcgggattgctctctggctgacgccgcaaacgccggtcagtatggtgaggttctggggcgacggcttctggaacctgctggctttcggtatgcaaatggcgctgattatcgtgacgggccacgccctggccagttccggtccggttaaaagcctgctgcgtaccgccgcttcagccgctaagacgcccgcccagggcgtcatgctggtgaccttctttggctcggtcgcctgcgtgatcaactggggctttggtctggtggtcggcgcaatgtttgcccgtgaagtggcccgtcgcgtgccgggttccgattatccgctgcttatcgcctgcgcctatatcggttttctcacctggggcggcggcttctctggctctatgcccctgctggccgcaacgccaggcaacccggtagaacacgtcgcggggttgattccggttagcgataccctgttcaccgggttcaatattttcatcacgctcggcctcatcgtggtaatgccgtttattacccggatgatgacgccaaaaccctccgacgtggtcagcatcgatccgaaattgctgctggaagaagccgattttcagaagaaactgccggctgacgcaccaccgtcggaaaaactggaagagagccgcattctcgcgctgatcattggcgcattagggattgcctatctggggctctacttcgccgagaagggattcaacatcaccatcaataccgtcaatctgatgtttatgatcgccggtctgctgctgcacaaaacgccaatggcctacatgcgcgccatcagcgccgcagcgcgcagtaccgccggtattctggtgcagttccccttctacgccgggatccaactgatgatggaacactccggcctcggtggccttatcactgaattcttcatcaacgtcgccaacaaagacaccttcccggtgatgacctttttcagctctgcgctgattaactttgccgtgccatcaggcggcggccactgggttatccagggaccattcgtcatgcctgcggctcaggcgctgggggcggacctcggcaagtcagtcatggcgatcgcctacggtgagcagtggatgaatatggcgcagccattctgggcgctgcccgccctggcaatcgccggactcggggtacgcgacattatgggctactgcatcaccgccctgctcttctccgggatcatttttgtcatcggtttgacctttttctga

SEQ ID NO: 72112 - DNA, 1185 bp, Citrobacter koseri
atgaaaaactgtgtcatcgtcagcgcggcgcgtaccgcaatcggcagttttaacggcgcactggcaaccaccagcgccatcgaccttggcgccaccgtgattaaagcggcgcttgaacgcgcgcagctcgacccacaacgggtggatgaagtgattatgggcaatgtgctacaggctggtcttgggcaaaacccggcgcgtcaggcactgctcaaaagcggcctcgcagagacagtctgcggctttaccgttaacaaagtatgcggctccggcctcaaaagcgtggcgcttgccgcgcaggcgattcaggccggacaggcacaggcgattgtcgcaggcggtatggaaaatatgagccaggcgccgtatctgctggatgccaaagcccgctggggctatcgccttggcgacggacagctctccgatgtgatcctgcgcgacggtctgatctgcgccactcacggctaccatatggggatcacggcagaaaacgtcgcccgggaatacggcatcagccgggagatgcaggatgagctggcgctgctctcacagcgcaaagccgttgccgctattgattccggcgcattccaggccgaaattgtgccggttagcgtcacatcccgtaagaaaaccgtggtgtttgagcgcgacgagtttccgaaagccgattcaacggcggaaggtcttgcagcattacgcccggccttcgacaaggcgggtacggtaacggcaggaaacgcctctgggatcaatgacggcgcggcagcgctggtagtgatggaagaatccgcagcgctggcggcgggcctgaccccactggctcgtatcaaagcctatgccagcggcggcgtcgccccggcgttaatggggatggggccggttcccgccacgcagaaggcgctgcaactgagcggtttaacgctttcggatatcgatctgatcgaagccaacgaggcgtttgccgcacagttccttgccgtaggtaagacgctcggttttgatccgcagaaggtgaacgtcaacggtggggctatcgccctgggacaccccatcggcgccagcggcgcgcgtattctggtgacgctgctgcacgccctctctgcacacgataaaacgctcgggctggccacgctctgcatcggcggcggtcagggtattgcgatgatagtggaaaggatgaattaa

SEQ ID NO: 72113 - DNA, 2637 bp, Citrobacter koseri
atgagcgaccttgcgagagaaattacaccggtcaacattgaggaagagctgaagagctcttatctggattatgcgatgtcggtcattgttggccgtgcgctgccggatgtccgagatggcctgaagccggtacaccgtcgcgtactatacgccatgaacgtattgggcaatgactggaataaagcctataaaaaatctgcccgtgttgttggtgacgtaatcggtaaataccatcctcatggtgattccgcggtgtacgacactattgtccgtatggcgcagcctttctcgctgcgttacatgctggtggatggtcagggcaactttggttctatcgacggcgactctgccgcggcaatgcgttatacggaaatccgtctggcgaagattgcccatgaactgatggccgatctcgaaaaagagacggtggatttcgttgacaactatgacggcacggaaaaaattcctgacgtcatgccgaccaaaattcctaacctgctggtaaacggctcgtccggtatcgcggtaggtatggccaccaacatcccgccgcacaacctgaaggaagtgatcaacggttgcctggcatatatcgatgatgaagacatcagcattgaagggctgatggaacacattcctggcccggacttcccgaccgccgcgatcatcaacggtcgtcgaggtattgaagaagcctatcgtaccggtcgcgggaaagtgtatattcgcgctcgcgcggaagtggaagctgacgcgaaaaccggccgcgaaaccatcatcgttcatgaaattccgtaccaggtgaacaaagcgcgcctgatcgagaaaatcgctgaactggtgaaagacaaacgcgttgaaggcatcagcgcgctgcgcgacgagtctgataaagacgggatgcgcatcgtgattgaagtgaaacgcgatgccgtcggggaagtggtgcttaacaacctttattcccagacccagttgcaggtttctttcggtatcaacatggttgcgctgcaccacggccagccgaagatcatgaacctgaaagagatcatttccgcgttcgtgcgtcaccgccgcgaagtggtgacgcgccgtactattttcgaactgcgtaaagcccgcgatcgcgcgcatatccttgaagcgttggcgattgcgctggcgaacatcgatccgatcatcgagatgatccgccgtgcgccaacgccggcagaggcaaaagcggcgttaatctcccgttcatgggatctgggcaacgtggcgtctatgctggaacgcgccggtgatgatgctgcccgtcctgagtggctggagccggagtttggcgtgcgtgatggtcagtattacctgactgaacaacaggcacaggcgattctggatctgcgcttgcagaaactgaccggcctggagcatgaaaaactgctcgacgagtacaaagagctgctggaacagatcgcagaactgctgcacattctgggcagcgccgatcgtctgatggaagtgattcgcgaagagatggaactgatccgcgatcagtttggcgatgagcgtcgcactgaaatcaccgctaacagcgccgatattaatatcgaagatctgatcagccaggaagatgtggttgtaacgctgtctcaccagggttacgtcaaatatcagccgctgaccgattacgaagcgcaacgtcgtggcgggaaaggtaaatctgccgcgcgtataaaagaagaagattttatcgaccgtctgctggtggctaacacccacgacacgatcctctgcttctccagccgtggccgtctgtactggatgaaggtctatcagttgccggaagcgagccgtggcgcgcgtggccgtccgatcgtcaacctgctgccgctggaagccgatgaacgtatcaccgccattctgccggtacgcgagtacgaagagggcgttaacgtctttatggcgaccgccagcggtacggtgaagaaaacggcgctgaccgagttcagccgtccgcgttccgccggtatcatcgcggtgaacctgaacgaaggcgacgagctgatcggtgtggatctgacctccggttccgacgaagtcatgctgttctccgctgccggtaaagtggtgcgcttcaaagaagatgccgttcgtgcgatgggtcgtaccgcgaccggcgtacgtggcatcaaactggcgggcgaagacagcgtcgtttccctgattattccgcgtggtgaaggcgctatcctgactgtgacgcagaatggttacggtaaacgtacggcggaaggcgaatacccaaccaagtctcgtggcacgcagggcgttatctccattaaagtcaccgagcgcaacggttccgttgttggcgcggtacaggtggatgatgccgaccagatcatgatgatcaccgatgccggtacgctggttcgtacccgcgtatcggaaatcagcgtcgttggccgtaacacccagggcgtaatcctcatccgcacggcggaagatgaaaacgtggtgggtctgcaacgtgttgctgagccggtggatgatgaggaactcgactccatcgacggcagcgtagcggaaggggacgaggatatcgccccggaagcggaaaccgatgacgacgcagcggatgacgctgacgagtaa

SEQ ID NO: 72114 - DNA, 729 bp, Citrobacter koseri
atgaatgccgaaaaacccccggtgacgcataacgttgatcacgaagaaatcgccaaatttgaagctgtcgcgtcacgctggtgggatcttgagggtgaatttaagcctctgcaccgcattaacccgctgcgcctgggctacattgccgagcgttccggcggcctgttcggcaaaaaggtgctcgacgttggctgcggcggcggcattctggctgagagcatggcgcgtgaaggtgcgacggtaacgggcctggatatgggctttgagcctttgcaggtcgcgaaactgcacgcgctggaaagcggtattcaggttgattacgtgcaggagacggttgaagagcatgcggcgaaacatgcgcaccagtacgacgtcgtgacctgtatggagatgctggagcacgtaccgaacccgcaatcggtcgtcagggcctgtgcgcaattagttaaaccgggcggtgaagtctttttctcgacccttaatcgcaacggcaagtcgtggctgatggccgtggtgggggcggagtatattttacgcatggtgccgaaaggcacgcacgatgtgaaaaaatttattaagcctgcggagttgctgaactgggtcgatcagaccgtgttgaaagagcgtcacatgaccgggctgcactacaacccgattaccaacaccttcaagctcgggccgggcgttgatgttaactatatggttcacactaccgcacaagttgactaa

SEQ ID NO: 72115 - DNA, 2286 bp, Citrobacter koseri
atgaatcagagtctgctggtgacaaagcgtgatggtcgtactgaacgcatcaatctcgacaaaatccatcgagttctggattgggcggcagaaggactgaataacgtatccatctcccaggttgaactgcgttctcatatccagttctacgacggcatcaagacgtccgatatccatgagaccatcattaaggccgctgccgacctgatctcccgcgatgcgccggattatcagtacctggccgcgcgcctggcgattttccacctgcgtaaaaaggcttacggcgagttcgaaccgccagcgctttacgatcatgtagtgaaaatggttgagctgggtaaatacgacaatcatctgctggaagactacacggaagaagagttcaagcagatggattcgttcatcgtacacgaccgtgatatgaccttctcctacgctgccgttaagcagctggaaggtaaatatctggtacagaaccgtgtaaccggcgagatttatgaaagcgcgcagttcctttatattctggttgccgcttgcctgttctctaactatccgcgtgaaacccgtctcgactacgtgaaacgtttctacgatgcggtttctacattcaaaatttctctgccgacgccaatcatgtccggcgtgcgcaccccgactcgtcagttcagctcctgcgtgctgatcgagtgcggcgacagcctggactccattaacgccacctccagcgcgatcgtgaaatatgtttctcagcgtgccggtatcggcatcaacgccggtcgtattcgcgcgctgggcagcccgattcgcggcggcgaagcgttccacaccggctgtattccgttctacaaacacttccagacggcggtgaaatcctgctctcagggcggcgtgcgcggcggtgcggcgacgctgttctacccgatgtggcatctggaagtggaaagcctgctggtactgaagaacaaccgcggcgtggaaggcaaccgcgtgcgtcacatggactacggcgtacagatcaacaagctgatgtacacccgcctgctgaaaggtgaagacatcaccctgttcagcccgtccgacgttccgggtctgtacgacgctttcttcgccgatcaggacgagttcgagcgtctgtacaccaaatacgaaaaagacgacagcattcgtaagcagcgcgtgaaagccgtggatctgttctcgctgatgatgcaggaacgcgcatcaactggccgtatctacattcagaacgtggatcactgcaacacccacagcccgtttgatgcgcaggttgcgccggtacgccagtccaacctgtgcctggaaatcgccctgccgaccaaaccgctgatggacgttaacgacgaaaacggtgaaatcgcgctgtgtacgctttccgccttcaacctgggcgcaattaacagcctggatgagctggaagagctggcggtgctggcggtacgcgcgctggatgcgctgctggattaccaggattaccctattccggcggctaaacgcggcgcaatgggccgccgtacgctgggtatcggcgtgattaactacgcttactatctggcgaaacacggcgtgcgttactctgacggcagcgcgaacaacctgacgcacaaaacgtttgaagccattcagtactatctgctgaaggcctctaacgagctggcgaaagagcaaggcgcatgcccgtggtttaatgaaaccacttacgctcagggcattctgccgatcgacacctacaaaaaagatctggatgcgatcgccaacgaagcgctgcactacaactgggaagcgcttcgtgagtccatcaaaacgcacggtctgcgtaactccacgctttccgccctgatgccgtctgagacctcttcgcagatctccaacgccactaacggtattgaaccgccgcgcggccatgtcagcatcaaagcgtcgaaagatggcgtactgcgccaggtggtgccggattacgaagggctgaaagaccgctatgagctgctgtgggaaatgccgagcaacgacggctacctgcaactggtcggtatcatgcagaaattcatcgaccaggcgatttcagccaacaccaactacgatccgacgcgcttcccgtctggtaaagtaccgatgcagcaattgctgaaagatctgctcaccgcctataaatttggcgtgaaaaccctgtactatcacaacacccgtgacggtgcggaagatgcgcaggacgatctggtgccgtctattcaggacgatggctgcgaaagcggcgcatgtaagatctaa

SEQ ID NO: 72116 - DNA, 1131 bp, Citrobacter koseri
atggcatacaccactttttcacagacgaaaaacgaccaactcaaagagccgatgttctttggccagccggtcaacgtggcacgctacgaccagcaaaaatatgacatcttcgaaaaactgatcgaaaaacaactctccttcttctggcgcccggaagaagttgacgtttcacgcgatcgtatcgatttccagtcattgccggaacacgaaaaacatattttcatcagcaacctgaagtaccagacgctgctggactccattcagggacgtagcccgaacgtggcattactgccgctgatctccatcccggagctggaaacctgggtagaaacctgggcgttttctgagacgatccactcgcgctcgtatacccatatcatccgcaacatcgttaacgatccggcggtggtatttgacgacatcgtcaccaacgaacaaattcagaagcgcgcggaaggcatttctcactactacgatgagctgattgaaatgaccagctactggcatctgctgggggaaggtacgcacaacgtgaacggcaaaaccgtcaccgtgaacctgcgtgcgctgaaaaaacagctctacctgtgcctgatgagcgttaacgcgctggaagcgattcgtttctacgtcagcttcgcctgctccttcgctttcgcggaacgtaagctgatggaaggtaacgccaaaatcatccgcctgattgcccgcgacgaagcgctgcacctgaccggcacgcagcatatgctgaacctgctgcgtagcggcatagacgatccagaaatggcggaaatcgccgaagagagcaagcaggcgtgctatgacctgtttgtacaggccgcgcagcaagaaaaagagtgggcggattacctgttccgcgacggttccatgatcggcctgaacaaagatattctgtgccagtacgtcgagtacatcaccaatatccgtatgcaggcggtcggcctggagctgccgttccagacgcgctccaacccgatcccgtggatcaacacctggctggtttccgataacgtccaggtggcgccgcaggaagtggaagtcagttcttacctggtcggccagattgactcggaagttgataccgacgatctgagtaacttccagctctga

SEQ ID NO: 72117 - DNA, 255 bp, Citrobacter koseri
atgggacgcgtgacgctacgtctttccggcaccgaagtgctgtgtcgggaagaacacccttctctgctggtggcgcttgaggcgcatcaggttgaagtggagtatcagtgtcgtgcgggctattgcggctcctgccgctgccgtctggttgcaggccaggttgactggctgaccgaaccgctggcttttatcagcgaaggggaaattttgccctgctgttgcagggcaaaaggcgatattgagatagagatgtaa

SEQ ID NO: 72118 - DNA, 1071 bp, Citrobacter koseri
atgaagacgacactgaaaaatctcagcgtggcattgatgctggcgggtatggtcgtgagcagcgcggcaatcgctgcggataaaatcgtgattgcgcaccgtggcgccagcggctatctgccggagcacacactgccagcgaaagcgatggcgtatgcgcagggcgccgattatctggagcaggatttggtgatgacgaaggacgaccatctggtcgtcctgcatgaccactaccttgaccgggttaccgacgttgccgaacgttttccgaatcgcgcccgcaaggacgggcgttactacgccattgatttcacactggacgaaattaaatccctgaagttcaccgaaggttttgatattgagaacggcaagaaagtacagacttaccctggccgtttcccgatgggaaaatcagatttccgcgtgcatacctttgaggaagagattgagtttgttcaggggctgaatcattcgaccggaaaaaatatcggtatttatccagaaatcaaagcgccgtggttccatcatcaggaagggaaggatattgcggctaagacgctggatgtgctgaaaaagtatggttataccggtaaaaaagataacgtttatttgcagtgtttcgatgccgcggagctgaagcgcattaagaatgagctggaaccgaagagggggatggatctcaatctggtgcagttgattgcgtataccgactggaatgaaactcagcaaaaacagccggacggcagttgggttaactataactacgactggatgttcaagcctggcgcgatgaaagaaatcgccagctatgctgacgggatcggcccggactaccatatgctgattgatgaaaaatcgaaggtcgggcatatcacgctgaccggcatggtgaaagaggcgcagcagaacaagatggtggtacacccttacaccgtacgcgccgatcagcttcctgactacgccacggatgttaatcagctttatgacatcctgtataacaaggcgggggtggacggattgttcaccgatttcccggataaagcggtggtgtttttgaaggataagcactaa

SEQ ID NO: 72119 - DNA, 1359 bp, Citrobacter koseri
atgttaagtatttttaaacctgcgcaacataaaacgcgcttgccagcagcggagattgatccgacatatcgtcggctgcgctggcagattttcctggggattttctttggttatgccgcttactatctggtgcgtaagaactttgcgctggcgatgccttacctggtagagcagggattctcgcgcggcgatctgggttttgcgctgtccgggatctccatcgcctatggtttttcgaaatttatcatggggtcggtctccgaccgctcgaatccgcgcgttttcctgcccgcagggttgattctggcggcggccgtgatgttgtttatgggctttgtgccgtgggccacgtccagcattgccgtgatgttcgtgctgctgttcctttgcggctggttccagggaatggggtggccgccgtgcggtcgtacaatggtgcactggtggtcacagaaagaacgtggcggtatcgtctccgtctggaactgcgcgcataacgttggcggcggtattcctccgctgctgttcctgctggggatggcctggtttaatgactggaaagccgcgctctacatgccggcgtttggtgcgatcctggtggcgattttcgctttcgcgctgatgcgcgatacgccgcagtcctgcggtctgccgccgattgaagagtacaaaaacgactacccggatgattacaacgaaaaagcggaagaagagctgactgcaaaacagatctttatgcagtacgtgctgccgaacaaactgttgtggtacatcgcgattgctaacgtgttcgtttacctgctgcgttacggcatcctcgactggtcgccgacctacctgagagaagtgaaacactttgcgctggataaatcatcctgggcgtatttcttgtacgaatatgccggtatcccgggtacgctgctgtgcggctggatgtcggataaagtgttccgtggcaaccgtggcgcaacgggcgtgttctttatgacgctggtgaccattgccacagttgtttactggctgaaccctccgggaaatccgaccgtggatatggcttgtatgatcgttatcggcttcctgatttatggcccggtcatgctgattggtctgcacgcgctggaactggcgccgaaaaaagcggcaggtacggcggcgggcttcaccggcctgtttggttatctcggcggttccgtcgcggcgagcgccattgtcggctataccgttgacttcttcggctgggacggcggcttcatggtgatgatcggcggcagcgttctggcggttatcctgctgattatcgtgatgattggcgaaaaacgccaccatgaagagctgatgttgaaacgcaacggagcttaa

SEQ ID NO: 72120 - DNA, 1629 bp, Citrobacter koseri
atgaaaactcgcgactcgcaaacaagtgacgtgattatcattggtgggggagccacaggcgcagggatcgcccgagactgtgcgctacgcggattgcgcgttatcttagttgagcgccacgatatcgcgaccggcgcaaccggccgtaaccacggcctgctgcatagcggcgcccgctatgccgttaccgacgcggaatctgcccgcgaatgcatcagcgaaaaccagattctgaaacggatcgcccgccactgcattgagccaacggacggtctgttcattaccttgccggaagacgaattatccttccaggccacctttattcgcgcctgcgaagaggcgggtattcgcgccgaagcgattgatccgcaacaggcgcggctgatcgaaccggccgtcaatccgcagctgattggcgcggtgaaagtgcctgacggcactgtcgatcccttccggctgaccgccgcgaatatgctggatgccagagaacatggcgcaatcattttaacggcgcatgaagtcaccggacttattcgcgaaggcgcgaccatttgcggtgtgaacgtgcataaccatctcacaggggaaagccaatcgctgcatgcgccggtcgtggtgaatgccgcaggcatctggggtcagcgcattgcggaatacgccgatctgagcatccgcatgttcccggcgaaagggtcgctgctgattatggatcatcgcattaaccagcatgtgattaaccgctgccgcaagccgtccgacgccgatattctggtgcccggcgataccatctcgctcatcggcactacatcgacccacattgattacaacgagatcgacagcaaccgcgtcactgcggaagaggttgatattctgctgcgtgaaggggaaaaactggcgccggtgatggcgaaaacgcgcattttgcgcgcctactcgggcgtgcgtccgctggtcgccagcgatgacgatccgagcggtcgtaatgtcagccgcggcattgtgctgtttgaccatgctgcacgcgacgggctggacgggtttatcaccattacgggcggtaagctgatgacctaccgcctgatggcggaatgggcaaccgacgcggtatgccgaaaactgggcaacactcgcccctgcgtcaccgcgcaaaccgcccttcccggctcgcaggaacccacggaaaacacgcttaaacgcgtgatctcgttacccgctccgctacgcggttccgccgtctatcgtcacggcgatcgtactccggcctggctcagcgaaggtcgccagcaccgcagcctggtctgtgaatgcgaagcggtcaccgcaggcgaagtgcagtacgccgtcgaaaatttaaccgtcaacagcctgctggatctgcgccgccgtacccgcgtaggcatgggcacatgtcagggagaactgtgcgcctgccgcgccgccgggctgctgcaacgttttaatgtcactaccgccgctcagtccatcactcagctttctgcgttccttaatgaacgctggaaaggcgtacagcctgtcgcctggggagacgcgctgcgcgaaagcgagttcacgcgctgggtttatcagggattgtgcggtctggagaaggagcaccaggatgaaatttga

SEQ ID NO: 72121 - DNA, 1260 bp, Citrobacter koseri
atgaaatttgatacggtcattatgggtggcggtctcgccggattactgtgtggcctggaactgcaaaaacacggtttgcgctgtgcgatcgtcactcgcggccaaagcgcgctgcacttctcctccggctcgctggatctactcagcaccctgccggacggtcagcccgtcacaaatatcactgaaggtctgaatgcgttacgcgaacaagcgccgacgcacccttacaccacaattggcgcgtcaaccgttctggaactggcgcagcaggcgcaagcgttgctggaagcgtctggcgcgcatttacaaggcgatgtacaacagtcgcatctacgcgtcacgccgttgggaacattgcgcgccacctggctaagctcgccagaagtgcccgtctggccgctggccgcgcaacgcatttgcgtcgtcggcatcagcggtttactggactttcaggcgcacctcgcggcggcgtcgctgcgtcagcaccatctcacggtagagacggcagagatcgacctgcctgagctggacgtattacgcgataacccgacggagtttcgtgcggtgaatattgcgcgtttgctcgataacgaagaaaaatggccgttgctccacgacgcgctcttaccgatagcaaaaacctgcgacatgatcatcatgcccgcctgtttcggcctggcggatgacagcctctggcgctggctcaatgaacgcctgccctgctcactgaatttgctgccgacgctgccgccttccgtgccgggcattcgcctgcataatcgcttgcagcgccagtttgttcgtcagggcgggatctggatgccgggcgacgaggtgaaaaaagtgacctgccgtaacggcgtcgtgagcgaagtctggacccgcaaccatgccgatattcctctgcgcccgcgctttgcggtactcgccagcggcagcttcttcagcagcggcctggtcgccgaacgcgacggcattcgcgaacccattatgggactggacgttcagcaaacggccacccgcgccgaatggtatcagcgtgatttctttgatgcgcaaccctggcagcagtttggcgtcacgaccgatgatgcgctgcgcccctcactggcggggcagaccgtagaaaatctgtttgccatcggctcggtgctcggcggattcgatccgatagcccagggatgcggaggcggcgtatgcgcggtcagcgccttacacgccgcacgtcacattgcagaacgtgcaggaggtcagcaatga

SEQ ID NO: 72122 - DNA, 1191 bp, Citrobacter koseri
atgagcgatacgagtttcgagagttgtatcaaatgcacggtgtgcaccaccgcctgcccggtcagccgggtgaatcctggctacccaggccccaaacaggcagggccggacggcgagcgcctgcgcctgaaagacggcgcgctgtacgacgatgcgctgaaatactgcattaactgcaaacgctgcgaagtggcctgcccgtcagacgttaaaattggcgatatcatccagcgtgcgcgcgccaggtatgacacttcgcgcccgtcgctgcgcaactttatcttaagccacaccgatttaatgggcagcgtctctacgccgttcgccccggtcgtcaataccgcgacgtcgctgaaaccggttcgtcagttgctcgactatgcgttgaagatcgaccatcgccgtacgctgccgaaatactccttcggcaccttccgccgctggtatcgcagcgttgcggcacagcaggcgcagtacaaagatcaggtcgccttcttccacggctgcttcgtcaattacaaccatccgcagctcggtaaggatttaattaacgtcctgaacgcaatgggcaccggcgtgcagttgttaagtaaagagaagtgttgcggcgtgccgctgatcgccaacggttttaccgataaagcgcgcaagcaggcggtgagcaatgtggcgtcgctcagagaagcgattggcgtaaaaggcattccggttatcgcaacctcatcaacctgcacctttgccctgcgtgatgaatacccggaagtgctggacgtggataacagcgggctgcgtgagcatatcgaactcgcgacccgctggctgtggcgtaagatcgatgcaggccagacgctgccgctgaaaaaattaccgctgaaggtggtttaccatacgccgtgtcatatggagaagatgggctggacgctctatacgctggagttgctgcgccagatcccaggtctggaactgaccgtgctggactcccagtgctgtgggattgccggaacctacggttttaaaaaggaaaactaccccacctcgcaatccatcggcgccccgctgttccgccagattgaagagagcggcgcggatattgtggtgaccgactgtgaaacctgtaagtggcaaattgagatgtcgacaagcaaacgctgcgaacatccgattaccctgcttgcccaggcattaggttaa

SEQ ID NO: 72123 - DNA, 1197 bp, Citrobacter koseri
atgttaaacgtggagatgttatccaccggggatgaagtgttgcacgggcaaatcgtcgacacgaatgccgcctggctggccgattttttctttaatcaggggttgccgttatcacgccgaaatacggtgggagataatctggatgcgctggtcgccattttacgcgaacgtcgcgaacatgctgacgtgctgattgtgaatggcggcctggggccgaccagcgatgatttaagcgcgctggccgccgccactgcgaaaggtgaaggtctggtgcttcatgacgcgtggctggctgagatggagcgttttttccatgagcgcgggcgggttatggcgccgagtaaccgcaagcaggcagaactgcccgccagcgccgagtttattaataacccggttggcaccgcctgtgggtttgcggtgaagctaaatcgctgcctgatgttctttacccctggcgtcccgtctgaatttaaggtgatggttgagcatgaaattatgccgcgtttgcgtgcgcgttttgcgcttcctgaaccaccggtttgtctgcgactcaccacgtttggacgttcggaaagcgatctggcgcagagcctcgattcgctgccgctaccggcgggcgtgacgatgggatatcgctcttcaatgccgattattgaactgaaactcaccggcccggatgcgcagcgggacgcgatgctggcgctatggccggaggtgaagcgggtggcagggcagaacctgatttttgaagggacggaaggactgcctgcgcaaatcgctcgttgtttgcagacgcgccagctcagcctgacgctcagcgaacagttcaccagcgggctgctggctttgcagctttcccgtgcgaatgcgccgattcttgccagcgaagtggtgccttcccaggaagagacgctggctcagaccgcgcactggacgacagagcgacggagcaaccattacgccggactgtcgctggcggtatccgggctggaaaacgaccatcttaatttcgcgctggcgacgccggatgggacatttgccctgcgcgtgcatttcagcgccagccgctacagtctggcggtgcggcaggaagtttgcgccatgatggcgctgaatatggtgcgtcggtggttaaacggtcaggatattgccagtgaacatggctggattgaggtagtggagtcgttaaccctgtag

SEQ ID NO: 72124 - DNA, 543 bp, Citrobacter koseri
atgaaaaaaagcattttattaggcgttgccggactgttgttcgcttctgcatcggcgaatgcgatgagcattagcggccaggcgggtaaagattacaccaacgttggcgtaggtttcggtactgaatccaccggactggcgttgagcggcaactggatgcataacgacgacgacggcgacgctgccggcgtggggctcggcctgaatattccgcttgggccgctgctggcaacggttggtgggaaaggcgtttataccaatccgaacgacggcgatgaaggctatgcggcggcggtaggcggcgggttacagtggaaaatcggcgacagcttccgtctgtttggcgagtattactactctccagattcactgtccagcggcatcgacagctatgaagaagccaatgccggagcgcgctttaccattatgcgtccgctgagcattgaagcgggctatcgctatctgaacctggcgggtaaagacggcaaccgtgacaacgcgattgccgatggcccgtacgtcggcgttaacgccagcttctga

SEQ ID NO: 72125 - DNA, 1449 bp, Citrobacter koseri
atgagcaaaaaaggactcaccaccgcagcaggcgtgcctgtcgcccataataacaacgttgcaaccgctggcccacgcggccccatgctgctacaggacatctggttcctggaaaaactggcccacttcgatcgtgaagtgatccctgagcgccgtatgcatgccaaaggctcaggcgcgtacggcaccttcaccgtcacgcacgatatttcacgttacactcgcgcaaaaatcttttcggagcccggtaaaaaaacggatctgttcctgcgtttttccaccgtggcgggagagcgcggcgcggcggatgccgagcgcgatattcgcgggtttgcgatcaagttttacactgaagagggcaactgggatctggtgggtaacaacacgcccgttttctatctgcgcgatccgctgaaattcccggatctgaaccatgtcgtgaagcgcgacccacgcaccaacctgcgcaatccgacctacaaatgggactttttctcccatctgccggaatcgctgcaccagttaactatcgactttagcgaccggggtttgcctttctcttaccgtacgatgcacggtttcggtagccacacattcagctttatcaacagcgacaacgaacgtttctgggtgaaattccacctgaaatcgcagcagggcatcgccaacctgatggatgacgaagcgaaacgcctggtggcggacgatcgcgaaagctctcagcgcgacctgtacaacgccatcgaacagggcaacttcccccgctggaaattctacgtgcagatcatgccggaagccgaagcctcacaggtgccgtacaacccgtttgatctgaccaaagtatggccacacggcgattacccgctgattgaagtcggcgtgctggaactgaaccgcaacccggaaaactatttctccgaagtggaacaggtggcgatgaatccggcgaacgtcgtgccggggattagcttctcccctgaccgtatgttgcaggggcgtctcttctcctatggcgatgcgcaccgctatcgtctgggcgttaaccatcagcagatcccggtcaacgccccgcgctgcccgttccataactaccatcgtgacggcgcgatgcgggtggacggcaacagcggcaacggcccaacctatgagccaaacagctttggcgtcttccaggaacagcctgatttcagcgaaccgccgctctctgtcgaaggcgctgccgcgcactgggatcatcgggaagatacggactacttcagccagccgcgtaagctgtatgagttgctgagtgatgaagaacatcagcgtatgttcgcgcgcatcgccgacgacatgaaagatgtgccggaatttattcagcagcgtcagattggcttgtttagcgaagttcatcctgactatggcgcgggcgtcgccgctgccctgcgggcgttaaaagaagcgaaataa

SEQ ID NO: 72126 - DNA, 1416 bp, Citrobacter koseri
atgagcctccgggaaatgcccgatagcgcaagcgtatcgggcctccagccgtcgtcttttaatgactggccgtggcgtcactggcggcaggtgcggggagatgcgcctgccttacgccttaatgatgaagtgctaagctggcgcacactctgtacccgtattgacgcgctggcgagcggttttgccgctcagggtgtctctgaaggctgcggcgtgatgctgcgcgcctggaatcacccgcaaacgctgctggcctggctggctttactgcaatgcggggcaagagtcctgccggttaacccgcagcttccacaaccgctgctcgacgcgctgctgccggacttaacgctccggtttgctttgctgctggagggggagaataccttcccggcgttgcaaccgctgcaaatgcagcaagaggcaggcgaacacgccgcagactggcagccgacgcggctgagttcaatgacgctgacctctggctcaaccggattacccaaagccgcagtgcatacctgccaggcgcatctggccagcgcggaaggggtgctgtccctgatgccgtttgccgatggggatgactggctgttatcgctgccgctgtttcatgtttccggccagggtattatgtggcgctggttgtttgcgggcgcccgaatgaccgtgcgtgagaagcagccgctggaagcaatgctgcaagggtgtacgcatgcgtccctggttcccactcagctgtggcggctgctggagaatccggcatcggtaacgttgaaagcggtactgctgggcggcgcggctatcccggttgaactgacggagcaggctcgcgcgcagggtattcgctgctggtgcggttatggcctgacggaatttgcctcgacggtgtgcgcgaaagaagccgacggcctgggcgatgtcggcgcggcgttaccggggcgggaagtccgaatcgtgaatgacgaagtctggctgcgcgctgccagcatggcggaaggctactggcgcgacggtaagctgatcccgctggtgaacggcgaaggctggttcgccacccgcgatcgcggcgaactgaacgacggtaagctgacgattgccggtcggctggataatctgttcttcagcggcggggaaggcattcagccggaagaggtggaacgcgttatctcggcgcatccacatgttctacaggcgttcgtggtgccggtagaggacagggagttcggccatcgtccggtggcggtggtggaatatgacgcgcaggccgggaacgtcgatctcgcggaatgggtgaaagacaagctggcgcgttttcagcagccggtacgctggttgatgttgccatcagcgctgaaaaacggcgggatcaaagtttcgcgccgggcattgcaggagtgggtgcgcgctaaccgtccgtaa

SEQ ID NO: 72127 - DNA, 963 bp, Citrobacter koseri
atgcgtagcgcgcaggtgtaccgctggcagatccccatggacgcgggggtggttctgcgcgacaggcggttaaaaactcgcgacgggctgtatgtccgtctgtgcgacggcgagcgcgaagggtggggggagatctccccgcttccgggtttcagccaggaaaccctggaagaggcgcaggccgcgctgctggactgggttaacggctggctgcaaggccagtcaacgttgcctgaagtgccctccgtggcgtttggcgttagctgtgcgctggcggaggcggcggggacgttgccagaggcggcggattaccgcgccgcgccgctgtgtacgggcgatccagacgatctggtgctgcaactggctgatatgcctggcgagaaagtcgccaagatcaaagtcggtctgtacgaagcggtacgcgacggaatggtggtcaacctgctgctggaagcggttcccgatctgcatctgcgtctggatgccaatcgcgcctggacgccgctgaaagcgcagcagttcgcgaaatacgtcaacccggactaccgtgcccgcatcgccttcctcgaagaaccgtgtaaaacccgcgacgactcccgcgcctttgcgtgtgaaaccgggattgcgattgcctgggatgaaagtctgcgtgaagacgattttgtctttgcggcggaagcgggcgtcagcgcggtggtcatcaaaccgacgctcaccggaagcctggaaaaggttcgcgagcaggtacaggccgcgcatacgctgggactgacggcggtgatcagctcttccatcgagtcgagcctcggcttaacgcaactggcgcgtattgccgcgtggctgacgccgcagaccattccgggtctggatacgctaagcctgatgcaaacccagcaggtgcgccgctggccgggcagcgctttgccgtgtgttagcgacgatgcgctggaacggctgctatga

SEQ ID NO: 72128 - DNA, 858 bp, Citrobacter koseri
atgatctatcctgatgaaacaatgctttacgcaccggttgaatggcacgactgctccgaaggttacacggacattcgttatgaaaaatccaccgatggtattgcaaaaatcaccattaaccgtccacaggtgcgcaacgcattccgtcctttgaccgtcaaagagatgatccaggcgctggcggatgcccggtatgacgacaacgtgggcgtcattattctgaccggcgaaggcgagaaagccttctgtgcgggcggcgaccagaaggtgcgcggcgactacggcggataccaggatgattccggcgtgcatcacctgaacgtactggatttccagcgccagatccgtacctgcccgaaaccggtcgtggcgatggtcgcagggtactctatcggcggcggtcacgtactgcacatgatgtgtgacctgaccatcgcggcggaaaacgccatcttcggccagacgggcccgaaagtcggctccttcgacggcggctggggcgcttcctatatggcgcgtatcgtcgggcagaaaaaagcgcgtgaaatctggttcctgtgccgtcagtatgacgctaaacaggcgctggatatggggctggtcaacaccgtcgtaccgctggactccctcgaaaaagagaccgtgcgctggtgccgcgaaatgttgcagaacagcccgatggcgctgcgctgcctgaaagcggcgctgaacgccgactgcgacggtcaggcgggtctacaggagctggcgggcaacgccacgatgctgttctacatgacggaagaaggtcaggaaggccgtaacgctttcaaccagaaacgtcagcctgatttcagcaaattcaaacggaatccgtaa

SEQ ID NO: 72129 - DNA, 759 bp, Citrobacter koseri
atgatcctgcgcgcgcaggcgaacggtggtcagccggggtctccctggctggttttcctgcatggattttccggtgattgccgggaatggcagcagatcggtgagcagtttcctgacttttcgcgcctgtatatcgacttgcctggtcacggcgattctgccgatattcgtgtcagcggctttgctaatgtgtgcgacttattgcgtaacacattatttagttacaacatacttaaatactggctggtcggctactcgctcggcggcagagtggcgatgatggcggcgtgccagactctgccgggtctttgcgggctggtggttgaaggcggccacccgggactgcaacgcgaggccgagcgtgacgcgcgccgacggtctgacggtcgttgggcggcgcgctttcgccgtgaaccgctgcgcgacgtgtttactgactggtatcagcagccggttttcgcttcgctggatgcttcgcaaagagaggcgttagtcgcgctgcgcagccagaacaatggcgaaacgctggcggcgatgctggaggcaacctcgcttgccgtacagcctgatttacgcgcgcggctaaatgcgcgcacatttccgttttattatttatgtggtgaacgcgacagcaaattccgcgcgctggcggcggagttgtctgtaccttgccatatgattcgtaacgccggacacaacgcgcatcgggaaaatcccgcaggcgtggtggacagtctggctcagattctgcgtctctga

SEQ ID NO: 72130 - DNA, 1671 bp, Citrobacter koseri
atgtcagtaagcgcatttaaccgacgctgggcggcggtcattctggaagcactcactcgccacggcgtcaggcatgtttgcattgcccctggctcccgctccacgcctttaaccctggcggcagcggaaaattcagcctttattcatcacacgcactttgatgagcgtggtcttggtcatctggcgttagggctggcgaaagtcagtaagcagcccgttgccgttatcgttacttccggtacggcggtggcaaatctctatccggcgctgattgaagcggggcttaccggtgaaaaactgattttattgactgcggatcgtccgccggaactgattgactgcggcgcgaatcaggcgattcgtcaggccgggatgttcgcttctcatccttctcagacgctctctttgccgcgcccgacgcaggatatttccgcgcgctggctggtctctacccttgataacgtcctggcgacgctgcatgccggcgcggtacacatcaactgtccatttgcggaaccgctgtatggcgatatggacgacacggggcttgcctggcagcagagccttggcgactggtggcaggatgacaaaccctggctgcgcgaagcgcgtcggctggaaagcgacaaacagcgcgactggttcttctggcggcaaaaacgcggcgtagtggtggccgggcgcatgagcgcggaagagggcaagaaagtcgcgctttgggcgcagacgctgggctggccgctgattggcgacgtgctgtcgcaaaccgggcagccgctaccgtgcgccgatctctggctgggcaatgcgaaggccgtcactgagcttcagcaggcgcaaattgtggtacaactcggcagcagcctgaccggaaagcgcctgctgcaatggcaggccgcctgcgagccggaagagtactggattattgataatatcgaaggtcgcctggacccggcgcatcatcgcggacgcaggctggtggcgaaaatcgccgactggctggagctgcatccggcggagaaacgccatccctggtgcgtcgatatcccgcgcctggcagagcaggcgtggcaggcggttgtcgcgcgtcgcgatatgttcggcgaagcgcaactggcgcaccgcattcgcgactatctgccggaacaagggcaactgtttgtcggcaacagcctggtggtgcgcctgattgacgcgctgtcgcagctaccggcgggctacccggtgtacagcaaccggggagccagcggtattgatggtttgatctcgacggcggcgggcgttcagcgcgccagcgcgaaatcgacgctggctatcgtcggcgatctgtctgcgctctacgatctcaacgcgctggcgctattgcgccaggtgtccgcgccgtttgtgctgattgtggtgaataacaacggcgggcaaattttctctttgttgccgacgccgcagagcgagcgcgagcggttttacctgatgccgcaaaacgtccattttgaacacgcggcggccatgtttaacctcaaatatcacagcccgcaaagctgggatgagctggatgcggcgctggctggcgcctggcgaacgccgacaaccacggtgattgagctggtcgtgaacgataccgacggggcgcaaaccctgcaacagctgctggcgcaggtgagccatctatga

SEQ ID NO: 72131 - DNA, 1299 bp, Citrobacter koseri
gtgcattcaatcactactgcgctggaaaatctgcggcgccagttatcgcaggagataccggcggcgccaggaatgcgtattgttgatgtgcctttccctctgaatgatgcgtttgacgcattaagctggctggccagtcaggccatctggccgcaattttactggcaacagcgtaacggcgatgaagaagccgcggtgcttggcgccgttgaaacgttcccctctctcgaacaggcgcaacactttctccgccagcatgaatcacaatccgatttgcgtatctggggactgaatgcgtttgaaccgcagcaggggcatttgctgctgccgcgtcttgaatggcgacgcgctggcgcagtggcaacgctgcggctgtatctctacagcccggtttcactgcgtgaagacgccgggcgggcgatcgcgtttctctcttcattaaggggcgtgaagccgattccggcgctgcgcctgcacctgacgggcgagcagcactggccggataaagcgggctggaccagcctgattcagcttgccacgcagactatcgctgaagacgatctcgacaaagtggtgctggcgcgggcgacggatttgcagttttcccattcggtgaatgccgccgccgtgatggcatccagtcgccgtttaaaccttaactgctaccatttttttatggcgttctccgccggaagcgcctttcttggctcgtcgccggaacgcctttggcggcgacgtgaaacggcattgcgcaccgaggcgctggccggcacggtggcgaatcatcccgacgaccatcaggcctggcaactgggcgaatggttgatgaaggatgataaaaaccagcgtgaaaacatgctggtggtggaagatatttgtcagcgcctgcaaagctgcacccactcgctcgatgttttgccgccgcaggtgctcagattacgcaaagtacagcatctgcgccgctgtatctggacggcgctcaatcaggctgacgacacgctctgtttgctacagctacagcccacggcagccgtcgcggggattccgcgtgaacgggcgcgcgcgtttattcagcaacatgaaccgtttgaacgtgagtggtatgccgggtcggcgggttatctgtctttacagcaaagcgaattctgcgtgacgctgcgctcggcgaaagtcgcggcgaacgttgttcgtctgtatgccggggcaggtattgtgcgcgggtctgacccggaacaggaatggcaagagatcgacaacaaagcagccgggctacgcacgttattacagatggaaagctaa

SEQ ID NO: 72132 - DNA, 306 bp, Citrobacter koseri
atgtcttttcattcttatggttcacgtattgatgacgacctggaacttctgagcgaaacgctggaagaggtgctgcgttcctccggcgatcctgccgatcaaaaatatgttgagttaaaagcacgcgcagaacgggcgcttgaagaggtaaaaaatcgcgtcagccatgcgtctgacagctactattaccgcgcaaaacaggcggtttataaagcggatgattacgtgcatgaaaaaccctggcaagggattggcgcaggcgcggcggtcggcctggtgctgggattactgctggcgcggcggtaa

SEQ ID NO: 72133 - DNA, 462 bp, Citrobacter koseri
atgattcactggcaagacctgcatcattctgaattatccgtcccgcaactctatgcgttactgaaattgcgctgcgcggtatttgtggttgaacaacggtgtccgtatctggatgtggacggcgatgacctggtgggggagaaccgtcatatcctgggctggcataacgatgagctggtagcgtatgcgaggattctgaaaagcgacgacgaactggagccggtggtgattgggcgcgtgatcgtcagcgaagcgctgcgcggcgaaaaactggggcaacagcttatggcgcagaccctggcatcctgcgagcaacactggccggagaaggcgctttatctcggcgcacaggcgcatctgcaatccttctatgcgcgattcggctttgttccggtgacggacgtttatgacgaagacggtatcccgcacatgggtatggcgcgtgaggttagccaggtgtga

SEQ ID NO: 72134 - DNA, 918 bp, Citrobacter koseri
atggaattaatttttttaggtacttctgccggcgttcctacccgcacgcgtaatgtcacggcaatattactgaatttacagcacccgacgcaggcggggctatggttattcgactgcggtgaaggcacccagcaccagatgctcaacaccgcgttcaacccaggtaagctcgatcgcattttcatcagccatctgcatggcgatcaccttttcggtttgcccggtctgctgtgcagccgttcgatggcgggaaacgcacagccgctgacgatttacggccccaaaggcattcgcgagttcaccgaaaccgcattgcgccttagcggctcctggactgattatccgctggagatcgttgaaattaccgccggcgaaattctggacgacggtctgcgcaaagtgaccgcctttgcgcttgagcatccgcttgaatgctatggctatcggattgaagagcatgacaagcccggcgcgctggatgccagtgcgctaaaagcggcaggcgtaaagcccggcccgctgtttcaggatctgaaagcgggtaaaaccgtcaccctgaacgatggtcgcgttattaacggcgccgattttctcgcgccagccacgcccgggaaatcggtggcgatatttggcgacaccgcgccatgcgcgtcggccatcacgctggcaaaaggcgtggacgtaatggtgcacgaagcaacgctggatacctcaatggaagaaaaagccaacagccgtgggcacagctccaccaggcaggccgcgcagctggcgcacaatgccgaggtaggccagctcatcattactcacgtcagctcgcgttacgacgacagaggcagtcaacgcctgctggcagaatgtcaggcgatcttccccgcaactgcgctggctcacgatttcgccgttttcacggtttaa

SEQ ID NO: 72135 - DNA, 1005 bp, Citrobacter koseri
atggataatttccagaaagatattgatgacagggctaacttaaccctgtctaaccgctttgaactgctgttattccgtctcggcacatcgctgcatgagcagaaatcggagctatttggcatcaacgtattcaaactgcgcgaaattgtgccaatgcccacatttacgcgccctgccggaatgaaagccccgcttttaggtatggtcaacatccgcgatcaggtgatcccggtcatcgacctgcccgccgtggccgggtgtaaaccggagaacgggcttaacatcctgctgatcaccgaatatgcgcgcagcgtacaggcatttgcggtggagtccgtcgagaatattatgcgtctggactggcagcaggtgcataccgccgagaaagcggttaacggccgctatatcaccagtattgcctgtctggatgaagacaaagagaccaacaacctggcgctggtgctcgacgtagagcaaattctctatgatatcgtgccgtcaaatcacgacttgcgcgccaccaatttgaaaaccagcaagttcaacatcacgccgggtgcggtggcgattgtggcagaagattctaaagttgcccgcgccatgctggagaaagggctgaatgcgatggagatcccgcatcagatgcacgttaccggtcaggatgcctgggagaaaatccagcaactggcgaaagaagcggaggcggaaggcaaaccgattagcgagaaaatcgctctggtgctgaccgacctcgaaatgccggagatggacggtttcaccctgacgcgtaagatcaaaaccgacgagcgcctgaagaaaattccggtggtgatccactcttccctttccggcagcgccaacgaagatcatgtgcgtaaagttaaagcggatggttatgtcgcgaagtttgaagtcaacgaactgtcgtcggtgattcaggaagtaatggaacgcgccgcgcaaaacgtcagcgggccgctggtcagccgtcagttactgagttaa

SEQ ID NO: 72136 - DNA, 1458 bp, Citrobacter koseri
atgacaataactccacaacacctgattgcgctgctaccgctgctgatcgtcggcttgacggtggtggttgtgatgctctccattgcgtggcgacgcaatcacttcctcaatgccacgctgtcggtcattgggcttaacgccgcgctggtttcgctctggtttgtcggccaggcgggcgcgatggacgtcactccgctgatgcgcgttgacggtttcgccatgctttacaccgggctggttctgctggcgagtcttgccacctgtacctttgcctatccgtggcttgaaggctataacgacaaccaggaagagttctacctgctggtgctgattgccgcattgggtggtattctgctggcgaacgcgaaccacctggcggcgctgttcctcggtattgagctgatctctctgccgctgtttggcctgattggttatgccttccgtcagaaacgctcgctggaagccagtatcaaatacaccattctgtctgccgcagcgtcttccttcctgctgttcggtatggcgctggtgtacgcgcagtctggcaacctgtcgtttgtcgcgcttggtaagagcctcggcgacggcatgctgcacgaaccgctgctgctggcgggcttcggtctgatgattgttggtctcggctttaaactctcgctggtgccgttccacctgtggacgccagacgtataccagggcgcgcctgcgccggtttccaccttcctggcgacggcgagcaaaatcgctatcttcggcgtggtgatgcgtctgttcctgtacgcgccggttggcgacagcgaagcggtacgtatcgtgctgggcgtgattgcctttgcctccatcatcttcggtaacctgatggcgctgagccagaccaacattaagcgtctgctcggttactcctctatttctcacctcggctatctgctggtggcgttgatcgccctgcaaagcggcgagatgtcgatggaagccgttggtgtttatctggccggttatctgttcagcagcctcggcgcgttcggcgtggtcagcctgatgtccagcccgttccgtggcccggatgccgattcactgttctcctaccgtggtctgttctggcatcgtccgatcctcgcggcggtgatgaccgtgatgatgctctctctggcgggtatcccgatgacgctgggctttatcggcaaattctacgtcctggcggtcggtgtacaggccagcctgtggtggctggttgccgcggtggtggtcggttccgcgattggtctctactactacctgcgtgttgcggtaagcctctatctgagcgcgccgcagcagcttaaccgcgatgcgccgtctaactggcagtacagcgcgggcggtattgtggttctgatctccgcgctgctggttctggtgctgggtatctacccgcaaccgctgattagcatcgtgcagttagctacgccgctgatgtaa

SEQ ID NO: 72137 - DNA, 1530 bp, Citrobacter koseri
atgttactaccctggctaatattaattccctttatcggtggctttctgtgctggcagaccgaacgcttcggcgtgaaggtgccgcgctggattgcgctgatcaccatgggactgacgctggcgcttggcctgcaactgtggttgcagggcggctattcactgacgcaagccgctggcattccgcagtggcagtctgagttcattctgccgtggatcccgcgcttcggcatctctatccatctggctatcgacggtttgtcgctgctgatggtggtgctgaccggtctgctgggcgttctggcggtactctgctcctggaatgaaatcgaaaaatatcagggcttcttccacctgaacctgatgtggattctgggcggcgttatcggcgtgttccttgccatcgacatgttcctgttcttcttcttctgggaaatgatgctggtgccgatgtacttcctgatcgcgctgtgggggcacaaagcctctgacggtaaaacgcgtatcacggcggctaccaagttcttcatctatacccaggcgagcggtctggtgatgttgattgccatcctggcgctggtgtttgtacaccacaatgcgaccggcgtctggaccttcaactacgaagacctgctgaaaacgccgatgtcgcacggggtggaatacctgctgatgctgggcttcttcatcgcgtttgcggtgaaaatgccggtggttccgctgcacggctggctgccggacgcgcactcccaggcgccgaccgcaggttctgttgacctcgccggtattttgctgaaaacggcggcttacggtctgctgcgcttctcgctgccgctgttcccgaacgcctctgccgagtttgcgccgattgcgatgtggctgggtgtgattggcatcttctacggcgcgtggatggccttcacccagtacgacattaaacgtctgattgcgtacacttccgtttcgcacatgggcttcgtactgattgctatctacaccggcagccagctggcgtaccagggcgctgtaatccagatgattgcgcacggtctgtcggcagcgggtctgttcatcctgtgtggtcagctgtacgaacgtctgcatacgcgtgatatgcgtatgatgggcggtctgtggagcaaaattaaatggttgcctgcgctgtcgatgttcttcgcggtggcgacgctcggtatgccgggcaccggtaacttcgttggcgaatttatgattctgttcggtagctaccaggtggttccggtcattaccgtgatctcaacctttggtctggtgtttgcttccgtttactcgctggcgatgctgcatcgcgcttacttcggtaaagcgaagagccagattgccagccaggacatgccagggatgtcgctgcgagagctgtttatcatcctgttgctggtcgtgcttctggtactgcttggcttctatccgcagccgattctggatacctcgcattccgcgatgagcaacatccagcagtggtttgttaattccgttactactacaaggccgtaa

SEQ ID NO: 72138 - DNA, 1842 bp, Citrobacter koseri
atgaacatgcttgccttaaccattattctgccattgattggctttgtattactggcgttctctcgcggtcgctggtcggaaaacctctccgcgaccgtgggcgtcggctccattggcctggcggcgctggtgacggcgtttgtcggcgttgacttcttcgctaacggcaagcaggcgttcagccagccgctgtggacgtggatgtcggtgggtgatttcaacatcggtttcaacctagtgctggacggcctgtcactgaccatgctctcggtagtgaccggcgtgggtttcctgatccacatgttcgcctcctggtatatgcgcggtgaagagggatactcccgcttcttcgcctacaccaacctgtttatcgccagcatggttattctggtgctgtccgataacctgctgttgatgtacctcggctgggaaggcgtgggtctgtgctcctatctgctgatcggtttctactacaccgatccgaagaatggcgcagcggcaatgaaagcgtttgttgttacccgcgtgggcgacgtgttcctcgcgtttgcgctgttcattctgtacaacgaactgggcaccctgaacttccgcgaaatggtggaactggcgcccgcgcacttcgccgacggcaacaacatgctgatgtgggcgacgctgatgctgctgggcggcgcggtaggtaaatctgcgcagctgccgttgcagacctggcttgcagacgcgatggcgggcccgacgcctgtctccgcgctgatccacgccgcgacgatggttaccgctggtgtttacctgattgcccgtacccacggcctgttcctgatgacgccggaagtgctgcatctggtggggatcgttggggcgattacgctggtgctggccggtttcgccgcgctggtgcagaccgacatcaaacgtgttctcgcttactccaccatgagccagattggctacatgttcctggcgctgggcgtccaggcgtgggatgcggcgattttccacctgatgacgcacgccttctttaaagcgctgctgttcctggcgtccggctcggtgattctggcctgccaccacgaacagaacatcttcaagatgggcggcttgcgtaagtctattccgctggtgtatctctgcttcctggtgggcggcgcggcgctgtcggctctgccgctgattaccgccggcttcttcagtaaggatgagattctggctggcgcgatggcgaatggtcatatcaatctgatggttgcaggtctggtcggtgcgttcatgacctccttgtacaccttccgtatgattttcatcgtgttccacggtaaagaacaaattcacgctcatgcagggaaggggattacgcatcacctgccgctgattgtgctgatggtactgtccacctttgttggcgcgctgattgtgccgccgttgcagggtgtgctgccgcagacgaccgagcttgagcatagccgcgtgatgaccctggaaattgcctccggcgtggttgcgattgtcggcatcctgattgccgcatggctgtggctgggtaaacgtactctggtgacttctgtcgccaacagtgcgccgggccgtctgctgggcacctggtggtataacgcctggggcttcgactggctgtacgacaaagtgttcgtgaagccgttcctcggcgtcgcctggctgctgaaacgcgacccgctcaatgcgctgatgaacgttccggctatcctttcccgctttgcaggtaaaggcctgctgctcagcgagaacggatatctgcgctggtatgtggcatccatgagcatcggtgcggtcgttgtgctggcgctgttgatggtactgcgttga

SEQ ID NO: 72139 - DNA, 303 bp, Citrobacter koseri
atgatccccttacaacatggactgatcctcgcggcgattttattcgtgctgggtttaaccggtctggttatccgccgcaatctgctgtttatgctgattgggctggaaatcatgattaacgcctctgcgctggccttcgtggtcgccggaagctactggggccagacggatggtcaggtgatgtacattctcgccatcagccttgcggctgcggaggcgagtattggcctggcgctgttactgcaacttcaccgccgtcgccagaacctgaacatcgattcagtaagtgagatgcgtggatga

SEQ ID NO: 72140 - DNA, 555 bp, Citrobacter koseri
atggagttcgctttttatatctgtggcctgatcgccattctcgcaaccttgcgagtcatcacccataccaatccggtacacgcgctgctgtatctgattatttcgctgctggcgatttccggggtgtttttctcgctgggcgcttactttgccggtgcgctggaaattatcgtttatgcgggcgccattatggtgctgttcgtgttcgtggtcatgatgctcaacctcggcggttcggaaatcgaacaggaacgccagtggctgaaaccgcaggtgtggattggcccggcgattttgtcggccatcatgctggtggtgatcgtgtacgccattctgggcgtcaacgaccagggtatcgacggtacgccaattagcgccaaagcggtcggtatctcgctgtttgggccttacgttctggcggtcgaactggcctctatgctgctgctggccggtctggttgtcgccttccacgtcggtcgcgaagagcgtgtgggcgaagtgctgagcaaccgtcctggtgacagcgcgaaaagaaaaacggaggagcacgcatga

SEQ ID NO: 72141 - DNA, 543 bp, Citrobacter koseri
atgaccttaaaagaattgttagtaggcttcggcacccaggtacgtagtatctggatgatcggcctgcatgcgttcgcgaaacgcgaaacgcagatgtacccggaagagccggtctatctaccgcctcgttaccgtggccgtatcgtgctgacgcgcgacccggacggcgaggagcgttgcgttgcctgtaacctgtgtgcggtagcctgcccggtaggctgtatctcgctgcaaaaagcagagatgaaagatggtcgctggtatcctgagtttttccgtatcaacttctcacgctgcattttctgcggcctgtgcgaagaagcctgtccgacgacggccattcagctcacccccgattttgaaatgggtgagtacaagcgccaggatctggtttatgagaaagaggatctgctgatctccggtccgggcaaatacccggaatataacttctaccggatggcaggtatggcaatcgacggcaaagataagggcgaagcagagaacgaagccaagcctatcgacgtcaagagcctgttaccgtaa

SEQ ID NO: 72142 - DNA, 978 bp, Citrobacter koseri
atgagttggattacaccggatctgatcgagatcctgctgagcattctcaaagcggtggtgatcctgctggtggtggtcacctgcggggcattcatgagctttggcgagcgtcgtctgctgggtctgttccagaaccgttatgggccaaaccgcgttggctggggcggttcgctccagctggtcgcggacatgatcaaaatgttctttaaagaggactggatcccgaaattctcggatcgcgtcatctttaccctggcgccgatgatcgcttttacctcgctgctgctggcgttcgctatcgttccggttagcccgacctgggttgtcgctgacctgaacatcgggattctgttcttcctgatgatggcgggcctggcggtgtatgcggtgctgttcgccggttggtcgagcaacaacaaatactcgctgctgggggcgatgcgtgcatcagcacagacgctcagctacgaagtgttcctcgggctttccctgatgggcgtggtggcgcaggccggttcatttaatatgaccgacatcgtcaacaaccaggctgatatctggaacgttattccgcagttctttggttttgtcacctttgccatcgcgggcgtggcggtgtgtcaccgtcatccgtttgaccagccggaagccgaacaggaactggccgatggttaccacattgaatattccggtatgaaattcggtctgttcttcgtgggggaatacatcggtatcgttactatctccgcgctgatggtgacgctgttcttcggtggctggcatggcccgttcttaccgccattcatctggttcgcgctgaaaaccgcgttctttatgatgatgttcattttgattcgtgcgtcgttaccgcgtcctcgttatgaccaggtaatgtccttcggctggaaaatctgcctgccgttgacgctcatcaacttgctggtaacggcggctgtcattctctggcaggcgcaataa

SEQ ID NO: 72143 - DNA, 2727 bp, Citrobacter koseri
atggctacgattcatgtagacggcaaagaatatgaggtcaacggcgcagacaacctgctacaggcatgtctgtccctcggccttgatattccgtacttttgctggcacccggcgctgggtagcgtcggtgcttgccgccagtgtgcggtgaagcaatatcaaaacgcggaagatacgcgtggtcgcctggtgatgtcttgtatgacgcctgccaccgacggcacctttatttctattgatgacgaagaagcgaaacagttccgcgaaagcgtggtggaatggttaatgaccaaccacccgcacgattgtccggtctgtgaagagggcggtaactgccaccttcaggatatgaccgtgatgacgggccacaacttccgtcgttaccgtttcactaagcgtactcaccgcaaccaggatttggggccgttcatctctcacgaaatgaaccgctgcatcgcctgctaccgctgcgtgcgttactacaaagactacgcagacggcgcggatctgggcgtatatggcgcgcatgacaacgtctacttcggtcgtcctgaagacggtacgcttgaaagcgaattctccggcaacctggtggaaatctgcccgaccggcgtattcaccgacaaaacgcactccgagcgttataaccgtaagtgggacatgcagtttgcgccaagcatctgccagcagtgctccctcggttgtaacaccagcccgggcgagcgctacggcgaactgcgtcgtatcgagaaccgttacaacgggaccgttaaccactacttcctctgcgaccgtggtcgtttcggttatggttatgtgaacctgaaagacaggcctcgtcagccgattcagcgtcgtggcgatgacctgatcaccctcaacgccgagcaggcgatgcagggcgcggcggatattctgcgtcagtcgaagaaagtgatcggcatcggttctccgcgcgccagcgttgagagcaacttcgcgctgcgtgaactggtgggcgcggataacttctataccggtatcgctcagggcgagcaggaacgtctgcaactggcgctgaaagtgctgcgcgaaggcggcattcatactccggcgctgcgtgacatcgaatcttacgatgcggtactggtgctgggcgaagatattacccagaccggcgcgcgcgttgcgctggcggttcgccaggcggtgaaaggcaaagcgcgtgaaatggcggcggcccagaaagtggccgactggcagattgcggccatcctcaacatcggccagcgcgctaagcatccgctgtttgtgaccaacgttgacaacacccgtctggacgacatcgcggcatggacttaccgtgcgccggtggaagatcaggcgcgtttaggctttgccatcgctcatgcgctggacgacagcgcaccgacggtcaacggcatcagcagcgatttgcagaacaaaatcgacgtcatcgttcaggcgctggcgggtgcgaagaaaccactgattatctccggcaccaacgccggtagcgcggaagtgattcaggcggctgccaacgtggcgaaagcgctgaaaggtcgtggttcggatgtcggcatcaccatgattgcccgctcggtcaacagcatggggctgggcatgatgggcggcggttcgctggatgacgcgttaaccgaattggaaaccggtcgtgccgacgctgtcgtggtgctggaaaacgatctgcaccgtcatgcaagcgccgttcgtgtaaatgccgcgctggcaaaagcgccgctggtgatggtggtcgaccatcaacgcacggcgattatggagaatgcgcatctggtgctctccgccgcaagttttgcggaaagcgacggtacggtcatcaacaacgaaggccgcgcgcagcgtttcttccaggtttatgacccggcctattacgacagcaacaccgtgatgctggaaagctggcgctggctgcactcgctgcacagcaccgtgcagaaccgcgaggtggactggacgcaactggaccacgttattgacgccgcgatcgccgcaatgccgcaactggcgggcattaaagatgccgcgccggacgcgaccttccgcattcgcgggcagaaactggcgcgtgagccgcaccgttacagcggtcgtaccgcgatgcgcgctaacatcagcgttcacgagccgcgtcagccgcaggataaagacaccatgttcgccttctcaatggaagggaacaaccagccgggcgcgccgcgttcgcagattccgtttgcctgggcgccaggctggaactccccgcaggcgtggaacaagttccaggatgaagtgggcggcaaactgcgtcatggcgatccgggcgtgcgtttgattgaagcatctgaaaacggtcttgattacttcactaccgttccggccagcttccaggcacaggatggtcagtggcgtatcgcgccgtactatcacctgtttggcagtgacgaaatgtcgcagcgctctccggtcttccagagccgtatgccgcaaccgtacatcaaactcaacccggctgatgccgcgaagttgggcgtgaatgcgggaacgcgcgtttccttcagctacgacggcaatacggtaacgctgccggttgaaatcgctgaaggcttaacggcagggcaggtcggattgccgatgggtatgcctggcatcgcgccggttctggcgggcggtcgtcttgagaatctgcaggaggcgcaacaatga

SEQ ID NO: 72144 - DNA, 1338 bp, Citrobacter koseri
atgaaaaacgttatccgtactcccgaaacgcatccgctgacctggcgtctgcgtgatgacaagcagccggtatggttggacgaataccgtagtaaaaacggctacgaaggcgcgcgtaaagcgctgaccgggctgtctcctgacgagatcgtcaatcaggtgaaagacgctggcctgaaagggcgcggcggcgcgggcttctccaccggtctgaagtggagcctgatgccgaaagatgaatccatgaacatccgttacctgctgtgtaacgccgatgaaatggagccgggcacctataaagaccgtctgctgatggagcaactgccgcacctgctggtggaaggtatgttgatctccgcctttgccctgaaagcgtaccgtggctacatcttcctgcgtggcgaatacatcgaagcggctgtgcatctgcgccgcgcaatcgcggaagcgaccgaagccggtctgctcggcaaaaacatcatgggcaccggtttcgacttcgaactgtttgtccacaccggggcagggcgttacatctgcggtgaagaaaccgcgctgattaactccctcgaaggtcgtcgcgccaacccgcgttctaagccgccgttcccggcaagctccggcgtatggggcaagccgacctgcgtcaacaacgtggaaacgctgtgtaacgtcccggcgatcctcgcgaacggcgtggagtggtatcagaacatttcgaagagcaaagatgcgggcaccaagctgatgggcttctccggtcgcgtgaaaaatccgggactgtgggaactgccgttcggcactaccgcgcgtgagatcctcgaagattacgccggtggcatgcgcgatggcctgaaattcaaagcctggcagccaggcggcgcgggaaccgacttcctgaccgaagcgcacctcgacctgccgatggaatttgaaagcatcggtaaagcgggcagccgtctgggtacggcgctggcgatggccgttgaccacgaaattggcatggtgtcgctggtgcgtaacctggaagagttttttgcgcgcgaatcgtgcggctggtgtacgccgtgccgcgacggcctgccgtggagtgtaaaaattctgcgtgcgctggaacgcggcgaaggccagcctggggatatcgagacacttgagcaactgtgtcgtttcctcgggccgggtaaaaccttctgtgcgcatgcgccaggcgcggtcgaaccgttgcagagcgccattaaatatttccgcgaagaattcgaagctggcatcaagcagccgttcagcaatacccatgtgattggtggtatacagccgaacctgctgaaagagcgctggtaa

SEQ ID NO: 72145 - DNA, 501 bp, Citrobacter koseri
atgcacgagaatcaacaaccacaaaccgaggcttttgagctgagtgcggcagagcgtgaagccattgagcacgagaagcaccactacgaagacccgcgtgcggcgtccattgaagcgctgaaaatcgtacagaagcagcgtggctgggtgccggatggcgcgatctacgcgatcgccgacgtgctgggtattccggcgagcgatgtcgaaggcgtcgctacattctacagccagatcttccgccagccggtcggtcgccatgtgatccgctactgtgacagcgtggtgtgccatatcaccggttatcaggggatccaggccgcactggagaaaaaactcaatatcaagccggggcagacgacctttgacggtcgctttactctgctgccgacctgttgcctggggaactgcgacaaagggccgaacatgatgattgatgaggatactcacagccatctgacaccggaagccattcccgaactactggagcggtataaatga

SEQ ID NO: 72146 - DNA, 1803 bp, Citrobacter koseri
atggtgaacaatatgaccgacttaaccgcgcaagacgctgtatggcaaacccgggatcatctggatgacccggtcattggcgaactgcgcaaccgttttgggccggatgcctttaccgttcaggcgacccgcaccggggtacccgttgtttgggtcaagcgtgaacaattactggaagttggcgatttcttaaagaaactgccgaaaccttacgtcatgctgtttgacttacacggcatggacgagcgtctgcgcacgcaccgcgacgggttacccgctgcggatttttccgttttctaccacctgatctcaatagaccgcaatcgcgacatcatgctcaaggtggcattgtctgaaaacgacctgcatgtgccgacgtttaccaaactcttcccgaacgccaactggtacgagcgtgaaacctgggagatgtttggcatcacgtttgacggccacccgcacctgacgcgtctgctgatgccgccgacctgggaagggcatccgctgcgtaaagactacccggcgcgtgctaccgaattcgatccgtttgagctgaccaaagccaagcaggatctggagatggaagcgctgaccttcaaaccggaagactgggggatgcaacgcggcaccgaaaacgaggactttatgttcctcaacctcggtccgaaccacccgtcctcacacggcgcattccgtatcgtacttcagcttgacggcgaagaaattgtcgactgcgtgcctgacatcggctaccaccaccgtggcgctgagaaaatgggcgaacgccagtcctggcacagctacattccgtataccgaccgtatcgaatacctcggcggctgcgtcaacgaaatgccgtacgtactggcggtagagaaactggcgggtatcaccgtaccggatcgcgtaaacgtgattcgcgttatgctctccgaactgttccgcattaacagccacctgctgtacatctcgacgtttattcaggacgtcggcgcgatgaccccggtcttcttcgcctttaccgaccgtcagaaaatttacgatgtggtggaagcgatcaccggtttccgtatgcacccggcctggttccgtatcggcggcgtcgcgcacgacctgccgcgcggctgggatcgcctgctgcgtgatttcctggactggatgccgaagcgtctggactcctacgagaaagcggcgctgcgcaacaccatcctgaaagggcgttctcagggcgttgccgcttacggcaagaaagaagcgctggactggggctgtacaggcgccgcgctgcgtgcgaccggtattgatttcgacgtgcgtaaatcacgtccgtactctggctacgagaactttgactttgaaatcccggttggcggcggcgtgtccgactgctatacccgcgtgatgctgaaagtcgaagagctgcgtcagagtctgcgcatccttgagcagtgcctcaataacatgccggaaggcccgttcaaagcggatcacccgctgacgacgccgccgccgaaagagcgcacgctgcaacatatcgaaaccctgatcacccacttcctgcaagtgtcgtggggcccggtcatgcctgcgaatgaatccttccagatggtagaggcgaccaagggtattaacagttactacctgaccagcgatggcagcaccatgagttaccgtactcgtatccgtaccccgagctatgcgcatttgcagcagattccggtggcggtgcgcggcagcctggtgtctgacctgatcgttcatttaggtagtatcgattttgttatgtcagatgtggaccgctaa

SEQ ID NO: 72147 - DNA, 675 bp, Citrobacter koseri
atggattatacgctcacccgcatagatcccaacggtgagaatgaccgttaccccctgcaaaaacaggagatcgtaaccgaccccttggagcaagaaatcaacaaaagcgtgtacatgggcaagctcgaacacgcgctgcatgacatggttaactggggtcgtaagaattcaatttggccgtataacttcggcctttcctgctgctatgtcgagatggtgacctcttttaccgccgtgcatgacgtggcgcgcttcggcgcggaagtactgcgtgcttcgccgcgtcaggccgacctgatggtggtagcgggaacatgctttaccaagatggcgcctgttattcagcgtttgtatgaccagatgctggagccgaagtgggtgatttccatgggggcatgcgctaactctggcggtatgtacgatatttattcggttgtgcagggcgttgataaatttatcccggtagatgtgtatatcccgggctgtccgccgcgccctgaagcgtacatgcaggcgctgatgttgttgcaggaatctattggcaaagaacgtcgtccgctctcctgggtggttggcgatcagggcgtttatcgcgccaatatgcagtcagagcgcgaacgtaaacgcggcgaacgcattgcagtaacgaatctacgtacaccagacgagatttaa

SEQ ID NO: 72148 - DNA, 444 bp, Citrobacter koseri
atgagtatgtcaacatccactgaaatcatcgctcatcactgggcattcgctatctttcttattattgccattggcctgtgctgcctgatgctcgtcggcggttggtttttaggcggtcgcgcacgcgcgaggtcgaaaaacaccccgtttgaatcaggtatcgactcggtcggctccgcccgcttacgcctgtctgccaagttttacctggtagccatgttcttcgttatcttcgacgttgaagcgctgtatctgttcgcatggtcgacctctatccgtgaaagcggttgggtaggctttgtggaagctgcaatttttatttttgtgttactggctggtctggtttatctggtgcgtattggcgcgctggactggacgcccgcgcgttcacgccgcgagcgtatgaacccggaaacgaacagtatcgctaatcgtcaacgctaa

SEQ ID NO: 72149 - DNA, 939 bp, Citrobacter koseri
atgataaatgcaaatcgtccgataattaacctcgacctcgatctgctgagaacgtttgttgctgttgccgatctgaacacgttcgccgctgcggcggcggcggtatgtcgtactcagtctgcggtgagccagcaaatgcagcgtcttgagcagcttgtgggcaaggagttgttcgcccgtcatggtcgtaacaagctgttgactgaacacggtattcagcttctgggttacgccagaaaaatcctgcgctttaatgatgaggcgtgctcatcattgatgtttagcaatcttcagggcgtattaacaattggcgcttctgatgaatccgccgatacgatattgcctttcctgctcaatcggatcagttcggtttacccgaagcttgctctggatgtgagggtgaaacgtaacgcctttatggtggatatgctgaaatcgcaggaagtggatttgattgtcactacgcaccgtccgggatctttcgagttcctgaacctgcgcacatcgccgacacactggtactgcgcggcggaatatgtgctacagaagggggaaccgatcccgctggtgttgttagacgatcccagcccgttccgcgatatcgtattagcgacgttgaatgcggcgaatattccctggcgccttgcctatgtggcctcaacgttagcggcagtacgcgcggccgtaaaagccggactggggatcaccgcgcgaccggttgagatgatgagcccggatttacgcgtactcggcgctgcggatggattaccgccgttgccagatacggaatacttactgtgtcgcgatccatcaggccagaacgaactggcgcaggttatctatcaggcgatggacagttaccaaaacccctggcaatacagtcagtttactcccgaaggaggagacgattcgctgatggttgaaggtgactttgagtag

SEQ ID NO: 72150 - DNA, 1218 bp, Citrobacter koseri
atgtcccccattgaaaaatccagcaaactagaaaatgtctgttatgacatccgcggccctgttctgaaagaagcgaaacgcctggaagaagaaggcaataaagttctgaaactgaacatcggcaaccccgccccttttggttttgaagcgcctgatgagatcctggtcgatgtcatccgcaatttaccaacggcgcaggggtattgcgattcaaagggtctgtattccgcacgcaaagcgatcatgcagcattaccaggcgcgcggcatgcgcgacgtcaccgtagaagatatctatattggtaacggcgtatccgaattgatcgtgcaggcaatgcaggcgttgctgaacagcggggacgaaatgctggttcccgcgccggattacccgctgtggacagcggcagtctcgctctccagcggcaaagcggtacactatctttgcgatgaatcttctgactggttcccggatctcgacgacatccgcgccaaaatcacgccgcgtacccgtggcattgtgataatcaacccgaataacccaaccggcgcggtttactccaaagagctgctgatggagatcgttgagattgcccgtcaacataatctgatcattttcgccgatgagatttacgacaagatcctctacgacgacgctgagcatcattctatcgccgcgctggcgccggatctgctgaccattacgttcaacgggctgtccaaaacctatcgcgtcgccggattccgccagggctggatggtgctgaatgggccgaaaaaacacgccaaaggctacattgaagggctggagatgctggcgtcaatgcgtctgtgcgccaacgttccggcgcagcacgcgatccagacggcgctgggcggctaccagagtattagcgaattcatcatgccgggcgggcgtttgtatgaacaacgtaaccgtgcgtgggagctgattaacgatattccgggcgtttcctgcgtgaaaccgcgcggcgcactgtatatgttcccgaaaatagatgcgaagcgctttaacatccacgatgaccagaagatggtgctcgacttcctgttgcaggaaaaagtgctgctggtgcagggaaccgcgttcaactggccctggccagatcacttccgcattgtaacgctgcctcgtattgacgacattgaaatgtcgctgagtaaattcgggcgcttcctgtcagggtatcatcagctgtaa

SEQ ID NO: 72151 - DNA, 600 bp, Citrobacter koseri
atgaagcagagccatttttttgcccacctctcccgcctgaaactgattaaccgctggccattgatgcgcaacgtgcgcaccgaaaacgtctccgaacacagtttgcaggtggcgatggtcgcccacgcgcttgccgctatcaaaaatcgcaaattcggcggccaggtcaatgccgagcgtattgcgctactggcgatgtaccacgatgcctctgaagtgttgaccggcgatctcccgactccggtgaaatacttcaactcgcaaatcgcgcaggaatacaaagcgattgagaaaattgcccaacaaaaactggtggatatggttcctgacgaactgcgcgatatttttgcaccgctgatcgacgaacatgcttacagcgaagaagagaaatcggttgtgaagcaagccgacgcgctttgcgcctatctgaagtgtctggaagagttatcggcgggcaataatgaattcctgctggcaaaaacgcgactggaaaaaaccctggcgtcgcgccgcagcgaagagatggactattttatggcggtgtttgtacccagttttcacctctcgctggatgaaatcagccaggattcgccgctataa

SEQ ID NO: 72152 - DNA, 1833 bp, Citrobacter koseri
gtgaacggtgaattgatatgggttctctccttactggcgattgccgttatcttgtttgcgacgggcaaagtgcgcatggacgcgattgctttgctggtcattgtcgcctttgttctgagtggaacattgagcatctcagaggccttttccggcttcagcgatcctaacgttgttctgattgccgccttgttcattatcggcgacggtctggtgcgtaccggcgtcgcgacggtcatgggcgcctggctggtgaaaatggccggtagcagcgaagtcaaaatgctggtgctgctgatgatcaccgttgccgggcttggcgcgtttatgagttcaaccggcgtggtcgcgattttcatcccggtggtgttaagtgtttctatgcgtatgcagacctcgccttcacgcctgatgatgccgctcagttttgccggtcttatcagcggcatgatgacgctggtggcgacgccgcccaacctggtggtgaacagtgaactgctacgcgaagggctgcacggttttagcttctttagcgtcacgccgattgggctggtggtgctgttcctcggcattatctacatgctggtgatgcgctttatgttgaaaggggatgatgcgtcacagcagcgtgatggctggaagcgtcgcgcctttcgcgatttaatcaaagagtaccgtctgaccggtcgcgctcgtcggcttgccattcgcccgggttcgccgatggtcggccagcgtctggatgacctcaagctgcgtgagcgctatggcgcgaacgtgatcggcgttgaacgctggcggcgctttcggcgcgttattgttaacgtcaatggggtgtcggaatttcgcgcccgcgatgtgttactgatcgatatgtctgccgccgaggtggatctccgggaattttgcagcgagcaactgctggagccgatggttttacgcggcgagtatttttccgatcaggcgctggacgtggggatggcggaaatctccctgattcccgaatcggaactgattggcaaatcggtgcgcgagatcggttttcgtacgcgctatggcctgaatgtcgtcggtctgaagcgtgacggcgtggcaatcgaagggtcgcttgcggatgaagcgctgttaatgggcgacattattctggtggtgggaaactggaagttgattggtcaactggcgaagcagggccgtgacttcgtggtgctgaatatgcctgtggaagtgagcgatgcctccccggcgcacagccaggcgccgcatgcgatcttctgtctggtgctgatggttgcgctgatgctgaccgatgagatccctaacccgatcgcggcaatcattgcttgcctgctgatggggaaattccgctgtattgatgcagaaagctcctacaaagcgattcactggccgagcattatcctgattgtcgggatgatgccttttgcgctggcgttgcaaaagaccggcggcgttgatctggtcgttaaaggattgatggatgtcggcggcggttatggcccctatatgatgctggcatgtctgtttgtgctgtgcgccaccatcgggctgtttatttccaataccgcgaccgccgtgctgatggcgccgatagcccttgcggcagcgaagtcgatgggggtgtcaccgtatcctttcgcgatggtggtggcaatggcggcgtcggcggcgttcatgacgccggtctcctcgccggtaaacacgctggttttggggccggggaactacagttttagcgactttgttaagatcggggtgccgtttacgataatcgttatggcggtatgcgtggtgatgatcccggtgctgtttccgttttga

SEQ ID NO: 72153 - DNA, 660 bp, Citrobacter koseri
gtgcagtgcaaaggctttctgtttgatctggatggaacgttggttgactccttacccgttgtagagcggacatggtgcaactgggccgatcgttttggcctcacgcatgatgaagtgctgagctttattcatggcaagcaggctatcacttctctgcgacacttcatggcgggaaagccggaagaggagatcgccgcagagtttacccgtctggaacagatagaagcgacggatacggcagggattgtggcgttgccgggcgcggtcgaattgctggatcatctcaataaagccggtatcccctgggctatcgttacttcaggatcgatgccggttgcgcgggcgcgccatcaggcggccggccttcctgcgccagaggtgtttgttaccgctgaacgcgtgaaacgcggcaaaccggaaccggatgcctatctgctgggcgcccaactgctcggtctctcgccgcaggaatgcgcggtggtggaagatgcgcctgccgggattctctccgggctggccgccgggtgtcatgtcattgcggtcaatgcgcctgaggacacgccccgcattgcggacgtcgattttgccctgagcagccttgagcacatttccgtgaccaaacagcccaacggaaacgtggtcgttcttagaaatacctga

SEQ ID NO: 72154 - DNA, 495 bp, Citrobacter koseri
atggaaatgaccaacgctcaacgtctgattttgtctaaccagtacaaaatgatgaccatgctcgacccgaccaacgccgagcgttatcgccgtctgcaaacgatcattgaacgcggctacggcttgcagatgcgtgagctggatcgtgagtttggcgaactgaaggaagaaacctgccgcacgattatcgatatcatggagatgtatcacgccttacatgtgtcctggactaacctgaaagacgcgcagaccattgacgagcgtcgcgtgacgttcctcgggtttgatgccgcaaccgaagcgcgttatctgggctacgttcgctttatggtgaacgtggaagggcgctatacccactttgatgccggtacgcatggctttaatgcccagacgccgatgtgggaaaaataccagcgtatgctgaatgtctggcactcctgcccgcgccagtatcacctgagctcgaacgaaattaatcagattatcaatgcctga

SEQ ID NO: 72155 - DNA, 456 bp, Citrobacter koseri
atgtcgacaccggataatcgctccgtgaatttttttagtttgtttcgccgggggcagcactacgcaaagacgtggccgatggaaaagcgccttgcgccggtctttgttgagaaccgcgtgattcgtatgacgcgttacgccattcgctttatgccgccgatcgcggtgtttacgctgtgctggcaaatcgcgctgggtggtcagttaggcccggcggttgccacagccctgtttgcgctcagtttaccgatgcaaggcatgtggtggctgggaaaacgctccgttacgccactcccgccttctatcctgaactggttctatgaggttcggggaaaattgcaggaagccgggcaggcgttgtcgccagtagaaggcaagccggattaccaggcattagctgacacgcttaagcgcgccttcaaacaactggataaaactttccttgatgatttgtaa

SEQ ID NO: 72156 - DNA, 1203 bp, Citrobacter koseri
atgtcgagtaagttagtactggttctgaactgcggtagctcctcactgaaatttgcaatcatcgatgcagcgaacggtgaagaatacctttctggtttagccgaatgtttccatcttcctgaagcacgtatcaaatggaaaatggacggcaataaacaagaagcggctttaggtgcaggcgccgctcacagtgaagcgctgaactttattgttaatactattctggcacaaaaaccagaactgtctgcgcagttgaccgcaattggtcaccgtatcgtacacggcggcgagaagtataccagctccgtggtcattgatgactccgttatccagggcatcaaagacgctgcgccgttcgctccgctgcacaacccggctcacctgatcgggattactgaagcgctgaaatccttcccggaactgaaagaaaagaacgttgcagtgttcgacaccgcgttccatcaaaccatgccggaagagtcttacctgtatgccctgccgtacagcctgtacaaagaacacggcgtacgtcgttacggtttccacggcaccagccactactatgtgactcaggaagccgcaaaaatgctgaacaagccggttgaagaactgaacatcatcacctgccatctgggcaacggtggttccgtttctgcaatccgcaacggccagtgcgttgacacctctatgggtctgaccccgctggaaggtctggtgatgggcacccgtaccggtgacatcgacccggcaatcatcttcttcctgcatgacaacctgggcatgaacatcgatcagatcaacaaaatgctgaccaaagaatcaggtctgttgggtctgaccgaagtcaccagcgactgccgttatgttgaagacaactacaccgctaaagaagatgcgaaacgtgcgatggacgtatactgccaccgtctggcgaaatacatcggctcttacaccgcgctgatggaaggtcgtctggacgcagtggtcttcactggcggtatcggtgaaaacgcggcgatggtgcgtgagctgtctctgggtaaactgggcgtgctgggctttgaagtcgatcacgaacgtaacctggctgcccgtttcggcaaatctggtttcatcaacaaagaaggtacccgtcctgcggtggttatcccaaccaacgaagaactggttatcgcgcaagacgcgagccgtctgactgcctga

SEQ ID NO: 72157 - DNA, 2145 bp, Citrobacter koseri
gtgtcccgtattattatgctgatccctaccggaaccagcgtcggcctgaccagcgtcagccttggcgtcatccgtgctatggaacgcaaaggcgttcgtctgagcgtctttaagccaatcgcccaaccgcgcgcgggtggcaatgcgccagaccagactaccgctatcgttcgtgcaaactcgtctgtcccggcggctgaaccgctgaagatgagccacgttgaatctctgctgtccagcaatcagaaagatgtgctgatggaagagatcatcgcgaactatcacgcgaacaccaaagatgcggaagtggtgctggttgaaggcctggttccgacgcgtaaacaccagttcgctcagtctctgaactacgaaatcgcgaaaacgctgaatgcggaaatcgtcttcgtgatgtctcagggcaccgacaccccggaacagctaaatgagcgtatcgaactgactcgcagcagcttcggcggcgcgaaaaacaccaacatcaccggcgttattgttaacaaactgaacgcaccggttgatgagcagggccgtacccgcccggatctgtctgagattttcgacgactcttccaaagcgaaagtggtgaaagtcgatccggctaaactccaggaatccagcccgttgccggttctgggcgcggtgccgtggagcttcgatctgattgcaacccgtgcaatcgacatggcgcgtcacctgaacgcaaccgttgtgaacgaaggcgatatcaacacccgtcgcgtgaagtctgtcacgttctgcgcgcgcagcattccgcacatgctggagcacttccgtgcgggttctctgctggtgacttctgctgaccgtcctgacgtactggttgcggcttgcctggcggcaatgaacggcgtggaaatcggcgctctgctgctgaccggcggctacgaaatggacgcgcgcatctctaaactgtgcgaacgtgctttcgcaaccggcctgccggtattcatggtgaataccaacacctggcagacctctctgagcctacagagcttcaacctggaagttccggttgatgaccatgagcgtatcgaaaaagttcaggaatacgttgccaactacatcaacgctgactggattgaatccctgaccgcgacctctgagcgcagccgtcgtctgtctccgcctgcattccgctaccagttgaccgagctggcgcgtaaagccggtaaacgcgtcgttctgccggaaggcgacgaaccgcgtaccgttaaagcggcagccatctgtgctgaacgtggcatcgcgacttgcgtcctgctgggtaacccggaagagatcaaccgcgttgccgcctctcagggcgtagaactgggcgcaggcattgaaatcgtcgacccggaagtggttcgcgaaagctatgtcgctcgtctggttgagctgcgtaagagcaaaggcatgaccgaaaccgtcgcccgcgaacagctggaagacaatgtggttctcggtacgctgatgctggaacaggatgaagttgacggtctggtttccggtgcggttcacaccacggcaaacaccattcgtccgccgctacagctgatcaaaacagcgccgggcagctctctggtctcttccgtgttcttcatgctgctgccggaacaggtctatgtttacggcgactgtgcgatcaacccggacccgacggcagaacagctggctgaaatcgccatccagtctgcggaatccgcaattgccttcggcatcgaaccgcgcgttgcgatgctctcctactccaccggcacctctggcgcaggcagcgacgtagagaaagtgcgtgaagcgacccgtctggcgcaggaaaaacgccctgatctgatgatcgacggcccgctgcaatacgacgccgcagtcatggctgatgttgcgaaatccaaagcgccgaactctccggttgcaggtcgcgcgaccgtgttcatcttcccggatctgaacaccggtaacaccacctacaaagcggtacagcgttctgccgacctgatctccatcgggccaatgctacagggtatgcgcaagccggtgaacgacctgtcccgtggcgcgctggtagatgatatcgtctacaccatcgctctgaccgcgattcagtcttcacagcaacagcagtaa

SEQ ID NO: 72158 - DNA, 1527 bp, Citrobacter koseri
atgtccgcagtaacagaatcgcaatcgcggcctgccaaaaaatgggcgatgcccgatacgctggtgattatttttttcgtcgccattctgaccagtcttgccacctgggttgttcccgtcggaatgttcgacagccaggaagtgcagtatcaggttgacgggcagacgaaaacccgcaaagtggtcgatccccactcttttcgtattctcaccaacgaagccggtgaagcgcagtatcatcgcgtccagctctttacaaccggcgatgaaagacccggcttaatgaatttcccgttcgaaggattaacctccggttctaaattcggcacggccgtcggcatcatcatgtttatgctggtgatcggcggcgcgttcggcatcgtcatgcgtacaggcaccattgataacggtattctggcgctgatacgccatacgcgcggcaatgaggtgctgtttatcccggtgctgttcatcctcttctcactgggcggcgcggtttttggcatgggggaagaggccgtcgcctttgcgattattatcgcgccgctgatggtacgcctgggctatgacagcattaccaccgtactggtcacctatatcgccacccagattggttttgccagttcatggatgaacccgttttgcgtcgtggtcgcgcaggggattgcgggcgtaccggtcctttccggctcaggcttgcgcattgttgtgtggttcgtttccacgctgattggtcttctttttaccctgacctatgccgcgcgggtgaaaaagaatccccatctgtcgcgcgtccatgaatccgatcgctattttcgtgagaagcaggacgaaatcgctcaacgtcctttcaccgctggcgactggctggtgctgattgtgctgaccggggtgatgatttgggttatctggggagtgattgttcacgcgtggtttattcctgagattgccagccagttcttcacgatgggcgtggtcatcggcatcattggagttattttccgtctcaacggtatgacggtgaacatcatggcctcctcgttcaccgaaggcgccagaatgatgattgccccggccctgctggtcggcttcgccaaaggtattttattgctcgtgggcaacggcgaggcgggcgacgccagcgtgttaaataccctgttgaacagtattgctcacggtattagcggtctgaacaacgctgtcgctgcatggtttatgctgctgtttcaggccgtattcaatttctttgtcacctccggttccggtcaggcggcgttaacgatgccgcttctggctccgttaggcgatctggtaggcgtaaatcgtcaggttacggtactggccttccagtttggcgatggcttcagccacatcatctatccaacgtccgcatcgttaatggcgacattaggcgtgtgccgggtcgattttcgcaactggctgaaggttggcgcgacgctgctggggttgctgtttatcatgtccagcgtggtggttatcggcgcgcagttgatgggataccattga

SEQ ID NO: 72159 - DNA, 954 bp, Citrobacter koseri
atgattaaggttgcacccgcgggacaaaaagagagcatggaaatgcgtaaagtgtacgccggatttgtggcggagcagatagaggccggaagccagattatcgcacttgaggcggatctcatgagttctatggcaatggacggcgttgcgagggattatcctcagcatgtgatcaactgcggcattatggaagccaatgtgatcggcactgcggcagggctatctctcaccggacgcaaaccgtttgtccataccttcaccgcctttgccagccgtcgctgttttgatcagctgtttatgtcactcgattaccagcgcaacaacgtcaaggtgatcgcgtcggatgccggcgtgactgcctgccataacggcggcacccatatgtcttttgaagatatgggcattgtgcgcgggctggcgcattcggtcgtgctggaagtgaccgatgccgtcatgtttaaggatattttgcgccagcttatcgatcttgagggtttttactgggttcgaaccatccgcaaacaggccccgagcatttatgcgccgggatcgacgttcaccatcggtaaagggaatgttctgcgtgaaggcagtgatatcacgctaattgccaacggcattatggttgccgaggcgctggaggcggctcgccagctggagcaggatggcgtgaacgcggcggttatcgatatgtttaccctcaagcccatcgaccgcatgctggtaaaaaattacgcggagaaaaccgggcgaatcgtcacctgtgaaaaccacagcattcataatggacttgggtcggccgtggctgaagtgctggttgaaacgtgtccggtgcccatgcgccgcgtcggcgttaaagagcgttatggtcaggtcgggacgcaggatttcttgcagaaggagtatggtttgaccgcagaggctattgtggaagcggcgaaaacgctgctgtaa

SEQ ID NO: 72160 - DNA, 831 bp, Citrobacter koseri
atgaatgtgaatgaagttactcaactggcgcgcgatattcgcgttgccactcttaagtcattgacgcagcttggctttggccactacggtggcagcatgtcggtagtggagacgctggcggtgctgtacggcgcggtgatgaagattgacccggccgaccccgactggccggagcgcgattactttgtgctgtctaaaggtcatgctggcccggcgctctacagcacgctggcgattaaaggctactttccgacagaagaactgaacacgcttaaccagaacggcacccgtctgccgagccatccagacaggttaaaaacgcgcggcgtggatgcgacgaccggttcactggggcaggggatctcgattgccggggggatggcgctgtcgcacaaacttgccgggcgcccgaatcgggtattttgtatcgtcggcgacggcgagctgaatgaagggcagtgctgggaagcgtttcagtttatcgcccatcatcgcctgaacaacctgacggtgtttatcgactggaacaagcagcagctggacggcgaactggatgagattatttgcccgttcgatctggaagggaaattccgcgctttcggttttgatgttgtcaccgtgaaaggcgatgacattgcccggctgctggaggtcgttcagccggttccggcggcggatgcccgtccgcgcgtggtgatcctcgacagtattaaaggacagggcgtgccctacctggagcaattaagcaactcccaccacctgcgtctgaccgatgagatgaaaaaggcgcttaacgagacgattcgccaactggaggccgcgcatgattaa

SEQ ID NO: 72161 - DNA, 1392 bp, Citrobacter koseri
atgtttatccttgaaacgctgaattttgttgttgatatcttaaaagtgccctcggtgctggtggggttaattgccttaattggccttgtcgcgcagaaaaaagcgttttccgatgtggtgaaaggcacgattaaaactattttaggttttattgtactgggcggcggcgcaacggtactggtcgggtctttaaatccactcggcggaatgtttgaacatgcgtttaatatccaggggattattccaaataacgaagcgattgtttccattgcgctggaaaaatacggggcgtctacggcgctgatcatggcctttggcatggtggcgaatattgtggtcgcccgttttacccgtctgaaatacatctttctgacaggacaccatacgttttatatggcctgtatgatcggcgtaatcctgacggttgccggttttgacggcgttggtctcgtctttaccggatcgctgattctggggctggtgatggcctttttcccggcgctggcgcagcgctatatgaagcgtatcaccggcactgatgatattgcgtttggtcacttcggcacgctgggttatgtgctgtccggctggatcggcagcctttgcggtaaaggttcccgctctaccgaagagatgaacctgcctaaaaacttaagcttcctgcgcgacagttcgatctctatctctctgaccatgatgattatctatctgatcatggcggtgagcgcggggcgtgaatatgtcgagagcaccttcagcggcggtcagaactacctggtctacgccatcattatggcgatcacctttgcggcgggtgtgttcatcatcctacagggcgtacgtctgattctggcggaaatcgtaccggcctttaccggattctcagaaaaactggtgccgaacgcccgtccggcgctggactgcccggtcgtctatccgtatgcgcctaacgcggtgctgattggcttcctgtttagcttcctcggcggcctggtcggtctgttcctgctcggacagatgaagctggtgctgatcctgccgggcgtggtgccgcacttctttaccggtgcgacggctggcgtatttggtaatgccactggcgggcgtcgcggtgcgatgatcggcgcatttgccaacggtctgttgatcactttcctgcccgttctgctgctgcccgtgctgggggcgatcggctttgcgaatacgaccttctcagacgctgatttcggcgcagtggggattgtgctgggcaatctggcgcgctacctgtcgccgcttgccatcacagggcttgttgtggcgttgttcgtgctgctggtggcgtacaacgtgtttgcgaaaaacaaatctgcggggggtaacacgcaggagaataccggagccaaattatga

SEQ ID NO: 72162 - DNA, 273 bp, Citrobacter koseri
atgaaaattatggctatttgcggttctggcctgggcagtagttttatggtcgaaatgaatattaaaaaagtgctcaggaagcttgaaattgatgccgatgttgagcattccgatctctcctcggcgacgcctggcgctgcggatctgtttgtcatggcgaaagatattgccgccagcgccagcgtgccggaaagccagctggtggtgattaataacattatcgatattaatgaacttgaagcgcagctgcgcgcctggttcgccaaacaataa

SEQ ID NO: 72163 - DNA, 444 bp, Citrobacter koseri
gtgctcaatcactggctaactgatgcaaccatcatgcggcaggcgagggtggaaaactggccgcaggcgctggaaatatgcgccagaccgctgctggatgctggcgttatcacacctgaatatctgacggcgattgttgagcagcatcataagctgggcgcgtattacgttctggctccgggtctggcgatgccgcatgcgcgaccggaagagggagcaaagggattaggcttgtcgttgttaaagctggagcagggggtctcatttggggcgggcgagttcgatccggtggatatcatcgtgatgctcgcggcacccgacaaacacagccatattgaaatgatttcggcgctggcagagttattttccagcgatgacgatatggataaattacatcaggcgaagtcgctggaggaaataaaaacaataatcgcacgtttctaa

SEQ ID NO: 72164 - DNA, 1020 bp, Citrobacter koseri
atgtctataactcgaaaacggcgtagtactggtaaggtgaccatcgccgatgttgctcagcttgccggtgtcggcaccatgaccgtgtcccgtgcattacgcacgcctgagcaagtttccgataaactccgggaaaaaatcgaagccgcagtgaatgaactcggttatatgcccaatctcgccgcaagcgcgctggcttccgcctcgtcacggaccatcgcgatggtcgtcccgaacctcacggaagccggttgttcagaaatgtttgccggacttcagcaagttttacagcctgcgggataccagattatgctggcggagtcccttcaccatctcgaacaggaagagaaactgctggagacgctgctggcctccaacattgccgccgccattttactcagcgtcgagcacagcgacacggtgcgtcactggttaaaaaacgcgtcgattccggtgatggaaattggcgccattcgtaccgatccgattgatatgaatatcggtattgataacgtcgcggcaatgtacgaactgaccgaaatgctcattcagcgcggttatcagaatattggcctgctttgcgccaatcaggaacagtggatctttcaacagcatttgcagggctggtacaaggcgatgttgcgccaccatatgtcgcccaatcgcgtgattaacgccgccctgccgccaaacttttccaccggcgcctcgcagcttcccgaatttattctggcgtggcccgagctggacgcgctggtgtgcgtatccgatgagctggcttgcggtgcgttatatgagtgtcagcgcagacggatcaaagtccctgacgatctggcggtggtaggattcggcgacagcgatgtgagccgggtttgtcagccgccgttaacgacaatggccgtaccgcatcgtaagataggccttgaagccggacgcgcgctgctggaacgtctgaaggatggcaactggagcgatcggaaacagatcgcctccagtttatgcttgcgggatagctgttag

SEQ ID NO: 72165 - DNA, 555 bp, Citrobacter koseri
atggtggaacagcgtcgtttggcaagtactgaatgggtggatattgtgaatgaagagaacgaagtcattgcgcaatccagccgggagcaaatgcgagcgcagcgcttacgtcatcgtgcaacgtatatcgtcgtgcatgatggtatgggcaaaattctggttcaacgccgtactgagacaaaagactttttgcccggcatgttagatgccaccgcaggtggagtggtgcaggccgatgagcaactgctggagtctgcacgacgtgaagcggaagaagaactgggtatcgcaggcgtgccgtttgctgagcacggtcagttctattttgaagatgataattgccgtgtctggggcgggttatttagctgcgtttctcatgggccattcgcgcttcaggaagaagaggtcagcgaagtctgctggctgacgccggaagaaattacggcgcgttgcgatgagttcaccccggactcattgaaagcgctggcgttgtggatgacccgcaatgccaacaatgaatcggcaaagcaagagaagcaagaagagacggaataa

SEQ ID NO: 72166 - DNA, 552 bp, Citrobacter koseri
atgaaactgatgtttgcatcggacattcatggttcgttacctgcgacagagcgcgtacttgaacggtttgcgcaaagtggcgcgcaatggctggtgatactgggtgatgtgctttatcacgggccgcgtaacgcgctgccggaaggctacgcaccggcgcaggtggcagaacgcctgaacgagcaggcggcgcgtattattgcggtacggggaaactgtgacagcgaagtggatcagatgctgctccatttcccgataaccgcgccgtggcagcaagtgctgctggaaaaccggcgcatcttcctgacccacggacacctgttcggggcggataatgtacccgcgttaaatgcgggcgacgttcttgcttatgggcatactcatctgccggtcgctgaaaaacgcggcgagctgtatcactttaatccaggctcagtcagcatcccgaaaggtgggtttgcagcaagctacggcattctggatgataatgttttgagcgtaatcgcactcaatgatcaaagtatcattgcgcaggtcgcgattaatccgtaa

SEQ ID NO: 72167 - DNA, 645 bp, Citrobacter koseri
atgagcaaacccgagattacgctttggtcagacgctaactttttctctccttacgtcttatccgtttatgttgccttgcaggagaaaggactgccttttaccctcaaaaccgttgacctgagcagcggcgagcatttgcagccctcatggcagggctacgcgttaacgcgccgcgtcccggtgctggaaatcgatggcttcgagcttagcgagtcgtcggcgattaccgagtatctggaagatcgctttgcgccgccgcagtgggagcgcatctacccgcacgatctgcaaaaacgcgcccgcgcgcgccagattcaggcgtggttacgcagtgatttaatgcccattcgcgaggaacgttcgacggatgtggtctttgcggcggccaggaaagacccgttaagcgaagcggggaaagagagcgcggcaaaactggtggcgacggccagtggtttgctcgcccacggtaagccgaatttatttggcgaatggtgtattgcggataccgatttggcgctcatgcttaaccgcctcgtactcaacggcgacgagattcctgaggcactggcggaatatgcagcattccagtggcagcgcgcctccgttcaacgttttattgcgctttctgcaaagcgttccggctga

SEQ ID NO: 72168 - DNA, 363 bp, Citrobacter koseri
atgtcacaacctgacgctattattcgtataaaaaaccttcgtctgcgcacgtttatcggtatcaaagaggaagagatcctcaaccgccaggatatcgttattaacgttgccattcactatccggcggaaaaagcccgcgtaagcgaggacatcaacgacgcgctgaattaccgcaccatcacaaaaaacattattcagcatgtggagagcaaccgattctcgctgttagaaaaattaactcaggatgtgctcgacatcgcacgcgaacatcactgggtcacttatgctgaagtagagatcgacaaacttcatgctctgcgttatgccgattccgtctccatgacgctcagctggcgacgttaa

SEQ ID NO: 72169 - DNA, 894 bp, Citrobacter koseri
atgcagattctgattaccggcggtactggcctgataggacgccacctgattccccgtctgctggagctggggcatcaggtgacggtcgtcacacggagtcccgataaggcgcgtcagcttctcgactcccgggttgcgctgtggaaagggctggaggacaggcagaacctcaacgacatagacgccgtggtcaaccttgctggcgagcctatcgccgacaaacgctggaccgcgcagcaaaaagagcgtttgtgtcaaagccgctggtccatcacgcaaaagctggcggatttgatcaacgccagcgagacgcccccggccgcgttaatttccgggtctgccgcaggttattacggcgatctgggcgaagttgtcgtaacggaagaagagccgccgcataacgaatttacccataagttatgcgcgcgttgggagcagattgcctgtagcgcgcaaagtgataaaacgcgcgtttgtctgctacgcaccggcgtcgtcctggcgccggaaggcggcattctggccaaaatgatcccgccgtttcgcctggggctgggagggccaattggcaatgggcgtcagtatctggcttggatccatatcgatgatatggtaaacggtattctctggctgctggataacgacctgcgcggcccgttcaatatggtttcgccttatccggttcgtaatgaacagttcgcccatgcgctgggtcatgcgctgaaccgccccgcaatcctgcgcgttcccgcgaccgtcatccgcctgttaatgggggaatcatcggtactggtgctgggcggacagcgcgcattgccaaaaagactggaggcggcggggttttcatttcgctggtacgatttagaagaagcgctggccgatgtgatccgttaa

SEQ ID NO: 72170 - DNA, 513 bp, Citrobacter koseri
atggcgataataaccacctcccgattgaccctctccctttttcaacctactgactggtccttttttctcgcactgcgtgaaaaccctgaaatcatgcgttatatggctgatatcacgccggaaaaagatactcgcctgctgttcgcccgtcgcctcgtctcaaagcataccttcgtcatccgcctgcataacagcgataagcctttgggcgacattggcttacaaattagccaccattatccgcaggaagccgatatcggctatacggtgctcccggaagcgcaagggagagggatcgccacagaagccttatatgccgtctgcgattacgcctttacgcataccagcgtgaaagcgataaacgcctatgtgctggcagagaatcacgcgtctgtgcgcgtgctggaaaagcgtggttttacgcggactcaggtgctggaaaacgcctatgaggtgaacggcatccggtatgacgaatgggtataccgtctggaaagcgaaatggggcgataa

SEQ ID NO: 72171 - DNA, 774 bp, Citrobacter koseri
atgtctgagaataaattaaacgttatcgatttgcacaagcgctacggcgaacatgaggtgctgaaaggggtatcgctacaggctaacgccggagatgtgatcagtattatcggatcgtctggctccggtaagagtacctttctgcgctgtattaacttcctcgaaaaaccgagcgaagggtcgattgtggtgagcggccagaatatttccctggtgcgtgataaagacggccagctcaaggtcgccgataaaaaccagctgcggctgctgcgtacgcgcctgacgatggtatttcagcacttcaatctctggagccacatgacggtgttggagaacgttatggaagcgccgattcaggtgctgggattaagcaaacatgaagcgcgcgagcgtgcggtgaaatacctggcgaaagttggtattgatgaacgtgcgcagggaaaatacccggtacacctctcaggtggtcagcagcagcgcgtctcaattgcccgcgcgttggcgatggaacctgaggtgctgctgtttgatgagccgacatcggcgcttgaccccgaactggtaggcgaagtcttgcgtatcatgcagcagttagcggaagaggggaaaacgatggtggtggtgacgcatgaaatggggtttgcccgccatgtttccacccatgtgattttcctgcatcaggggaaaatcgaagaagaaggcgatccagagcaggtattcggcaacccgcaaagcccgcgtttgcaacagttcctgaaaggctcgctgaagtag

SEQ ID NO: 72172 - DNA, 717 bp, Citrobacter koseri
gtgatcgagattattcaggagtactggaaatccctgctctggagcgatggctatcgctttaccggcgtggccattacgctgtggctgctgatctcctcggtggtgatgggcggcattctggcgctgtttttggcgattggccgcgtttccagcaacaaatttatccagttccccatctggttgtttacctatgtttttcgcggtacgccgctgtatgtgcaactgctggtgttctattccgggatgtacacgctggagatcgtgaaaggaaccgatctcctcaacgcgtttttccgtagcggtcttaactgtaccgttctggcgttgacgctgaatacctgcgcctataccacggagattttcgctggcgccatccgttcagtaccgcacggggaaattgaagcggcgcgggcgtatggcttctcatcgttcaaaatgtatcgctgtattattttaccttccgcgctgcgtatcgcgctgccagcatacagtaacgaagtgatcctgatgctgcactcaaccgcgctggcgtttaccgcgacggtgccggatttgctgaaaatcgcccgtgatattaactcggcaacctatcaaccgtttaccgcattcggcattgccgctgtgctgtatttgattatttcgtatgtcctgattagcctgttccgtaaagcggaaaagcgctggctccagcacgtgaaaccttcttcaacgcactga

SEQ ID NO: 72173 - DNA, 687 bp, Citrobacter koseri
atgttgtacgggttttcaggtgttatttttcagggcgcgcttgtcacgcttgagctggccctcagctcagttgtgctggccgtgctgatcggtcttgtcggcgcgggcgcgaaactttcgcaaaaccgggtgacgggacttattttcgaaggctataccaccctgattcgcggggtgccggatctggttttaatgctgctgattttctacgggttgcaaatcgcgctcaatgcggtgaccgacgcgatgggaatagggcagattgatattgatccgatggtcgccggtattatcaccctgggttttatctatggcgcgtactttacggaaactttccgtggcgcgtttatggcggtgcccaaagggcatattgaagcggcgacggcattcggtttcaccggttcgcaaatattccggcggattatgttcccggcgatgatgcgctacgccttaccggggattggtaataactggcaggttatcctcaaagcgacggcgctggtttcgctgctcgggctggaagatgtggtcaaagccacgcagctggccggcaagagcacctgggagccattctatttcgccgtagtgtgcgggctgatttatctggtatttacaacggtttccaatggtgtgctgctgttcctcgagcgccgctactccgtgggtgtgaagagggctgacctgtga

SEQ ID NO: 72174 - DNA, 783 bp, Citrobacter koseri
atgaaaaaactggtgttgtctctttctctggtcctggctttctccagtgctaccgcagcatttgcagccattccgcaaaaagttcgtatcggtaccgatccgacttatgccccttttgaatcgaaaaatgcacagggtgaattggtcggttttgatatcgatctggccaaagagctgtgcaaacgcattaatacacaatgtaccttcgtggaaaacccgctggatgcgctgatcccgtcgttaaaagcgaagaaaatcgatgccatcatgtcctcgctttccatcaccgaaaagcgtcagcaggaaatcgcgtttaccgacaagttctatgcagcagactctcgcctggtcgtcgccaaagattctgatatccagccgaccgttgagtccctgaaaggcaagcgtgttggcgtattgcagggcaccacgcaggaaacgtttggtaatgagcactgggcgccgaaaggcattgaaatcgtctcttaccagggtcaggacaatatctattccgacctgacggcagggcgtatcgatgccgctttccaggatgaagtcgcagccagcgaaggcttcctgaagcaacctgtaggcaaagattacaaattcggcggcccgtcggtgaaagacgagaaactgttcggtgtgggtacgggtatggggctgcgcaaagaggataacgaactgcgcgaagccctgaacaaagcatttgcggaaatgcgtgctgacggtacttacgagaagctggcgaaaaagtactttgattttgatgtttacggcggttaa

SEQ ID NO: 72175 - DNA, 783 bp, Citrobacter koseri
atgaagaagacagttctcgctttgtctttgctggtaggactttccgcaacggcggccagctacgcagcgctaccgcagacggttcgtattggtacagacgcgacatatgcgcctttctcatcgaaagatgccaaaggggattttgtcggttttgatatcgatctgggcaatgagatgtgcaagcgtatgcagatcaaatgcacctgggtcggtagcgattttgacgcgctgattccttccctgaaagcgaagaaaatcgatgccatcatttcatcgctctccattaccgagaaacgccagcaggagattgccttctccgacaaactgtatgccgccgactcgcgcctgattgccgcgaaaggctcatctgtccagccgacgattgactcgctgaagggcaagcacgttggcgtactgcaaggctccactcaggaagcctatgcgaatgataactggcgcagcaaaggcgtggatgttgtggcctacgcgaaccaggatctcatctattccgacctgacggcgggccgtcttgatgctgcattgcaggatgaagttgcggccagcgaagggttcctcaaacagcctgcgggcaaggactatgcgtttgccggtccttccgtgaaagataaaaagtactttggcgacggcaccggggttggcttgcgtaaagacgataccgagctgaaagcggcgtttgataaagcgctgagcgatctgcgtgctgacggcacctacgacaagatggcgaaaaagtactttgactttaacgtctacggcgactga

SEQ ID NO: 72176 - DNA, 570 bp, Citrobacter koseri
atgaaacgactcattgtagggattagcggcgccagcggcgcgatttatggcgtgcgcttgttgcaggttctgcgtgacgtggcggatgtggagacccacctggtgatgagtccggctgcgcgtcagacgcttgcgctggaaaccgaattttccttgcgggaggtgcaggctctggccgatgtcacccatgatgcgcgcgatattgccgccagtatctcttctggctcctttcagacggcggggatggtgattttaccgtgctcgatcaaaacgctctccggtattgtgcacagctataccgacggacttctcacccgtgcggcggatgttgtcctgaaagaacgccgcccgctggtgttgtgcgtgcgggaaacgccgctgcatttaggacacctgcgcctcatgactcaggcggctgaaattggcgccgttattatgccaccggttcccgcgttttatcattgcccgcaaacgctggatgatgtgattaatcagacggttaatcgtgttctggatcagtttgatatcacgttgccgcacgatcttttcacccgttggcagggcgcataa

SEQ ID NO: 72177 - DNA, 1518 bp, Citrobacter koseri
atgtgcggtattgtcggtatcgccggtgttatgccggtaaaccagtcgatttatgacgcgttaacggtgctccagcatcgtggtcaggatgccgctggcatcatcaccattgatgccaacaactgcttccgcttgcgtaaggcaaacggactggtgagcgatgtttttgaagctcgccatatgcagcgtatgcagggcaatatgggcatcgggcatgtgcgttacccaacggctggcagctccagcgcctccgaagctcaacctttttacgtcaactcgccgtatggcatcacgcttgctcataacggcaacctgaccaatgcgcatgagctgcgtaaaaagctgtttgaagaaaaacgtcgtcacatcaacaccacgtcagattctgaaatcctgctcaatatttttgccagcgagctggataatttccgtcattatccgctggaagccgataacatttttgccgccattgccgcgaccaaccgccagattcgcggcgcgtatgcctgtgtggcgatgattatcgggcacggtatggtggctttccgcgatccgaacggcatccgcccgctggtgctgggcaagcgcgacattggcgatggccgcactgaatatatggttgcgtccgaaagcgtggcgcttgatacgctgggcttcgaattcctgcgcgatgtggcgccgggcgaagcggtgtacatcaccgaaaaaggccagttgtttacccgccagtgcgcggataacccggtcagcaatccgtgcctgttcgaatacgtctactttgcgcgcccggactcgttcatcgataaaatttccgtctacagcgcccgcgtgaatatggggacgaagctgggcgaaaaaattgcccgtgaatgggaagatctggatatcgatgtggtgatcccgattccagaaacctcctgcgatatcgcgctggaaatcgcccgcattctgggtaaaccgtaccgccagggctttgtgaaaaaccgctacgttggccggacgtttatcatgccgggccagcagttgcgccgtaagtccgtgcgtcgcaagctgaacgccaaccgcgctgaattccgcgataagaacgtcctgctggtggatgactccatcgtgcgcggcaccacatctgaacagattattgagatggcccgtgaagcaggcgcgaagaaggtctatctggcttctgctgcgccggaaattcgcttcccgaacgtttacggtattgatatgccaacggcaaatgagctgattgctcacggtcgtgaagtggatgaaattcgccagatcatcggcgctgatgggcttatcttccaggatctggacgatctgattgaagctgttcgcgctgagaacccggatattcagcagtttgaatgttcggtctttaacggcgtgtatgtcacgaaagacgttgaccagcagtatctcgattatctggattccctgcgtaacgacgatgtcaaagcgatgcagcgtcagaacgaagtggaaaacctggaaatgcataacgaaggttaa

SEQ ID NO: 72178 - DNA, 489 bp, Citrobacter koseri
atggtctggattgattacgccattatcgcggtgattggtttttcctgtctggttagcctgatccgtggctttgttcgtgaagcgttatcgttggtgacatggggttgtgctttctttgtcgccagccattactacacttacctgtctgtctggtttacgggctttgaagacgaactggttcgaaatgggattgctatcgcgatactgtttatcgcgacgcttatcgtcggcgctatcgtgaactttgtgataggtcagctggtggagaaaaccggcctgtcgggtactgacagggtgttggggatctgttttggcgcgctgcgaggagcgttaatcgtcgccgccattctgttctttctcgatacgtttaccggcctgtcgaaaagcgaagactggagcaagtcgcagcttatcccgcagttcagtttcatcatcagatggttctttgactatctgcaaagctcgtcaagtttcttgcccagaacgtaa

SEQ ID NO: 72179 - DNA, 684 bp, Citrobacter koseri
gtggcgagtaagtttcagaatcgtttagttggcacaatcgtgctggtcgctctcggggtgattgtgcttcccgggctgctcgacgggcagaaaaaacactatcaggatgagtttgcggcgatcccgctggtgccaaagcctggcgatcgcgatgagcctgatatgatgccagccgcaacacaggcgttgccgacccagccgcctgaaggcgctgctgaggaagtgcgtgccggagatgcggcagcgccgtctctggacccttcccgttttgctgcggaaaacaacgccagtttcgatcctgtccccgcacctgttgagccgccgaagccgaaaccggttgaaaaaccgaagccacagccgaagccgcagcaaccggtagcggcaacgccgacaccggcacctgagccgaaacctgctgctgaagaaaaacccgcgccaacgggtaaagcgtacgttgtgcagttgggggcattgaaaaatgccgataaggtcaatgagatagtgggtaaacttcgtggcgcgggcttccgggtatatacttctccgtcaacgccggtacagggtaaaataacccgtatcctcgtcgggcctgacgcctcaagagacaagctgaaaaattctcttggcgagttacagcagatctccggtttgagtggcgtggtgatgggttacagcccgaactaa

SEQ ID NO: 72180 - DNA, 1407 bp, Citrobacter koseri
atgagcttgcacaggcaagtgattcgggtgagcgagagcagccaacacacctgcagcttgaaagacgacgagtacaaaagggcagggccagctggcgctgccttttgcttttctcaacgtaacgaatttacaggcaacatggacaataaacgcattccccaagccgcgtcgcccctggcagcgtggctttcttatctggaaaacctgcacagtaaaactatcgatttgggcctggaacgcgtaagccgggttgcggcgcgtctgggcgtgctgaaacccgcgccgtttgtctttacggtggcgggtactaacggtaaaggaacgacctgccgcacgctggagtctgtgctgacggcggcgggctataaagtgggcgtctacagttctccgcatctggtgcgctacaccgagcgcgttcgcgtgcaggggaacgagttgccggagtctgctcataccgcctcgttcgccgagattgaggccgcgcgcgaagacatttctctgacctactttgaatatggcacgctgtcggcgctgtggctgtttaagcaggctcagcttgacgtggtgattctggaagtcgggctgggcggacgtctggacgcgaccaatattgttgatgcggatgttgcggtagtgaccagcattgcgctggatcataccgactggctggggccggatcgcgaaagtatcgggcgtgagaaggcggggatcttccgggcggaaaaaccggctatcgtcggcgaaccggaaatgccgtataccatcgccgatgtggcgcaggaaaccggggcgcagttacagcgtcgtggcgtggactggcattatgatgtgacgggcgacggctggtcgtttacggacggcgaaggtacgctggcgaatcttccgctgccgcaggtgcctcagcctaacgccgccaccgcgctggcggcactgcgcgccagcgggctgaacatcagcgagcaggcgattcgtgacggcattgcccgggcgattttgcccggtcgtttccagatagtgagcgaattgccacgggtgattctggatgtcgcacataatccccatgctgcggaatatctgacagagcgcctgaaaatgttgccgaaaaacgggcgtatacttgccgttatcggtatgctacatgataaagatatcgcagggacgttggcctggctgaaaagcgtggtcgacgactggtattgcgcgccgctggaagggccgcgcggcgcgacggcggagcaattgctggaacatctgggcaaaggcactgtctatgacagtgtcgcgctggcgtggcatgcagcgctggcagaggcgaaaccagaagataccgtgctggtgtgtggatcatttcacacggttgcacatgtcatggaagtgatggacgcggggagaagcggtggcgagtaa

SEQ ID NO: 72181 - DNA, 915 bp, Citrobacter koseri
atgagctggattgaacgaattaaaagcaacattactcccacccgcaaggcaagcattcctgaaggggtgtggaccaagtgtgatagctgcggtcaggttttataccgtgctgagctggaacgtaatcttgaggtctgtccgaagtgtgaccatcatatgcgcatgtcggcgcgcaatcgcctgcatagcctgttagatgaaggaagccttgtggaactgggcagcgaacttgagccgaaagatgtgctgaagttccgcgactccaagaagtataaagatcgtctggcttccgcgcagaaggaaaccggcgagaaagacgcgctggtggtgatgaaaggtacgctccacgatatgccgattgttgcggcggcgtttgagttctcctttatgggcggttctatggggtctgtggtcggcgcgcgttttgtccgtgccgttgagcaggcgctggaagataactgcccgctgatctgcttctccgcttccggcggcgcgcgtatgcaggaagcgctgatgtcgctgatgcagatggcgaaaacctccgctgcgctggcgaaaatgcaagagcgtggtctgccgtatatctccgtgttgaccgatccgacaatgggcggcgtttccgcaagttttgcgatgctcggcgatctcaacattgcagaaccgaaagcgttaattggttttgcgggcccgcgtgttattgaacaaaccgtacgtgagaaactgccgccgggattccagcgcagtgagtttctgattgaaaaaggcgctatcgatatgatcgtccgccgcccggaaatgcgcctgaaactggcaagcgttctggcgaagctgatgaatcttccggcgccgaacccggatgcgccgcgcgaaggcgaggtggtgccgccggtacccgatcaggaacccgaggcctga

SEQ ID NO: 72182 - DNA, 660 bp, Citrobacter koseri
atggacctgatttattttctgattgattttatcctgcacattgacgtgcacctggcggagctggtcgcggaatacggcgtctgggtatatgccattctgttcctgatcctgttttgtgaaaccggactggtggtgacgccgtttctgccgggggattcgttgctgtttgtggcgggcgcgttggcgtcgctggaaaccaacgatctcaacgtacatattatggtgatgttaatgctgatcgccgcgattgtcggcgacgcggtgaactacacgatcggcagattgtttggcgaacggttattcagtaacccgaattcaaaaattttccgtcgcagttaccttgataagacgcaccagttttatgagaagcatggcgggaaaaccattattctggcccgttttgtcccgattgtcagaacctttgcgccgtttgttgcgggtatgggacatatgtcttatcgccattttgccgcgtataacgtcattggcgcgcttttatgggtgctgctcttcacatatgcggggtatttcttcggtacgatccctatgattcaggataaccttaagttactgatcgtagggattattgtggtgtcgatattgccaggcgtggttgaaatcattcgccataagcgcgctgcgtcgcgtgccgcaaaatag

SEQ ID NO: 72183 - DNA, 813 bp, Citrobacter koseri
atgtcagcagtggaacaaccgccagtttataaaattgcgctgggcattgagtacgacggcagcaaatattatggctggcaacgccagaacgaagtgcgtagcgttcaggaaaagctggaaaaagcgctttctcaggttgccaacgaacctgttaacgtgttttgcgccgggcggacagacgctggcgtacacggaacggggcaggtggtgcattttgaaaccaccgcgttgcgtaaagacgcggcgtggacgctgggtgtaaatgcgaatttacctggtgacatcgcggttcgttgggttaaagctgtacctgaggattttcacgcccggtttagcgcaacggctcgccgttatcgctacatcatctacaatcatcggttgcgtccggcgattttaggtcatggggttacgcacttttatgagccgctggacgcagaacgtatgcaccgggcggcgcagtgtctgattggtgaaaatgattttacctcgtttcgcgcggtacagtgccaatcgcgtacgccgtggcgaaacgtgatgcacattaacgtgacgcgtcacggtgcgtatgtggtggtcgatatcaaagccaatgcctttgtacatcatatggtcaggaatattgtcggtagcctgatggaagtaggcgcccacaaccagccggagagctggatagcagagttgctggcggcgaaggacaggcggctttcagcagcaacggcgaaagcggaagggttgtatctggttgcggttgattacccggaacggtttgaccttcccaaaacgccactgggcccgctgtttctggcggactaa

SEQ ID NO: 72184 - DNA, 1014 bp, Citrobacter koseri
atgtctgaaggctggaacattgccatcctgggcgcaacaggcgccgtaggcgaagccctgctcgaaacgctggctgaacgtcagttcccggtcggtgagatttatgcgctggcgcgtaatgaaagtgcgggcgaacatctgcgctatagcggcaagtcggtcattgtgcaggatgtcgctgattttgactggacgcaggcgcaactggcgttttttgtcgctggcgctgaagcctctgccgcatgggttgaggaagccaccaatgcgggctgtctggtgatcgacagcagcggcctgtttgccctggaaccggatgtgccattagtggtgccggaagtgaacccgtctgtgctggccgattaccgcaaccgcaatgtgatcgccgtagccaacagcctgaccagccagttgctggcctcgctgaagccgctgattgatgaaggcggtctgtcgcgcattagcgtcaccagcctgctttctgcctcggcacacgggaaaaaagcggtggatgcgctggccggtcagagcgcgaaactgctcaacggtatccctatcgacgaagatgatttctttggtcgccaactggcgtttaacatgctgccgctcctgccggacagtgaaggcagcgtgcgcgaagagcgccgtatcgttgatgaagtgcgtaagattttgcaggacgacgggctgatgatttccgccagctgcattcagtcgccggtattttatggccatgcgcaaatggtcagttttgaagcgctgcgcccgctggcggcggatgaggcgcgcgatgccttttctcgcggcgaagatattgtgctgtctgaagagactgacttcccgactcaggtgggcgatgcgtctggcaatccgcagctttctgtcggttgtgtgcgtaacgattatggcatgccggagcaggttcagttctggtcggtggccgataacgttcgctttggcggcgcgctgatggcggtcaaaaccgcggaaaaactggtgcaggagtacctgtactga

SEQ ID NO: 72185 - DNA, 1137 bp, Citrobacter koseri
gtgaaaatcctcgttgatgaaaatatgccttatgcccgcgaattatttagccgtctgggtgaggtcaaagcggttcccggtcgccccattcccgttgcagaacttgatgatgcggatgcgttaatggtgcgttcagtcaccaaagtgaatgaagcgctgcttggggggaaatccatcaaatttgtcggcaccgcaaccgccgggaccgatcatgtggatgaggcgtggcttaagcaggctggcgtggggttttcagcggcgcctggctgcaatgctatcgctgttgttgaatatgttttttccgctttactgatgctggcggagcgtgacggttttgctttaagcgaccgcaccgtggggattgtcggcgtaggtaatgttggcgctcgcttgcaggcgaggctggaagcgttgggcattcgcactttgctgtgcgatccgccgcgtgcggaccggggcgatgaaggtgatttccgctcgctggatgagctggtccaggaagcggatattctgacgttccacacgccattgtataaagaggggccttacaagacgctgcacctggcggatgaggcgctgatcgggcggctgaagccggggacgattctgattaacgcctgtcgcggcccggtggtggataacaccgcgctgctggcgcgcctgaatgccgggcagtcgctgagcgtggtgcttgatgtctgggaaggggagcccgatctcaacgtggcgctgctggaaaaaattgatatcggcacatcgcacattgccggttataccctggaaggaaaggcgcgcggcaccacgcaggtctttgaagcctatagtacgtttatcggacgggcgcaaaaagtggcgctggatacgctgctacccgcgccggagtttggacgtattacgctgcatggcccgctggatcagccgacgctgaaaaggctggcgcatttggtgtatgatgtgcgccgcgatgatgcgccactgcgtaaagtcgccggaattccgggcgagtttgataagctgcgtaagaattaccttgagcgccgtgaatggtcttccttgtacgtgatgtgcgacgatgccagtgccgccacgctgctgcataagctcggtttcaacgccgttcatcatccggcccattaa

SEQ ID NO: 72186 - DNA, 1005 bp, Citrobacter koseri
atgatgcaacccatttccggtactcccgcacgccctcccggtgaaggtcagactgcgccttccgttgccggagaacagccgctatccacccagcagcgcacggtgctggaacgcctgattacgcgtctgatttcgctgacgcaacagcaaagcgcggaagtctgggccggaatgaaacacgatctgggcgtaaaaagcgacacgccgttactgtcgcgtcatttccccgccgcagaacaaaatctcacgcaacgcctgagcgtcgctcagcagaaccacgcgaatcgtcaggtgctctcgcagttgacggaattattgagccaggggaacaatcgccaggccgtcagtgattttattcgccaacagtacggtcagacggcgctcagccagttaacgcccgagcagttaaagaatgtgctgacgctactgcaacaggggcaactttccattcctcagcctcaacaacgtccggcaaccgacagaccgttattgcctgccgaacataatacgctcaaccaactggtgacgaagctggccgccgcgacgggcgaatcaggcaaacttatctggcagtccatgctggaactttccggtgtgaaaagcggcgagctgatccctgcaaaacagttcacgcacctggtcacctggctgcaagcgcgccagaccctcagcaaccagagcgcgcccaccctacagacgctacaggcggcgctaaaactgccgctggaaccaaatgaattcacggcgttaagagattatgcccagcagacatatcaggcgttgccgcatacaattctgacaaccgctcaggttcaggatctgctgaatcaggtcttcctgcgccgcgttgcgcgcgaaagagagttaaccgagccgcatcacattcagccgatatacagcccgttcgccccgatgattgaaaccatcaaatccgtaacggcgcgaccggggctgatctttatcgcactggcggttgccttcattctgttctggctggtgtcttaa

SEQ ID NO: 72187 - DNA, 1179 bp, Citrobacter koseri
atgacagctgtatcccaaaaagaaaaaacaccttccgcgaatttttcgctttttcgtatcgcttttgcggtttttctgacctatatgacggtcggtttaccgttacctgtaatccctctttttgttcaccatgagctgggctatggcaacacgatggtcggcatcgcggtgggcattcaattccttgcaacggtattgacccgtggttacgccgggcgactggccgatcaatatggcgctaaacgttccgcgctacaggggatgttggcctgcgcgctggcggggggcgcgtggctgttggcggcgttgttacctgtttctgtacctgtaaaattcgcgttgctgattgtcgggcgactgatcctgggttttggcgaaagccagctactgaccggaaccctgacctgggggatggggctggtagggccttcgcgctccggtaaagtgatgtcgtggaatggcatggcgatttacggcgcgctggctgccggtgcgccgcttggtttactgattcacagccattacggttttgcggcgctggcaggaacaacaatggcgctgccgctgctggcctgggcatttaatggcaccgtgcgtaaagtacctgcgcatgcgggcgaacgtccgtcgctgtggagcgtcgtcggtctcatctggaagccgggcctggggctggcgctacagggggttggtttcgccgttatcggcacctttatttcactctatttcgccagtaaaggctgggcgatggccggttttacgttgaccgcgtttggcggcgctttcgtgctgatgcgcgtgctgtttggctggatgccggatcgctttggcggtgtgaaggtggcggttgcgtccctgttggtcgaaacggcagggctggtgctgctttggctggcgcctgtggcctggattgcgctattgggcgcggcgttaaccggggcagggtgctcgctcatcttcccggcgctgggcgttgaagtggtgaagcgcgtaccttctcaggtacgcggtacagcacttggcggctatgccgcgtttcaggacatctcctacggcgttaccggcccgctggccgggctgttagccacctcgtgcggctactcttccgtattcctcgccggggcgatttctgccgtcgtggggattgtggtgacgctgctgtcgtttcgccggggttaa

SEQ ID NO: 72188 - DNA, 525 bp, Citrobacter koseri
atgaaagcgtttcctcttattacgcttatcctgttgctttgcggctgcgccacacctcatcgcgatagtacgcaggatattaaccaattctatctctcatggatgaaaacattcacagaggatcaggatacccctcatgataagtcggcattaatgcaacgctatgtcgtgaaagaacttatcaatcgcctgacgctaattgataacctttatgagcaggaaatcgtggcgtcagactactttatgtacgtgcaggactacgcgccggaatggatcgctaaattccacgcaggaacagccagtgcttttttgggaggtgaaaaagtggatgtatggcttggcgattccgatacccgccttatccatttaatggtgtacactcgccgggaaaatggtcaatggaaaatttatcgggtacgcgatcttacccaccagtttgaacacccgatctacgatgcaggcgccattgcccgcgccagggcatggtctgcaaaaatcgcgcaggaatacgaaaacaagcaataa

SEQ ID NO: 72189 - DNA, 1221 bp, Citrobacter koseri
atgaaacgtgcagtgattactggcctgggcatcgtttccagcatcggtaataaccagcaggaagtcctggcatctctgcgtgaaggacgttcagggatcactttctctcaggagctgaaggactccggcatgcgtagccatgtttggggtaacgtcaaactggataccactggcctcattgaccgcaaagtagtgcgctttatgagcgacgcatccatctatgcttacctttctatggaacaggcgattgctgatgcgggtctctctgtagaaacttaccagaataacccgcgcgttggcctgattgcaggttccggcggcggctccccgaaattccaggtctttggcgcagatgccatgcgtagcccgcgtggtctgaaagccgttggcccgtatgtagtgaccaaagcgatggcctccggcgtttctgcctgcctcgctacgccgtttaaaatccacggcgtgaactactccatcagctctgcttgcgcgacctctgcgcactgcatcggcaacgcggttgaacagattcaactgggcaaacaggacatcgtctttgccggcggcggtgaagagctgtgctgggaaatggcgtgtgaattcgatgcgatgggcgcactgtccaccaaatacaacgacgatccgtctaaagcttctcgtacctatgatgcgaaccgtgatggtttcgttatcgcgggcggcggcggtatggttgtggttgaagaactggaacacgctctggcacgcggcgcgcacatctatgcggaaattgtcggttacggcgcaacgtccgatggcgctgacatggttgcaccgtcaggcgaaggcgcagtgcgctgcatgcagatggcgatgcacggtgttgacactccgattgactacctgaactcccacggtacgtctacgccggtaggcgacgtgaaagagctgggcgcaattcgtgaagtctttggcgataagagcccggctatctccgcgaccaaagcgatgaccggtcactctctgggtgcggctggcgtgcaggaagctatctattcgctgctgatgctggaacacggctttatcgcgccgagcatcaacattgaagagatggacgagcaagcggcaggtctgaacatcgtaaccgaagccaccgatcgcgaactgacgaccgtcatgtccaacagcttcggctttggcggcaccaacgcgacgctggttatgcgtaagctgaaagcgtaa

SEQ ID NO: 72190 - DNA, 2001 bp, Citrobacter koseri
gtgaaacaatacgctatacaacctgccaaccttgaattcaacgctgagggtacacctgtttcccgagatttcgatgacgtctacttttccaatgataatgggctggaagagacgcgttatgtttttctcggcggcaatcagcttgaggagcgttttcctctgcaccctcgcccattattcgtggtggcggagagcggtttcggcactggccttaacttcctgacgctctggcaggcgttctcgcagtttcgcgacgctcaccctgaggctacgctacaaagattacattttatcagttttgaaaaatttcccctgacgcaggccgatctcgcgttagcccatcaacactggccagagcttgccccctgggcacagcagctacacgcacagtggccgctgccgctggccgggtgccatcgcctgattcttgatgacggtcgtgtgacgctggatctctggttcggcgatattaatgaactgacggggaaactggatgaatccctgaaccagaaagtggacgcctggtttctggatggttttgcccctgcgaaaaaccctgacatgtggacgcagaatctgttttccaccatggcgcgactggctcgccccggcggaacgctggcgacgtttacctctgcgggattcgtgcgccgggggttgcaggaggcagggttcacgatgcaaaaacgcaaaggttttggccgcaagcgtgaaatgctttgcggcgtcatggcgcacacgctgacgtccccctccccgacgccgtggttcacccgcagcggcagcgccaaacgagacgtcgcaatcatcggcggcggcatcgccagcgcgctgctgtcgctggcgcttctgcgccgcggctggcaggtaacgctctattgttcagatgaacagcccgcgcaaggcgcatccggcaatcgccagggggcgctttatcccctgctcagcaaacacgatgcggcgattaacctctttttcccgagcgcgtttacgttcgcgcggcgtctgtatgacgcgttgccggtgactttcgaccatgactggtgcggcgtcacgcaactgggctgggacgaaaagagccagcacaaaatcgatcagatgctgtcgctggcgttgcccgatgcgctcgcagtggctgtagatccagaccaggcgcagcaggaaacaggcgtggcgacacactgtcgcggaataacgtatccggctggcggctggctgtgccccgcacaattaaccgctgcgctgctggcgctggcggccacacaagggctgcggaggcattatacacacacgctcaccgccctttcgcgccaggccacagactggcagttgcaatttgcagagggtaaggcagttgaacatgaggtggtcgtgctggcaaacgggcatcagattaaccacgttgaccagacgcttccgttaccggtctattcggtggccggtcaggtgagccatatcccgacgacgcctgcgctttccgcattacgccaggtgctgtgctacgacggatacctcacgccgcaaaaccctgccactcatcagcactgcattggcgccagttaccatcgcggcagtgaggaaactgcctatcgtgaagacgatcagcagcagaatcgccagcgcttgatcgactgcttcccggatgccgcatgggcaaaagaggttgatatcagcgaaaaagcggcgcgctgtggcgtacgctgcgccacgcgcgatcatctgccgatggtcggaaatgtgccggactatgatgcaacgctcgcacaatacgccgcccttgccagacagaaagacgccgccgaacgcgcgccggtttatcctgatttgtttatgctgggagcgctcggatcgcgcgggttgtgttcagccccgctctgcgcggaaattctcgcggcgcaaatgagtgaagagcccattccgatggatgctgacacgctggcggcgttaaacccgaatcgtctgtgggtacggaagttattgaagggaaaagcggtgaaataa

SEQ ID NO: 72191 - DNA, 279 bp, Citrobacter koseri
atgatcgcggagtttgaatcacgcattctggcattaatcgacgatatggtagagcacgcaagcgatgacgagctgtttgccagcggatatctgcgtggccacctgacgttagcagttgcagaactggaaggcggtgatgaccattccgcagaagcggtgtatgccaacgtcaccggcagcctggaaaaagcgattggcgcaggcgagttgtcgccgcgtgaccaggcgttagtaaaagagatgtgggataacctgttccagaaggccattaacgcgtag

SEQ ID NO: 72192 - DNA, 549 bp, Citrobacter koseri
atgaacagtacgcatcattaccaacagctaattgatatttttaacggctgctttgccgacgattttaatacccgtctgattaaaggcgatgacgaaccgatctatcttcctgctgatgcggacgtgccgtaccaccggattgtttttgcgcacggcttttacgccagcgcgctgcatgagatttcgcactggtgtattgccggaaaggcgcgtcgcgagctggtggattttggttactggtattgcccggatgggcgtgatgcgcaaacccaaagccagtttgaagacgtggaagtgaaaccgcaggcctttgactggctgttttgcgtggcggcgggctatccgtttaacgtcagttgcgacaacctggaaggggacttcgaaccggatcgcgtggtatttcagcgccgggttcatgcccaggtgatggagtacctggaaaaaggcattcctgaacgcccggcccggtttattaaagcgttacagaattattatcacacgcctgacattacggcggaacagttcccgtggccggaagcgctcaactga

SEQ ID NO: 72193 - DNA, 810 bp, Citrobacter koseri
atggacaattttttaaatctgtttatggtgtccccgctgttattgattgttctttttttcgtggcaatgctggctgggtttattgattcgctggcggggggaggcggcttattaacgatccctgcattaatggcggcaggcatgtcgccagcacaggcgctggcgaccaataaattgcaggcctgcggcggctcactctccgcgtcaatctatttcattcgtcgcaaagtggtcaatcttgccgatcagaaactcaatattctgatgacgttcattggctcaatgagcggcgcgttactggtgcaatatgtccaggcgagcattttgcggcagattttaccggtgctggttatttgtattggcctttacttcctgttgatgccgaaactcggcgaagaggatcgtcagcgtcggctttatggcctgcctttcgcgctggtcgccgggggctgcgtcggattctacgatggcttcttcggcccggctgccggatcgttttacgcgctggcgtttgtgatgctgtgcgggtacaacctggcgaaatccaccgcccatgccaaagtgttgaatgccacctcgaatattggcggcctgttgctattcgctattggcggtaaagtcatttgggcgacaggtttcgtgatgctgattggccagtttctgggcgctcgtatgggctcgcgactggtgttaagcaaaggacagaagctcattcgcccgatgatagtcatcgtctctgcggtgatgagcgccaaactactttatgataaccacggacaggagattctccacttgctggggatgaactaa

SEQ ID NO: 72194 - DNA, 825 bp, Citrobacter koseri
atgaaaaaaacggcactcgcgttgctggctcttctggtcagcagcgccagcctggcggcgacgccctggcagaaaattacgcatcctgttcccggaagtgcgcaatccatcggcggcttttcgaatggctgcattgttggggcagacacgcttcccgtgcagtccgaacactatcaggtgatgcgtaccgatcagcgccgctattttggtcatcccgatctcgtgatgtttattcaacgactgagcactcaggtcagcaaccttgggtttggaacggtgttgatcggcgatatggggatgcctgcgggcgggcggttcaacggcggacatgccagccaccagaccgggctcgatgttgatatttttctgcaactgccgaaaacacgctggacgcaggcgcagctactgcgacctcaggcaattgacctggtctcccgcgacggcaaacatgtggtgccttcgctgtggaagccggaaatttccagcctgatcaaactggcggcggaagataacgacgtcacgcgtatttttgttaatcctgccattaaacagcagttatgcctggatgccggaaccgaccgtgactggttgcgtaaagtgcgaccctggttccagcatcgtgcgcatatgcatgtacgattacgttgccctgccgacagcctggagtgcgaagatcagcctttgcctccgactggcgatggatgcggcgcagaactacaaagttggtttgaacctcctgaacctggaacaacaaagcctgagaagaagacaccgccaccgttgccgccttcctgccaggcgctactggatgagcatgtactctaa

SEQ ID NO: 72195 - DNA, 1086 bp, Citrobacter koseri
atggcaggaaatacacttggacaactctttcgcgtaacgacttttggtgaatcacacgggctggcgctcggttgtatcgttgatggcgttccgccgggcattccgctaacggaagccgacctgcaacacgatctcgacagacgccgtccgggaacctcgcgttacacgacccagcgtcgtgaaccggaccaggtgaaaattctctccggcgtctttgaaggcgtgacgacgggtaccagcattggcctgttgattgaaaataccgatcagcgttcacaggattacagcgccattaaggacgttttccgcccgggccatgccgactatacctacgagcagaaatacggtctgcgcgattaccgtggcggcggtcgttcttccgcccgtgaaacggcgatgcgcgtcgcggctggcgcgattgctaaaaaatatctggcggagaaatacggcatcgtcattcaggggtgtctgacccagatgggcgatattccgcttgaaatcaaagactggcagcaggttgaacaaaacccgtttttctgtcctgatccagataaaatcgacgcgctggatgaactgatgcgcgccctgaagaaagagggcgattcgattggggcaaaagtgaccgtcgtggcaaacggcgttccggcagggcttggcgaaccggtctttgaccgtctggatgcggacatcgctcatgcgctgatgagcatcaacgcggtaaaaggcgtggagattggcgatgggtttgatgtggtcgcgttgcgaggcagccagaatcgcgatgaaattaccaaagagggcttcctgagcaaccatgcgggcggtattctcggcggtatcagcagcgggcaacaaattgttgcacatatggcgctgaaacccacttccagtattacggtgccgggacgtacgattaaccgctttggtgaagaagtcgagatgatcaccaaagggcgtcacgatccgtgcgttgggatccgcgccgtgccgatcgctgaggccatgctggcgatcgtgctgatggatcaccttctgcgtcagcgcgcgcaaaatgcggatgtaaagactgatattccacgctggtaa

SEQ ID NO: 72196 - DNA, 933 bp, Citrobacter koseri
gtggataaaattttcgttgatgaagcagtgagtgagctgcataccattcaggacatgttgcgctgggcggtaagccggtttagcgcggcgaatatctggtatggtcacggcacggacaacccgtgggatgaggccgtacagctggtgctgccgtcactttatctgccgctggatattccagaagacatgcgtaccgcgcgcctgacgtccagcgaacgtcaccgcattgttgaacgggtcattcgccgtgtcaacgagcgtattcctgtggcctacctgaccaataaagcttggttctgcggccatgaattctatgttgatgaacgcgtattagtgccacgttcgccaattggcgagctgatcaacaaccgcttcgcggggcttatcagcgagcagccgcaccacattctggatatgtgtaccggcagcggatgtatcgctatcgcctgtgcttatgctttcccggaggcggaagtggatgccgttgatatctccagcgacgcgttagccgtaaccgaacacaacattgaagagcacggtctgctcaaccatgtcacgccgattcgctccgatctgttccgcgatctgccgaaagtgcagtatgacctgattgtgacgaacccgccgtacgttgatgcggaagatatgtccgacctgccgaatgaatatcgtcatgaacctgaactgggcctggcgtccggcactgacggtttaaaactgacccgccgtattctgggcaacgcgccggactacttgtccgatgacggtattctgatttgtgaagtcggaaacagcatggtacatctgatagaacaatatcccgatgtaccgtttacctggctggagttcgataacggcggcgatggcgtctttatgctgacgaaagcgcagctcattgcggctcgcgagcatttcagcatctataaagattaa

SEQ ID NO: 72197 - DNA, 552 bp, Citrobacter koseri
atgaaaaagaaaacatcgctcagcgaggaggaccaggcgttgttccggcagttaatgaccggcacccgccagattaagcaggacaccattgtccaccggccgcaacgtaaaaaaatcacagaagtcccggtcaagcgtctgatacaggagcaggctgatgccagccactatttctccgatgaatttcaaccgttattgaataccgacggcccggtgaaatatgtacgtgccgacgtcagccatttcgagctgaagaaaatgcgtcggggcgactattcgccggagttgttcctggatttgcacggtctgacgcaacagcaggccaaacaagagctgggggcgctgattgccgcctgtcgccgcgagcatgtcttttgcgcctgtgtgatgcacggccacggaaagcatattcttaagcaacaaacgccgttatggctggcgcaacatccgcacgttatggccttccatcaggcgccaaaagagtacggcggggacgctgcgctgttggtattgattgaagtagaagagtggttgccgccggagcttccctga

SEQ ID NO: 72198 - DNA, 486 bp, Citrobacter koseri
atgcaagtttttatcatgcgtcacggcgacgcggccctcgatgccgccagtgattcggttcgtcccttaacctcgtgtggttgtgacgaatcccgccttatggcgaactggctgaaaggtcaaaaagtggatatcgaacgtgttctggtgagcccgtttctacgagccgaacaaacgttggatgtggtaggggagtgtatgaacctgcctggcaatgtggacgttttgccggagcttactccttgcggcgatgtcggtatggtcagcgcctggttgcagacgctggcgaatgaaggcgtcgcatcggtgttagtgatctctcacctgcctttggtgggatatctggtgtctgaactctgtcctggcgagacgccgccaatgttcaccacatctgcgattgccagcgtaacgcttgatgaaagcggcaaagggattttcaactggcagatgagcccgtgtaatctgaaaatggcaaaagcgatttaa

SEQ ID NO: 72199 - DNA, 2148 bp, Citrobacter koseri
atggacatgacatcagcgttcacgcttaacgtgcgtctggataacgtcgcggtcgtctctattgatgtccccggtgagaaaatgaataccctgaaggcggagttcgcgacgcaggttcgcgccatcctgaaacagattcgggaaaacaaggcgctgcgcggtgtggtttttatttctgcgaagccggataactttatcgcgggggcggatatcaacatgatcggcaactgtaaaagcgcgcaggaagctgaaacgctggcgcgtcagggccagcagataatggctgaaattcaggcgctgtctgttccggttatcgccgccattcacggcgcgtgtctcggcggtgggctggagatggcgctggcttgccatcggcgcatttgtactgatgatgcgaaaaccgtgctgggtctgccggaagtgcaactggggctgctgccagggtctggcggtacgcagcgattaccgcgcctggttggggtgagtacggcgctggacatgatcctgaccggtaagcagttacggccaaaacaagcgctcagggttggtctggtggacgaagtcgtgccgcacgccattttgcttgaggccgccgtggaactggcgattaaagggcgttccgctcagcggaatttgccggtgcgtgaacgtattctggccgggccgcttgggcgcacgctgctgtttcgcatggtcagtaaaaaaaccgggcagaaaacgcagggtaattacccggcgacagagcgaatccttgaggtgattgaaaccgggctggcgcagggaagcagcagcggatacgacgcggaagcgcgggcgtttggcgagctggcgatgacgccgcagtcgcaggcgttgcggaatatcttttttgccagcaccgaagtgaaaaaagatccggggagcgatgcgcagcctggcccgttagccagcgtaggcgtgctgggcggaggtctgatgggcggcggtattgcttacgtgacggcctgtaaaggcggcttgccggttcgcatcaaagatattaatgctaaaggcatcaaccacgcgctgaagtacagctgggatcagcttgaaatcaaagttcgccgccgccatatcaaagcgggcgaacgcgacaaacagctggcgctaatctccggctcaacggattaccgcggcttctcgcatcgggatctggttattgaagcggtgtttgaagatctggcgttaaaacagcagatggtggcggaagtcgagcaaaactgcgctcctcacaccatttttgcctccaacacctcatctttacccatcggcgacatcgcggctaacgcggccaggcctgagcaggtgattggtttgcacttctttagcccggtagaaaaaatgccgttggtggaggtcattcctcatgcgacaacctctgcgcagacgatcgccacgaccgttaagctggcgaaaaaacagggcaaaacgccgatagtggtcagcgataaagccgggttttacgttaatcgtattcttgccccgtatatcaacgaagcaatacggttgctgaccgaaggcgaacgcgttgaagcgatcgacgccgcgctggtcaagtttggttttccggtcgggccaatccaacttttggatgaggttggcatcgatacaggcactaaaattatacctgtactggaggccgcttacggcgaacgttttagcgcgcctgcaaacgttgttgcctcaattttgaatgacgatcgcaaaggcagaaaaaatggtcgcggtttctatctttatggcgtgaaagggcgtaaaagcaaaaaacaggtcgaccctgcaatttataggcttattggtacgcaagggcagagccgactttctgcgcagcaaatggctgagcggtgcgtgatgttaatgctcaacgaagcggcgcgctgctttgatgagaaggtgatccgcagcgcgcgtgatggcgacatcggcgcggtatttggtattggttttccgccgtttcttggcggcccgttccgttatatggacactctcggcgcgggtgaagtggttgcggttctgcaacgactggctacgcagtatggcgaccggtttaccccgtgtgagcgcttattgcggatggctgaacgcggtgaacgtttctggaacagtggggaaacagacctgaaggaataa

SEQ ID NO: 72200 - DNA, 1311 bp, Citrobacter koseri
atgagtcaggctttaccactggttacccgccagggcgatcgtatcgccattgtaagcggattacgtacgccgtttgctcgtcaggccaccgcttttcatggcattcctgctgttgagttgggaaaaatggttgttggggaattgctggcgcgcagtgaaatacctgccgaggttattgagcaactggtttttggccaggtggtgcaaatgcctgaagctcccaacatcgcccgggaaattgtgctgggtacggggatgaatgttcacaccgatgcctacagcgtaagccgggcgtgcgcgaccagttttcaggcggtagcgaatgttgcggaaagcctgatggcggggacgattcgcgcggggattgctggcggcgcggactcctcttccgtgttacccattggcgtcagcaaaaagctggcgcgtatactggtggacgtcaataaagcccgcacgaccgggcaaaaactcaaactcttttcccgcttgcgtctgcgagacctgatgcctgttccgcccgcggtcgctgaatattccaccgggctgcggatgggcgatacggccgagcaaatggcgaaaacctatggcattacgcgtgagcagcaggatgcgctggcgcatcgttctcatcaacgagccgcgcaggcctgggctgaaggtaaactggcggatgaggtgatgacgacatatgcgccgccgtataaagagcctttctctgaagacaataatattcgtggcaactctactcaggctgattatgcgaagctgcgccccgcgtttgatcgacaacacggaacggtcacggcggcgaacagtacaccgctgacggatggcgcggcagccgtcatcctgatgacggagtctcgcgctaaagaacttggcctggcgccgttgggctatctgcgtagctatgcgtttaccgcaattgacgtctggcaggacatgctgctgggcccggcctggtcgacgccgctggcgctggagcgggccggattaacgctggccgatctctcgttaattgatatgcatgaagcctttgccgctcagacgctggctaacattcaactgcttggcagtgagcgttttgcccgcgacgtgctgggcagggcgcatgcgaccggagaagtggatgacagtaagtttaacgtcctcggcgggtcgattgcctatggacatccgtttgccgcaacgggggcgcggatgatcacgcaaaccctgcatgagctacgccgtcggggaggcggttttggcctggtgaccgcgtgcgcagcggggggtttaggggcggcaatggttctggaggcggaataa

SEQ ID NO: 72201 - DNA, 285 bp, Citrobacter koseri
atgagtaaatgcagtgctgatgaaaccccggtttgctgctgtatggatgttggcaccattatggacaactccgattgcaccgcgtcttacagccgtgtgtttgaaaaccgcgcgcaggccgaagagacgctggcggctctgacagaaaaagcgcgtggcgtggagtctgaaccttgccagattacatccacctttaccgaagaagctgaaggcgtgcgtctggacatcgactttgtcttcgcctgcgaagctgaaacgctgatcttccagctgggtctgcgttaa

SEQ ID NO: 72202 - DNA, 1350 bp, Citrobacter koseri
atgagccagaaaaccctgtttacaaagtctgctctcgcagtcgcagtggcaatcgtctccacacaggcctggtctgcaggctttcagttaaacgaattttcttcctctggccttggccgggcttattcgggtgaaggcgctatcgcagatgatgccggtaacgttagccgcaacccggcgttaattatgatgttcgatcgccccaccttctctgcgggtgcggtgtatatcgatccagatgtcaatgtgaccggccgctctaacttaaccgggcaaaatgccaacgcgaataatattgcgccaacagcgtgggttcctaacctgcacttcgttgcgccgatcaacgatcagttcggttggggggcatccattacctccaactatggcctcgccaccgaattcaataaagattattcagccggtatctatggcggtaaaacagacctgcaaacggtgaacctgaacctcagcggcgcctatcgcctgaataatagctggagcttcggggtcggttttgatgcggtttacgcgaaggctaaaattgagcgctatgcgggttccctcggtccggtgctttcacaacagctggttggacaaggcgtaccctctcagtggacggatggcattaactcccctgactcccagatcgcccacctgaagggtgatgagtggggattcggctggaacgcaggcatcctgtatgaactcgacaaggataaccgttggggcctgacctaccgctctgaagtgaaaatcgacttcgaaggcgattacaaaagctccattaacccaaatctgaacaatattttcgccagtatggggctttcaagcctgccatacggcactggcggcgcaacacagaatggttccttaaccctgaacctgcctgaaatgtgggaaatctccggttataaccgcgtcgcgccgcaatgggctatccactatagcctgacttataccagctggagccagttccaggagttaaaagccaaaggcgacgacggccagacgctcttctataaagatgaaagctttaaggatgcgtaccgtatcgcgttgggtacgacctactactacgataagaactggactttccgtaccggtatcgcgtatgacgatagcccggttccggcaaacaaacgttccatttctattcccgatcaggaccgtctgtggctgagcgcgggtgcaacttacgccttcaatgaagatgcttctattgacgttggcgcatcctatatgcacggtcagaacgtgaaattcaccgaaggggaaggcccggcagcttactccttcaagtctgacggtaaagcctggctgttcggtacgaactttaactacgcgttctga

SEQ ID NO: 72203 - DNA, 756 bp, Citrobacter koseri
atgaagcttcgcctgtcggcgcttgcgctggggagcacactgctggtgggatgtgcaagctccggtacagaacagcaggggcgttcagatccgctcgaaggatttaaccgcaccatgtacaacttcaactttaacgtgttggacccgtatgtcgttcgaccggtcgctgtcgcctggcgtgattatgttccgcagcctgccagaaatggtttgagtaattttaccagcaacctcgaagagcctgcgattatggtgaactatttcctgcagggcgatccctatcagggcatggtgcacttcacccgcttcttcctgaatagtattttgggaatggggggctttattgatgttgcggggatggcgaatccaaaactacagcgtgttgaaccgcaccgtttcggcagtacgttaggccattacggtgtggggtatggcccctacgtgcaacttccgttctatggcagcttcacgctgcgtgaagatggcggtgatatggccgataccctttatccggtactctcctggctcacctggccgatgtctattggtaaatggaccattgaaggaattgaaacccgcgcgcaactgctggattccgatggtctgctgcgtcagtcttccgacccgtatattctggtgcgtgaagcatacttccagcgtcatgacttcatcgctaacggcgggaagcttaaaccgcaggaaaacccgaatgcccaggcgattcaggacgatctcaaagagattgattctgaataa

SEQ ID NO: 72204 - DNA, 933 bp, Citrobacter koseri
atggataaattcagcgaagagaaaattgatcaacacagtgacgaactcgaagtcgaaagcgaagaaaaacaacgcgggaaaaagatagaggtcgacgaggatcgcctcccctcacgcgcgatggcgattcacgaacatatccgccaggacggcgaaaaagagctggagcgtgacgctatggcgctgctgtggtcagccattgccgcagggctctcaatgggcgcctcgctactggcgaaaggtatttttcacgtacagctggacggcgtccccggcagttttttacttgagaatctgggttatacctttggttttatcatcgtcatcatggcgcgccagcagttgtttactgaaaataccgtcaccgccgttctgccggtgatgcaaaacccgacgatgggcaacgcgggtctgctgatgcggctctggagcgtggtgttactgggcaacgtagtcggtactggcatcgccgcatgggcttttgaatatatgcctatatttgacgaagaaacgcgtgatgcgtttgtcaaaatcggcatggatgtgatgaaaaacagccctggcgagatgtttgccaatgccattatctccggctggatcattgccacaatggtatggatgtttcccgctgccggcgccgcaaaaatcgtggtgatcattctgatgacctggcttatcgccctcgctgacacgacccatatcgtcgtgggttcggttgaaatcctctatctggtgtttaacggcacgctgcactggagcgactttttctggccctttgctttgcccacgctggcggggaatatctgcggcggtacattcatcttcgcgcttatgagccatgcgcagatccgtaatgatatgagcgccagacgcaaagaagaggccaggctgcgtgccggaaagaaggcggaaaagcagaaaaaacagtcctga

SEQ ID NO: 72205 - DNA, 1605 bp, Citrobacter koseri
atggcagaacaacattcatcagcatggtcacctttacgtaaccgtgtttttttcatgttatggatagccacactcttttccaatatcgggacctggatgaatgatgttggcgctggttggttgatgaccaatttaagcccggaccctgtcatgattgccgctattcaggcaatgaccacgctgcccgtattcttgctggcgttaccggcgggggccattgcggatatcttcgacaagagaaagttacttattcttgttaatattatgatgctgtgtgccgcgtctctgctcgcaattatcgtctattttaatgttgtcagtatcggatggttattatttatcacgtttattctcgggtccggcgccgcatttttaggcccggcatggcaggccattgtacctgctattgttgaacctcatgaattaaaatccgggattgcgttaaacagtatggggattaacatcagccgggcaatcgggcccgcgctggccggtattttgatttcacaggtcggtctttatcttccttttcttctgaatgcgttgagttttattgcgattattgctgcggtatggtggtggaaaggagaagaaaaaacgaacgggagtcttccggctgaatctgttgttgccgcaatggtttcaggtttgcgttatgcccgttacagcccggaattaatgagaacaataataaaggctgccagcttctttgtttttgccagcgcgtattgggcaatgctcccgctggtggtgagactctcacttcagggagatgcaacattatatggcgtgttaacaaccagtatcgggatcggcgctgtctgtggcgcattcagtttgcccgcgttgcgtaagcgactcagtgccggcgctcttattacctcaggaacattcggtactgctgccgtattactgatattcgccggagcagcatctcaatatgccgccattttcgccagtgttgtggctggtttcagctggattattaccttgtcaacgctcatgatatcagcccagacagcgctcccggactgggttcgcgcaagagggctggccttgtacctgaccgtattttccggggcaatggcattcggttctctggtctggggacaaattgcctcgcatacgtcagtaaccacagcattactttctgccgcaatcggtattgtcgttgtctggttatgcgtattaaaggtaaaaattgaccatgacaatattaacttgcagcattcagatcactttagccttgctgaggacggtcttaatgatattaccggccataccggtccgatgctggtgtctgtttattatcatgtcgatgctgaaaagaatggccaatttatcagtttgatgaaaaagttaaaaaatatccggttaagggatggcggttacgcctggggactgtttgtggttcctgagaaatccaatgaatttattgaaacattcatggtgtcgtcattggctgaacatctgcgtcagcacgacagagcgactgtcgatgacagacaaatacagcagcagctggatgacgtcattctgaataaaaaagcaacacactatttttctgcgagtgtagcggaatcctttgtcatacaagaggaataa

SEQ ID NO: 72206 - DNA, 1428 bp, Citrobacter koseri
atgatgaataataaaataaagcgcatcagtcaggctgttacgttagcccttgccatatctggcgttagttatgccgcaacctcatcacaggccgcaaattcaaaacaaaccgagatacaagcctcagaacctttttccgcgcatgtcctcattagcgggcttgatgccccgtgggatatggtgtgggggccggatgattatttatgggtaaccgaacgtaaagccgcttctatcgatcgtatcaacccgaaaaccggtgagaaaaaagtcgccattacgctgagcggggttcataccgggccgcagcatgaaggcgttctgggcctggcgttgtcaccgaacttcatgaaaccgggtggcgataattatgtgtatacggcctatacctatatgaacggcgacaaggaacacgccaaaatcgttcgcctggaatatgacgaaaaaacccagaagctgggtaatgaaaaagagatcctggctggattcccggcaggcaatgaccacaacggtggacgcctgcgctttggcccggacgggaagttgtattataccatcggtgaacaagggcataaccagggcgcgaatttctgtaaacctatcgaagctcagcgtattcccactgagaatgaactgaagaataaagactatgccgcctatgccggtaaagtgctgcgtctgaataccgatggctctattccagatgataaccccgttattaaaggcatcaaaagccacctgtttacttacggacaccgtaaccctcagggactggtatttattggcgataccctttacgcatccgaacaagggccatcctccgacgacgagctgaatatcctcgaacccggcggcaactatggctggccacacgttgccggtttccaggacgatcaggcttatgtttatgccaactactctgaagcggcgaattgcccgtctctgacctgggaccctaaccatattccggcaggcgttcctgtccagaaagaaacagagtggaaagccgcagactttaaagcgccgattaaaacgttctttacggtcaaagaaggctttacctataacgacgccagctgcggcccggattcttcatatatctgctggccgacaattgcgccatccagcgtggcatactacccggaaaacggcgtaattaaaggctggcgaaactcggtgattatcagctccatgaaaaatggcgcgctgtaccgtgttctgctgaatgccgataagaaagatgttcagggtgacgtcgcgaaatatttccacacggcaaaccgttaccgcatggtgctggtcagcccggacacccgtaaaatctacgtggcgacggataactttggtaatgtgatggatgaatccaaccatccaacgcataatctgagtaacccgggttctattatcgtctttgaatacacgggcaaataa

SEQ ID NO: 72207 - DNA, 1563 bp, Citrobacter koseri
atgaagaaaaaactgttacagatgctgaatttgcgtctgcttattattgcttttgcgtttctgatgaccctccttactcttttcaatagtttctattcagcctggcgtgtccagaagcaggtactcattgagaatgaactcagtgaaaaccaggcatatgcggagaggattgcttccactattgatttgtatctggcggttttcatggagcgtctggaatacagtgcgagcgtcatcggtcagcatttcgatgatgagagcatcatcgctggagaaatgatgaggatgcagcggcgagattttggttttgattccgttacgctggtggatgaaaaaggcaaaattattggcgtgctgcctgaatccctgaacctgaaggggaaaatgctgaccacgccaggcggcgtcgaggctctcaaagaaatgcagccgacggtcagcagcgcctacaattctctgtccggtaatctggtggtgtatatttcacatcccgtcaggaatgcgcaggggaaatacctcggttttattggcggcgcgatttatctgcaaagaagcaacgttctttctgcgctcatttctaatcatttccgcaatgatgacagctatatttatgtcgttgataaaaatgaccagctcttatatcaccccgatccggcccgcagaggggaaaaagaggaaggcaatgccgcagtgaaagccatggagcaagggctgagcggcgcgatggaggtgacgaactcccgtggcgtggaaatgctggcggggtatgccagtataaatacctcgggctggggcgttgtggcgcaaaaaccaaaagataaaacccttactgcgcttgatgggctcatgtggcaaatgatacgcggcgttgtaccgctgggtattgtggggttgtttattctctggtggctggggaatgaaatcgtcagaccattgcgtcaactggcggatcacgccatttcgatggacagcgatgagtccgcagaaaaagtacgaaacgttcgatcgtggtatatcgaagcctcccgactcaggcgcgcgttgcttcagggaatggaattaatccgggagaaaatgaaatggctgaacgatcaggccagcactgacccgcttaccggcctggtcaaccgacgggcggcagagaaactgctggctgaatacgaacatcagcagcgacagtttgcggtgatttctctggatatcgatcgcttcaaagccgtcaacgacacgtttggtcatgacattggcgatgttacgttaaaagcgctggcgcagctgctgaagcgaagctgtcgtaaaaatgataccgcctgccgtatgggaggagaggagtttatgatgtttttcccggagacgtcggtagaggctgcggcggatattgcggagcggctgagaaaagaggtcgccgccgcaaagatagagacggtagggcatatcaccatttctcttggcgtgacggtgtggccgtcgggcgttgactctgtctcccaggcgctgaaacgggctgatgaattgatgtaccaggcgaaacaggcgggcagaaaccaggtggtcgcaggataa

SEQ ID NO: 72208 - DNA, 2544 bp, Citrobacter koseri
atgaaagctgcggctgacaatattctgtttcctgctcttgagcagacgttcatggcggttgtcctcgtcgacgagcgtaaccgggttctgttctttaacgaagccgcagagaaattgtggggctattccagggatgaagtgcttggccgggatatgaatatattaattcccgggcctctgaagcatgttcacggggattatgtccaccatcaccgcgacgggggaaattcccgggttgtcgggatgaatcgtgaacttcaactggaacgaaaagacggcacgcaggtctggaccagcttttcgctctccaaaatagacgtggatggccgcatccactacatggccgccgcccgggacgtcagcaaagaggtggccaggcgcgagcaaaaccgtctgttgttgcttgccgtcaataatacggacagagccgtggttgttctggatgaacaacgtcgtattgtccagaccaaccgtgcgttcaccagcatgtttggatatggcgcagacgaagccatgaaccaggtgttccctgatttcctgctgctttcaggaaacagcgatgacgcgctaaaacgtgtggaagaacatctgcggggaagtcgctggtttcaggaagaactcctcaccgcgaccagaaatggcagggaagtctggagccgggtttcggtaaaccctgtcctcaatgagcgtgaccaccgccagacccgtaaccttgtcgtaaccttcgttgatattacggaagaacgtaatattcgtaatctggaacgggatgtactggccgcgctgaccagccggatgactttccaggaaacgggtgattacatctgccagcgaattggaaatattgcgcccggcgtactggtctcggtatgccgaatcgtcgataaccggatgcgcccgtgggcagctcccggttttccaaaagaatatggtgaatactgggatggcgtggccgtcggtgaaggcgtggcaagctgcggtacttgtgctgcgcgtggcgagcccgtcatggttcaggatatcagcaccgatcctctatgggctccttataaacatcagatgttgcctcatggttttcgggcatgctggacataccctgtaaaacgtcgagatggttccgtggcagggacgtttgctttttatttcaggacacagaatgagccggatacgtttctggttcgtattgccgatgccagcgttcatctttgcgctctggcgattgagcgggaggaaggtcgccagcaaatcgatcgactggttcggttcgatgcccttacggggctgcccaatcgtcagtatctctatcaccatctggataaactgctgtcgggtaacgagccggaactcgccgtgtttttcctcgatattaaccgttttcgtaaagtgaatgagtcactggggtattccgctggcgaccaggtgattatcacgctggctaaccgcttgcaggaacggttcgggccgcatcactttatcagccgggtgggtggcgcgcagtttgtcgtggtggcgagcgcctgtcgtgttgatgaggcctcacacctggctgagcttatgcagcatatcgttggcgctgaaatgagcgccgccgggcagaccttcgagcttaaagcctgtattgggatcagccattccattggcggcgacagggaaacgctgctggcccacgccgagagcgcgatggagcgggtacgtgaaagcggtggaagctatcagttttttaacccggaactgaatcaggccgtcatgcaacgtctgaaactgggcatggcgctgcgaaatgcgattacggaggggcatttgcggctggaatatcagcctcagatcagggctgcggacgggcaggtatacggttttgaagcactgacccgatggcacgatccgcacgctggcgacatctctccagggacgtttattcctctggctgaagagacgggagagatagagcatatcggcctctgggcgctgcgtgaagtctgccgacagctttttgaatggcgggaaaagggcacgaatgtgtcggcggtatctgtaaacctgtctgcccataacttccgtaagcctgatttaccccgttatatcgccgacctgctgaatgaatatcagctgcccggcaatatcctgaccattgaaattacggaaagcgccatgatggaactgacggacgagatgcttgcgcgggtcagggagattcgcgcgatgggcgtgggggtctcaatggatgattttggcaccggcttttccagtctggccagcctggcgtatctgccggtgacggaggtcaaaattgataaaagcttcattgaccggttcgcccgcgatcgtcgcgtcaatgcgcttgtcgaagcggttgtcagtattgggcataacctcgacctgacggttgtggcggaaggtgtggaaaatacccatcagcatcagcaactgagaaaaatgggctgttccgtacttcagggatttcttttttcccgaccattgtcggcgaatacgttaccggtatggctagaggcttaccgttcacccttgcaggatgcacaatcatga

SEQ ID NO: 72209 - DNA, 1002 bp, Citrobacter koseri
atgaaaagaattggcatcaatggtttcggtcgtatcggtagactggtattacgccggattctggaaactgaactgaatgtggaaattgtcgctataaacgatctcacctcgccggatgttttggcttatttgctgaaatatgattcaaactatggtccctttaacggcacggtttcccatgctgacggttcaattatcgtcaatggtaaagtcatcaaagtatttgctgagaaaaatgcgggtgatatcccctggggtagcctgggtattgatgttgttgtggaatgtaccggtttttatacctcagcagaaaaagcgaatgcccatattgaagccggagcgaaaaaagtgcttatctccgcgcctgctggcgatatgaagaccatcgtttatcatgtgaatgatgaaacgctcacttctgctgataacattatttccgttgcgtcctgtacgacaaactgtctggcgccggtggcaaaagccctgaatgacgcctttggtattaacgtcggcacgatgacgacggtacatgcttataccggcacccaggctctggtggatggtccccgaggtaaagacttcagggcttctcgtgctgcggcggaaaatattatcccgcatacgacaggggcggccaaagcgattggtcttgttattcctgaacttaacgggaaactgaaaggtcatgcccaacgcattccggtaaaaacgggttcagtgacggagttagtgaccgtcctgaataagaccgtcaccgttgaagaggtcaataacgcgctgagaaatgcaacagttgataatgagtcatttggctatacggatgagccaattgtatcgtctgatattattggcatccattttggttccgtttttgatgcgacccaaacggaagtaacagaatttgatggcgtgcaactggtcaagacggtcgcctggtatgataatgaatacgggtttgtgacccagttggtcagagtattgaagaagtatatttccctctga

SEQ ID NO: 72210 - DNA, 903 bp, Citrobacter koseri
atgcatttagaagatattcgaatttttgtaaccatcgtaaatatgggaagttttacagcagcagccgaacacctgagtctatccaaacaatttgtcagcagaagaatggccgcgctggagaaaaaagtttcagcccgattactggtgcgaaatacccgaaagttgtccgttacggataccggccaggctttttttcatcatgcccggcgcattctggaagaggttcatgaagccgagcaggttatctccgcccggcagcaaaaactggccgggtcattcaggattagcctgccgatgacatacggcatcaggcgacttgcccccctgattgttgaatttcagacggcgcatccagaacttactgttcatattgatatgaatgacagatatgttgatgtggtgggcgaaggctacgatatggttttgcgcatcgggaacctgatggactctaccttaattgctcgctgtctgggtaaattaccgatggtgatttgcgccagcccggattatctccgtttgcacggtacgcctctggcgccttctgaactggcgcagcatagctgccttttgtatggtcgggaggggcaattcggctggaaattgacggaggaaaattcaccgaatacgtatgccgtcagaggcaatctgagcagtaataacggggacgtgatccgcgaggccgcagaagcgggggccggtattgcgcttttgccgctttttatcgttgaagactcgctgcaacaaggcgctttagtgcagatattgtctgattactcgccgcctccgctgacgatcagcgcgctgtatccaaaacatcgccagcgcagcgcagtgacccggatcttattgccatttctggccgaaagaattgccggcatcgtcgacccgattaaaaaaacatga

SEQ ID NO: 72211 - DNA, 681 bp, Citrobacter koseri
atgtctcattaccttgatgtcctcaccccgcagaacagtcaactgatttttatcgaccagcaaccccagatggccttcggggtacaatctattgaccgtcaggtactgaaaaacaacgttgttggcctggccaaagcggcaaaactgtttaatatccccaccaccatcacgaccgtagaaaccgaaagtttttccggtaacacctatcccgaactcctggccgttttcccggaaaacaacatcctggaacgaacttcaatgaactcatgggacgatcagaacgtgcgtgatgcgctggcggcgaatggtcgtaagaaagtgatcgtttccggtctgtggacggaagtctgtaacaccacgtttgccctgtgtgcagtcaaagacgcggattatcaaatctatatggttgttgatgcttccggcggcacctccgttgatgcgcacaaatacgctatcgatcgtatggttcaggcaggcatcgtaccggtaacctggcagcaggtcattcttgagtggcagcgcgactgggcccgtaaagagacctacaacggcattatggatatcgtgcgtgaacactccggcgcctacggcatgggcgtcgattatgcctatactatggttcataaagcgcctgagcgcgtacaacacggcgaacgtatcggcccaaacccggctaaataa

SEQ ID NO: 72212 - DNA, 279 bp, Citrobacter koseri
atgaaaatgtatatcctttctctgggtgccggacttcttgtcggcattatttacagtttgctgaatgtccgctcccccgccccaccgctgatagccctccttggcttgctgggaatgctggtcggcgaacaagttattccggtaggcaaacaacttctgtccggcacagccttttcttcagcctgtaccaaaacacatgccatcagccatatcttcgggcagctccccggccgccaggcagctgaagacagtcattcctcagaggagaaacgctcatga

SEQ ID NO: 72213 - DNA, 1896 bp, Citrobacter koseri
atgacacaacatgttgtcgcagacgttattctgcatcatggtctgtttaccactctcgataaaagcaacccaaccgccagcgccgtcgcagtcaaagacgggaagtttctcgcggttggcggcgacgctgaaattatggccttcgcaggtccggcaaccaaagtcgtcgacctgaaaggcaaacgggtattacccgggctgattgataaccacacgcacgtagtacgcggcgggcttaattacaatatggagcttcgctgggatggcgtacgttcgctggctgacgcgatggatatgttgcgtcggcaggtagccatcaccccggcaccgcagtgggttcgcgtggttggcggttttactgaacatcagtttgtggaaaagcgtctgccaactatcgaagagatcaacgccattgcgccggacaccccggtgtttctgctgcatctctatgaccgcgcgctcctgaacgccgcggctttgcgtgccgtcgggtatacaaaagagacgccggaaccacccggaggcgagataacccgcgatgcgaaaggcaatcctaccggattattactggcacgccccaacgcaggcatcctttatgccacgctggccaaaggccccaaactgccgtttgactaccaggttaactccacccgccatttcatgcgtgagctgaatcgtctgggcgtaaccggtgtcatcgacgccggtggcggattccagaattaccccgatgactacgccgttattcagaaacttgcagatgaaaatctgatgaccgtgcgcctggcctataacctcttcacgcagaaaccccaggaagagaaagaggattttctcaactggacccgctccgtcacctacaaacagggtaacgactacttccgccataacggcgccggtgaaatgctggtattttcggcggcggatttcgaagacttccgccagccgcgaccggatatgccgccggaaatggaaggcgagctggaagaagttgttcgcattctggcggaaaaccgctggccctggcgtctgcatgccacctatgacgagaccatttctcgcgccctcgatgtttttgagaaggtcaatcaggatatcccgcttgaagggattaactggttcttcgaccacgccgaaacaatttctgagcgttcaatcgatcgtatcgcggcgttaggcggcggtattgcggttcagcaccgtatggcatatcagggtgaatatttcgttgagcgttacggtgccggcgctgcggaagccacgccgcccattgcccgtatgctggaaaaaggggtgaaagtgtccgccggtacggatgccacccgcgtagcatcctataacccgtgggtttctctcgcctggatgatcaccgggaaaaccgtgggaggcatgcagctttatccgcgtcgtaactgcctggatcgggaaacagcgctccgaatgtggacggagaacgtcacctggttctccaatgaagaaggtaaaaaaggccgtattcaggccggtcagttcgctgacctcattgtgccggacaaagacttttttgcctgcgccgaggatgagatctccttcctgtcttcagaattaacgatggtgggcggaaaaatcgtctggggggcgggtcctttcgaatccctggatgacaatcctgtccctcccgcgatgccggactggtcgccaacgcgcaccttcaaaggctacgccgcatggggagagccagaaggcgcggggaaaaactcgcttgccgtacgacaaatggcgatggcctcctgcggttgctctcacggctgcggcctgcacgggcacgatcatgctggcgcatggacatccagcctgccggtatcggatctgaaagggttctttggcgcgcttggctgctcctgctgggctgtctga

SEQ ID NO: 72214 - DNA, 435 bp, Citrobacter koseri
atgacattttcacaacgtctgacgcatgccgttcgcccccttatcggggcggcggtatgccgttggctggcttatctcgggctatgcgcggcctacttgcagggcgggatcaataagctgctggattttcagggcgctatcggcgagatgaaccatttcggcctgtctcctgcgccgttgtttgccgcgctggttattgcgctggagctgggcgcgtcaatcatgctcctgacgggttgcctgcgctggcttgcttcgctggcactggcggggttcacccttgtcgcgacgttcctggcgctgcgcttttgggaacttccggcaggcatggagagattcagcaccgccaacgcattttttgagcatctgggtcttgttggcggctttctgctcgtggcttggctggacgtgcagaaaaagacggttgacgaataa

SEQ ID NO: 72215 - DNA, 1512 bp, Citrobacter koseri
atgaaacaacatgctgggggattggtgggaaacaagctagtttttgtgatcgtattcttaaccatcactataaccggcatggtgactttttggctgggtgcgtccagccgggtagataatgacaaaagagcattaatccagcgcgtagattcgctgctgtttgaagcgaaacagatatcagattcgttgaccgcgcatttaacagaacgctgctcagatgaaacggtgcgtatgctgacgaaacagatacaccgttatccgcatattgggggcattttcctgttgcaggattcgcgggtatattgctcatccgggatggcgaaacctgaactcagcaatttaaccgcaggggagaacggtaatcggctatttttagttgatgaaacgccggcatttcgcggggagcctgtattagcctacgttactgtgagaggaaataacgcaatagtggtgacgatcagtacctactggtttaagtcgctgcttgcagacagtcgtttacttgttaacgtgaatggaaatattctctccgatgataagttaatcagtacaaacagtattgattttcaaaactccgcctggcaacaatctaatatgtttgattatcaggtaatggaatacccggaacatacgggcattgcttctgttcttaactttatttttattctctttttatccgcagcgattgccgtccctgccgcttttctgtttaactatacgctacaacgaatcgcgatgtcccggtatatacaacttcgccgggggctgcgcaaacagcagttcgttccttattacgaacccgtcatgaattgtgcttccggggcattatatggcgcagaagtggtcatgcgatggaagaaggggaacgatacatccgttattaatgaagagattatctctctggcaaataaaaccgggatgatatctccattagttaactttattttacgacaggtggaaaaagatatactctctttacgcctcagactgccgagaacattctacattaatttccgacttagtgaatcgatgatcgctatgccagaacttattgattcgtttgttgagtttcaacaacgcttgcccagcgatgtaaaactgacgctggaatttcctgaggttgtttatcgtgatacaacgcttgagtttgattcagttctcaggaggttacgtgttgaaggcattaaaattaaaatgagttccttatttttagagcgtttaaatgctgaccgtaatttataccttccggttgatgctgtcagaattgaaaagtcaattaccggattaatctcggactccaaagaacctgtcgcgagtgttgatgatattattcgttcggcggtaaataaaaattatacgattatcgcggatggtattgaaaatgatcagcagtaccactatttatcactgcgcggtgttgttttacaacaggggaattactggtcaatgccattgtccagttttcatttaatgcagtatattattcagagcgataaagtattactgtgttaa

SEQ ID NO: 72216 - DNA, 582 bp, Citrobacter koseri
atgattgtaatctcagaaaatagttttttccatcttggggttagcgcattagtagaaagaatggcattgaataccacccgtaatttgattgtgtttgatacggggcgcgattgtctctatatgcttgatactgaagaggcaaagatgccttttttccatgaaccgattttgattttttcacattgtcggcgtatttatctcaccgagaaaaacagaaaattcaaaatcgaaacgctgctatcaaaaacgaaatctcatcccgctgtcagacggaagcgagaagtattaaccgtaagtgagttacgcgtcataaaaaaagtttgtcaggggatcagtcaacgacgaattgcagaacagttcaaggtcagcgaaaagacgatcagtaatcaaaaaatgaacgccttgcgaaagctgagcatcaataaaacaacaaagtttttcgttgagtatctggcctggctgagattgtggcatgagtatgttgagtataaaaacaatcaaatgcgaaaaccggttaaactctctgtcatcacgcctgaaacctttacaaaaaggcagagtgaggttttaatagaggtttaa

SEQ ID NO: 72217 - DNA, 6960 bp, Citrobacter koseri
atgaataaagtgtttaaagtcatctggaactccaggctgaatatatttgtcgtggcatctgaattagcgcgtggttattgtaaaagcacggtcgggagcaccagttttggcagtcttttaaaatacccattaatgagtgcgctggctgtttcgatttcgtgtattttaacgactggcacattcgccgccgatttacaggtttatgatttctctcctcaggatccgtttgaagagattatttctggttccacgcatttgacaggcggtttttctggaatacagcgaggagaaacaggatatacctggacaacgcttggtcaggccagagaggatgggttaattactggcgattccgggcaatgggtggataaagatatcttccgtatgggctcgcagaccaaatctataaattacaccgaccccgttaccggtagcacggtaacgatgaaagtttatgataacaatgatatgcagaccgaagcggccaaagatttccgggttgtcgtttctcaacccgtcggaaaagatggtcagtatgtcgatcgtaatttgtatcaggttggggcgggcgcttctcttgatgtcgatgtcggtcagaaaacggggaattgggtcggtgctgcggataaccagttcaacgttatcatgaaaagttcggtaaatacgcaaaacttatcgtctgcttatcatgtcactaatggcggcagccttaactaccagtctaaaacagtcgttcaactggggaatagtgataacaatataaaagacgccagcaatgcactggcatggatgacggcggctgattttgttggtgagtttgacagcgttattggtaagcagaatattaccaacattgatgagttcaaggcgtataacgatgcgttgattcaggcgctccaggatgggcaaattcagctaacggaggcgcaatatgctgatgaactgaataaagccagggatacctcactgcacgggatcttcgctgatacggggagtattgcggctgatgatgccatcagagcctttgttaacagggatgcggtatcctatattcatggcgtgggcagcggcaccaatgtggttatcgataaggatgccaacattcagttagtgggatcggatgctacggttgttaacctggaaaatggcgccagactgacaaacaacggcacccttggtaccgcaggtaatacttatcgcggcgcttatatcattgctgcgagaaatacgtcttttgttgataacaacggcgttattgatgcgggcacgaaccccgaaatggcggattttttctcaagtggggcggcgggcgtagcgcaaggtgcgcatactgccattctggctaatggttcctctgtaattaataacaacagcagcggcgtgataaatgttgcggccagaggtaactattatggtaataccggcgtgttgatgagcggtaatgccacgcttaataatgatggtgctattaatattgcagcgagtaatgaggcgaacagtatattaggtaatggtgccaatatcggcgtcgttacccaacaaaacaccacctttaataaccggggcacattgtatattggtcgcctggcgcagcgtgcacctgatgatgcaaacacggatatcgcgatcaagcagcagtcaattggggttcatctgtacggtaatggtacttataacggttccgatacttcacagattattattggcagtaaagtccagaatgcgacagcgattgatgttggcgggaatgcaactctcgatcaaaaagggagcattaatatcaatggtgctgtaaccggggagtccgtttcttcgaatattggtattattgcacgcgcaggaacccaggccgctaaagtcgttcatgatggcatcattaatctgaacggcctgaacagtaccgggatacaggtgctggaaaatggtcagataaccagttcgggcacgattaatattaatggtggactggacccagtaacccactatgccaactatggtatttacgtccagggtgaaaaggcgctggcaatattgtctggcaccgtaaatttaagtggcgatggcgctattggggttcatgcgcgtgataaaggtgaaattgatgttaccgagaatggtactgtcaatttcaaagatggcgttaatcagacgggctattatatttttggcgcgggttctactatcaaaaacgcggcctccagcgttcaggacgcgtcaacccagaatgccacgctgtaccgcgttgacggaggcgccagcttctatggttctgccgatagctcagcgcagctaaacgcttctggtgatggcgcaacgattattcggacaaccggtgctggtagccactttgattccggtaaacttgctcttagcgtcacggggacaggagcgacgggcatccgaattgaaggaggcgcgacgggcgaaattacctcggatgcggttattgtcagggtggccgggaaagataccactgccggcattgttgatggtaactattacaaccttgatggctccgttaatgatgcgcaaaaaggtgactccgtattaaccagttatgcggtgctggagacagcaaacacggcagacggcgcatttggctacatcgccagaaatggcggccgtctgatccatgaaggctcgattaatttcacggctgacaacagtaccgggatactggtggatggcgggatcctggaaaaccattctgatgtcactgtgaatggcgtggcggttaatattcagggcgctaactcagaggtgaccaacagtggcgtggtgaccgcaacggatggccaggctgcctatctggttgggaacaacgccacgctggcgctgaatggtaacggtgaaacccgggcggcgggcaccgctcacgggatcttactggatactggcgcgaaaggcctgacggttgatggtgcgactatcacaatggatagcgctggtagcggcaacgcaattgaaaacaaagccgcgattagcggtattcagttgaaaaataccacgattaatgtcggtaatggcgtgggtgttcacaccggcgcatcgatggcgcaaaccaactccggcacgatcaatattaatggcagcggtacagggatactgtttgagaacgtggctgatggctctgacaccgatcagacgctggatatgtctgactccagagatctggtgatcaatgtgaacggtgctcaggggaacgggattattacccgagcatccaccgacctgaaaaccggtgccagcgttaacgtcctggacagtgacgggaaatcagcgctggttgtccaggggacgacgaagaatgtagagcaatccggcaaactgatctcggtgtctgacaaggcggcggtggtcgatttgaataacggcgtacttgagagctttatcaataaaggcgatatcctggcgctggatgccagccacactgcgctggaaatgaacagtggtaacgggattaccttcaccaatgccagtggggcaaatattgtcggtcaggtgaatctgcttaatggcgacaatacggtgatccttgaatcaggaagcactgcgactgacattaccagcggcagcggcaaagataacttcattctgaagaatatcagcgagaatgaaagcggctcattgttcacgtcattaaatggcggcagcggcgacgacacattacagcttgagaattcgtcatacactttaacccgtgctgatgccattaacggcatggagcatattgcgctggcgaataattctgtttttaccctcgacaacgttgcactggggctgggtgacgacgaacttgatggcgcgggaaccggatacaccattgacggttccagccagcttagtattaagaatacggcggatgtgacttttaaaagccatcttgccgggacgggagttgttgccgttgatacggcgaataaccacttcaactttgatgctaataatgccgcagatggttttgccggtacgctggcgcttactaacagccgttttgaacttgacggtctgaatactcaggcgcttagcaacgctacgctgcaagctggaaatggcagcattacccatgtcggcagcggcgagcagaatatcggcggtctggatttcaaaggggggaccgtacagtttgacggcgtaactccgggtaacccaacggctttaggaacgattcacgctggcgcgatggatctctctggtcgcggtacggttcaggttgacagcggaacggtcagtaacgatcgtcctcaggctgatacgcatcgtccaatactggaacaggatgacgcgcaggcattgattaaactggcgacctctgacaccgccgttcaggggggcgccggtaacctggtgctgaaagataaagacggtaatgtgatcagcgatagcatcactgccgatatcgcccagaatggcgtggtggtggcgaaaggaacgtatgactatcgtctgaccggcggtgacagtgatgacggactttatgtcagctatggcctgacccaggtcgatttgttgggtaaagacgccgatgcgcttatccttgatgcgaacgggaaaagtggcaacgcggctgacctgagcgccagagtgaccggtagcggcgatctggcgtttgacagccagaaaggccagacggtgacgctgtcgaatatggacaatgattacagcggcgtcaccgatgtgcgcagcggtaatctggcgatgctgaacgataacgtgctgggaaatacccgcgagctgaaactggctggcgataccgggtttgatatgcgcggtcattcacaaaccatcggcaagctcacggctgaaagcggctctctgaccgatttgaacggcggtcatctgacgttgacaaacggtggtgaagcgtctggcgtactgacgggcgacggggagctcaccgttgcaggcggaaccctgaatgtctccggggcgaatacggggctgaaggcgacgaccacgattgctcagggcgcgacggcggtgctggataatacgctagggctgggaaccggagatattgttgccgccggactgcttaatctgagcaacgccacgggcgtgctgtacaacagcatcagcgatgccgggaaagtcgcactggatgccagtgatgtggtgcttgctggcaacaatagccattttgccgggaccttcgacatcgacaacgactccacgctgacggcctcttccgcgcagcagttaggcacctccgcgattcagaatgccggtaagtttgtgctgaacactcacgaaaactggtcgctggagaacggtgttacaggtagcgggagcgtggtgaagaatggcagcggcaacgtcacgcttagcgacagcgcccagtggaccggcgcgacggatatcaatgccggtggtctgactctgggcagcgcggataacgcgttcacgctggccagtcatcaggtcaatatcgggaaagacgggcgcttatccgggtttggcggcgtagccggaaatatggctaaccagggcacgctattgattggcgatgacgtcagcgcggctcgcagagcggtttcttcacctgtcagctttaccgtaggcggcaatctgacgaacagcggcgatatctggaccggaagcaaaggtaaagatgccggtaatcagcttgtggtaaacgggaactatcagggagatggcggtcatcttcatctgaataccgcgttgaatgatgataattccgtcacggataaactgattgttaaaggaaacacctctggcacaaccggcgtcagcgtgacgaatgctggcggttctggcgcgcagacgatcaatggcattgaagtgattcatgttgatggtcagtccgacggtgagtttacgcaggacggcaggattgtggccggggcgtatgattattcactggcccgtggtcagggcgacaacaacggtaactggtatttaaccagccataagacagatccaaatccggggccgggcccgaaacctgaacccgatatccgtcctgaaccgggctcctggacagctaacctggcggcagccaatacgctgtttgttacgcggcttcacgatcgtcttggcgaaacgcagtacattgacgcgctgacgggcgagaagaaagtcaccagcatgtggatgcgtcaggcgggcgggcataatgcctggcgggacagctccggtcagcttaaaacccagagtaaccgctatgtgatgcaggtagggggtgatgttgcccgctggagcggcgacggactggatcgctggcaccttggcgtcatggccggatatggacacaacagcagcaacacgcgctcctcatcgacagggtatcgctctgacggttccgtgaacggctacagcgccggggtgtatgcaacgtggtatgccaatgatgaaacgcatcagggcgcttatctggattcatgggcacagtacagctggtttaataacagcgtcaaaggccaggatattcagagcgaatcgtacaaatccaaagggatcaccgggtcgctggagctggggtacacccacaagctgggtgaatttgcaggaagtaagggctctaaaaatgaatggtttatccagccgcaggcgcaggccatttggatgggcgtcgaagctgacgatcatcgtgaatcgaatggcacacgtatcagcggtgaaggggacggcaacgttcagacccgactgggcgtccgtactttcctgaaaggccacagcgcgattgatgaaggcaaagcacgcgagttccagccgttcgtggaagtgaactggctccacaatacgcgcgatttcggcacaaaaatggatggtgtcagcatccggcaggaaggcgcgcgtaatctgggtgaaataaaaacgggcgttgaggggcaaattaatccacaactcaatgtctgggggaatgtcggcgtccagctgggcgataaaggatacaatgacacctcagcaatgatagggattaaatataactttaaatag

SEQ ID NO: 72218 - DNA, 921 bp, Citrobacter koseri
atgttcccacaatgcaaattttctcgtgcgctactgcacccgcgctactggcttacctggtttggtcttactgtactctggttactggtgctgcttccctaccccgttttacgcttcctgggtacgcgaaccggcagacttgcccgtccctttctgaaacgtcgcgaatccatcgcccgtaagaatcttgagctttgcttccccaatctgacgccggaagaaagggaaaagatgatagtggagaacttccactccctcggtatggcacttattgaaacgggtatggcgtggttctggcctgataagcgggtacgtaaatggtttgatgtggacggtctggataacctcacacaggcgcaagcgcaaaaacgcggtgtgatggtcgtaggcgtccactttatgtcgctggaattaggcggtcgggtcatggggctgtgccagccgatgatggcgacataccgcccgcacaataactcgctgatggagtgggttcagacgcggggtcgcatgcgttcaaataaagcgatgattgggcgcaacaatctgcgcggcatcgtcggcgcgctgaaaaaaggtgaagccgtatggttcgccccggatcaggattacggccgtaaaggcagttcatttgctcccttcttcgcggtcaaagacgtcgcaacgactaacggcacctatgtgttatcccgcctttccggcgcagcgatgctgaccgtcaccatgatcagaaaaggtgataactcaggttatcgtctgtatatcacgccagaaatggaaggctacccggaagaagagaaccaggcggcagcctatatgaacaagattattgagaaagagattatgcgcgcacctgagcaatatctctggatccatcgtcgtttcaaaacgcgccctttaggggaagcatcgttgtatgtttaa

SEQ ID NO: 72219 - DNA, 1239 bp, Citrobacter koseri
atggctgatacccgccctgaacgtcgctttacgcgtattgatcgtctccctccctacgtttttaacattaccgctgaactgaagatggctgcgcgtcggcgcggcgaagatattattgacttcagcatggggaacccggatggggcaacgcctcctcatatcgtcgagaaactctgtacggtggctcaacgcccggatacgcatggttactcgacctcacgcgggatcccgcgtttacgccgggcgatctcccgctggtatcaggaacgttacgatgtggatatcgatccagaaacggaagcgatcgtcactattggttcgaaagaagggttagcgcacctgatgctggcaacccttgatcatggcgataccgtgctggtgccgaaccccagttatcccatccatatttatggcgccgtcatcgctggcgcgcaggtacgttcggttccgctggtggaaggcgtggatttcttcaacgagctggaacgtgcgatccgtgaaagctacccgaaaccgaagatgatgattcttggtttcccctccaacccgacggcacagtgcgttgagttagaattcttcgaaaaagtggttgcgctggccaaacgctacgacgtgctggtggtccacgatctggcctatgccgatatcgtatatgacggctggaaagcgccgtcaattatgcaggtgccgggtgcgcgcgacgtggcggtggagtttttcaccctgtcgaaaagttacaacatggcgggctggcgcattggctttatggtgggcaaccagacgttagtcagtgcgctgtcgcggattaagagctaccacgattacggaaccttcacgccgttacaggtggcggcgattgccgcgctggaaggcgatcaacagtgcgtgcgtgatatcgctgagcagtataaacgtcgccgcgacgtactggtgaaaggcttgcatgaagccggatggatggtcgaaatgccaaaagcctcgatgtatgtctgggcaaaaataccggagcagtacgcggcaatggggtcgctggaatttgcgaaaaagctgctcaacgacgccaaagtgtgcgtgtcgccggggatcggtttcggcgactacggcgacacccatgtgcgtttcgcgctgatagaaaaccgggatcgtatacgtcaggcgatcagaggtattaagaccatgttccgcgcagacggcctgctgcctgcgggggcgaaatcggtaacagaaggtaccgagtag

SEQ ID NO: 72220 - DNA, 1698 bp, Citrobacter koseri
gtgcacgaaatattcaacatgctgctggcggtatttgaccgggcagcgctaatgctgttctgtctgtttttcctcatccgtatccgcctgtttcgcgaactgttgcataagtcagcgcactccccgaaagagctgctcgccgttaccgcgattttctcgatgttcgccctgttcagcacctggtccggcgtaccggtcgaaggctcgctggtgaatgttcgcatcatcgccgtgatgtccgggggcattttgtttggcccgtgggtcgggatcattacgggtgtgatcgccggtattcaccgctaccttatcgatattggcggggtcactgccgtaccgtgttttatcaccagtattctggcgggatgtatcgcgggctggataaaccggaaaatcccaaaagcacagcactggcgcgtgggtattttgggcgggatgctttgtgaaaccttgaccatgattctggtcattgtctgggcgccgaccatcgcgctgggcgtagatatcgtgtccaaaatcggtatcccgatgatcctcggcagcgtatgtatcggttttatcgtgctgctggttcaaagcgtggagggcgagaaagaggccagcgccgcacggcaggccaagctggcgctggatatcgctaacaaaacgttgccgctctttcgccaggtcaacagcgaatcactccgccaggtgtgcgaaatcatccgtcatgatatccatgccgacgcggtagcaatcactaataccgaacacgttctggcctatgtcggcgtgggggaaaccaactaccgcaataacgatgattttgtcagcccgaccacgcaacaggccatcaattacgggaaaatcatcattaaaaacaatgatgaagcgcaccgcacgccggaaatacactcaatgctggtcatcccattatgggaaaagggcgtggtgaccgggacgctaaaaatctactactgccacgcgcatcagatcacctcttccctgcaagagatggcgatcggcctgtcgcagattatctccacccaactggaagtgtcccgcgcggagcaactgcgggaaatggcaaataaggcagagctgcgagcgctgcaaagtaaaattaatccccatttcctgtttaatgcgctgaacgccatttcgtcatccattcggctcaacccggacaccgcacgccagctcatttttaatctgtcacgctatctgcgctataacattgaattaaaagatgatgagcaaattgatatcaaaaaggagctgtatcaaatcaaggactacatcgccattgagcaggctcgttttggcgacaagctgaccgtcatttatgatattgatgaagaggtgaactgctgcattcccagcctgcttattcagccgctggtagagaatgcaatcgtccacggcattcaaccctgtaaaggaaaaggcgtagtgaccatcagcgtcgccgaatgcggcaaccgtgtgcgaatcgccgtcagggataccggccacggtattgatcctaaagtaattgagcgggtggaagcgaatgaaatgccgggaaataaaatcggcctgctgaatgtccatcatcgcgttaagctgttatacggtgaagggctgcacatccgccgtctggaaccgggcaccgaaatcgccttttatgttcccaatcagcgctcccctgccgccgcaccggcaacgttattgctttaa

SEQ ID NO: 72221 - DNA, 735 bp, Citrobacter koseri
gtgaaagtcatcatcgttgaagatgaattcctggcccagcaagaattaagctggctgataaaagagcatagccagatggagattgtcggtacgtttgacgacggtctggacgtgctcaaatttctacagcataaccgcgttgacgccatttttctggacatcaatattccctcgctggatggcgtactgctggcgcaaaacatcagccagttcgcccataagccgtttattgtgtttattaccgcatggaaagagcacgcggtagaggcgtttgaactggaagcatttgactacatactgaagccgtaccaggaatcacgcatcgtggggatgctgcaaaaactggaggccgccaggcaacagcagcaggtcgtcgccgttcccggcagccctgtcgcccgtgaaaacgacaccatcaatctgatcaaagatgagcgcattatcgtcacgccgatcaacgatatctattacgccgaagcgcatgaaaagatgacgtttgtctacacgcggcgggaatcgtatgtcatgccgatgaatatcaccgagttttgcagcaaactgccagcgtcgcatttctttcgctgccaccgctcgttttgtgtgaatttgaacaagatccgcgaaatcgaaccctggtttaacaacacgtacatcctgcggctcaaagatctggaatttgaaatcccggtcagtcggagtaaagtgaaagagttcaggcagttaatgcatttatga

SEQ ID NO: 72222 - DNA, 858 bp, Citrobacter koseri
atgaaagagccaggcttgcccgcagaccaacagttttttgccgatctgttcagcggcctggtgttaaacccgcagcggctgggacgcgtctggtttgccacgcaacataccgctctccccacaggcagcctgtgtattgatttaccgcgtctcgacatcgtattgcgcggagaatacggtaacctgctcgaaaaaaaacagcacgccctgacggagggggagatgctgttcatccccgccagggcggcaaacctgcccggtagcgataaaccggtgatgctgttaagtctggtgtttgccccggcctggttaggattatcgttttacgataaccgtaccgcttccctgttacgcccggtgcgacgcattgagttagcgcaccagcagcgcggcgaaggggaagccatgcttacggctctgacccacctgagccgctcgcctcaggcgcaggatattattcagcctctggttctcagcctgctgcatctgtgccgtagcgtggtcaatactcgcccggactcacgccgcccgcgctcggaatttctctatcacagtatgtgcaactgggtgcaggacaactacgcccggccgctgacgcgggaaagcgtggcgcagtttttcaatatcacgccgaatcacttatcaaaactgttcacccaacacggcaccatgagttttgtcgagtatgttcgctgggtgcgaatggcgaaggcgcgcatcattttgcagaagtaccatctgtcgattagcgaggtggcggaacgttgcggatatcacgacagcgactatttttgccgcctgtttcgtcggcagtttggcctgacgccgggagagtacagcgcgcgttttcaggggtaa

SEQ ID NO: 72223 - DNA, 2496 bp, Citrobacter koseri
atgttaacgattcaatttctctgcccattgccaaatggcctgcatgcgcgtccggcgtgggaactgaaagagcagtgtagccagtggcaaagcgaggtgacgtttattaaccatcgccagaatgcgcgtgcggacgcgaaaagctcgctggcgctgatcggcaccggaacgctgtttaacgacagttgcagtctgaacattagcggcagtgatgaagagcaggccaggcgttctctggagacctatctccagcaccggtttatcgacagtgacagcgttcagccgacctctgcggaactggcggcgcatccgctgccgcgctcgctggttcgactgaatcccgatttactgtatggcgcggtattggctaacggcgtcggcgctggcgcgctcacgttgtggcaaaacgacaatctggaggcgtatcgcgcaattccggccagcgcggaagacagcacccggctcgaacatagtctggcgacgctggcggagcagcttaatcaacagcttcgcgaacgtgacggtgaaagtaaaacgatccttagcgcccatctgtcgctgatccaggatgacgagtttgcgggaaacattcgccgcctgatggacgagcagcacaaggggttgggcgcggcgattatcgccaatatggagcaggtgtgcgacaagctgtcgtcctccgcaagcgactacttacgcgagcgggtaagcgatatccgtgatattagcgaacagttgctgcatatcacctggccggaacgacgcccgcgtaatacgttgattcttgaacagccgaccattctggtggcggaagatctgacgccaagccagttcctgagcctcgatttgcagcacctgtccggcatgattctggaaaaaaccggcagaacgtcgcacacgctgattctggcgcgcgcatccgcgattccggtgctcagcgggctgcccctggacgcgctcagtcgctatgccgggcaacctgcggtgctggatgcccagtgcggcgtgctggcgattaacccgaacgccgccgtctgcggctattacgccattgcgcagcaactggcggataagcgtcaacagcaacaggcgagagaagcgtctttgcctgctttctcccgggataatcagcgtcttgatatcgccgccaatattggtacggcgctggaagcgccgggcgcgtttgccaatggcgcggaaggcatcggtctgttccgcaccgaaatgttgttcatggatcgcgacagcgcccctgacgaacaggaacagtttgaggcctaccagcaggtactgctggcggcgggagagaagccggttatttttcgcacgatggacattggcggcgataaaaatattcgctatctcaatatcccgcaggaagagaaccctttcctcggctatcgcgccgtgcgtatttatcctgagtttgccgggctgtttcgcacgcagcttcgcgctattttgcgtgcggcaacctttggtcaggcgcaactgatgatcccgatggtgcacagtctcgatcagatcctgtgggttaaaagcgagctgcaaaaagcgatcgtggaactcaaaagagacgggctgcgccatgttgcaacgatcccgctggggattatggtggaagttccgtcggtctgttacatcatcgaccacttctgcgatgaggtggatttctttagcatcggctcgaacgatatgacccagtatctgtatgccgtcgatcgtaataatccgcgcgtctcgccgctgtataacccgattacgccgtcattcctgcgcatgttgcagcagatcgtccgcacggcgcatcagcacggaaaatgggtggggatttgcggcgagctgggcggtgaaagccggtatttaccgctgctgctggggctggaactggatgaattaagcatgagcagtccgcgaatccctggcgtgaaaagccagctgcgacagatggacagccaggcgtgccgggcgcttgcggcgcaggcctgtgagtgtcgtagcgcagaggagattgaaacgctgttgaatcagtttgcgccgcaaaaagacgtgcgtccgctgctggcgctggaaaatatctttgtgggcgaatcattgatcaacaaagagcaggtgattcagtttctttgcggcaatctcggcgtaaacgggcgtactgagcatccgtttgagctggaagaggatgtctggcaacgtgaggagattgtcacgactgccgtcggttttggcgtggcgatcccgcatactaaatcacagtggatacgccactccagcatcagcattgcgcggctggcgcgccctgttgactggcagtcggagatgggcgaggttgagctggtgattatgttgacgctgggcgctgatgaagggattaaccatgtgaaagtcttttcgcagctggcgcgtaagctggtgaataaaaacttccgtcagtcgctgttcgccgctcaggatgccgaaagtcttctggcgctgctggaggcggaactgacgttttga

SEQ ID NO: 72224 - DNA, 1038 bp, Citrobacter koseri
atggatttatcgctgttaaaagccctgagcgaggcggatgccattgcctcctcagagcaggaagtgcgccagatcttactggaggaagcggatcgtctgcacaaagaggtgcgctttgacgggctgggatcggtgctgatccgtcttaatgagtccgatgggccgaaagtgatgatctgcgcgcacatggatgaggtggggtttattgtgcgcagtatctcgtcggaaggggcgatcgatgtgttgccggtcggcaacgtgcgtatggcggcccgccagctccagcccgtgcgtattaccacgcgggaagacagtaaaattcccggtttgctggatggcgagcgtaatggaaatgaggttggcgccttgcgggtcgatattggcgcacgctcatatgatgaggtgatccaggcgggcgttcgacctggcgatcgcgtcacttttgactctgcgtttcaggtgctgccacaccagcgggtaatggggaaagcgtttgatgaccgactggggtgctacttgttgatcatgctgctgcgtgaatggcatgacgcagcgctgcccgccgaggtctggctggtagccagctccagcgaagaggtcgggttacgcggcgggcaaacggccgctcgcgcggttgctcccgatatcgctatcgtgctggacaccgcctgctgggcgaaaaactttgattatggcgcggcgaatcatcggcagatcggtaaagggccgatgctggtgcttgccgataagtcgctcatcgcgccgcccaaactgaccgcctgggttgaaagcgtcgccagcgactccggtctgccgctgcaactggatatgttcagtaatggagggacggatggcggagcggtgcatttgaccgggacgggaaccccgacggtggttattgggcccgccacgcgtcatgggcattgcgctgcgtccattgcggattgccgcgacattatccacacgcagcaacttttatcggcacttattacccgtcttacgcgtgagactgtcgttcatcttacggatttcagatga

SEQ ID NO: 72225 - DNA, 1086 bp, Citrobacter koseri
atgacgttacgagcatcgcttcgccagtggctggtggaacaacgcctggatgcggtattgatttcatcccggcagaacaagcaaccgcatttggggatttccagcagcgccgggtttgtttttatcacgcataaaagcgcgcatctgctggtggatggccgctattacgctgacgttgaagcgcgagcgcatggcgatcaactgcatctgttggccgggtcgcagacgctgacttccattgtgaaccagataatcgacgacgagcaattgcaggtcattggttttgaaggcgcgcaggtgagttgggattgcgcgcaacgctggcaggaaaggctgcgggcgaagctggtgagcgcgtcgccggacgcgctgcgacagatcaaaacggcacaggaaatagcgttgatacgcgaggcctgccggattgccgattgcagcgcagagcatatccgccgttttattcgccccggccttcgcgaacgagaaattgccgcggagctggagtggtttatgcgccagcagggggcggaaaaagcctcttttgacaccatcgtcgccagcggctggcgtggggcgttaccccacggtaaagccagcgaaaaaatcgtcgcggcgggtgaatttattaccctggattttggggcgcaatatcaggggtattgttcggatatgacgcgaacattcctcgtgagcgggcaggatgcgcccgtcgcatctcatccgctgttcgccgtttaccagacggttcttgaggcgcagcagacggcgattgccgccattcgtccgggcgtgtgctgccaggcggtggatgctgcggctcgtcgggtgattgaggcggcgggctatggcgattattttggccacaacaccgggcacgctatcggcattgaggtgcatgaagcgccgcgcttttcaccaacggataccacccgacttgccgcaggcatgttgctgaccgtagagccgggcatttacctgccggggcagggcggcgtgcgtattgaagatgtcgtactggtcacggaagacggcgcggaagtgctctacacgatgccgaaaacagtattgctcacgggagaagcataa

SEQ ID NO: 72226 - DNA, 1248 bp, Citrobacter koseri
atggccattaaaaaacgcagtgcaaccgttgtgcatggcgcatccggtgcggcagcggcaataaaaacccctccggcctcccgtaacagcttctggggcgaacttccgcagcacgtcatgtcgggtatttcgcgcatggtgcccacgttaatcatgggtggggtgattctcgctttcagccagctgattgcctatagctggctgaaaattcccgcagataccggcattatggatgcgctgaatagcggaaaattcgacggttttaacctctcattactgaaattcgcctggctatcgcaatcctttggcggcgtgttgtttggctttgcgattccaatgttcgcggcgtttgtcgctaactctatcggcggtaagctggcctttcccgcaggattcatcggcggcttaatgtccacccagccaacccagatactgaattttgacccggccagcctgcaatgggtaacgaccgcgcccgtaccgtcaacgttcatcggggcgctgattatctcgattgtcgcgggctatctggtgaagtggatgaatcaaaaaatccagttgcctgatttcttactggccttcaaaaccacctttttgctgcccattttgtccgccatttttgtgatgctggcgatgtactacgtgatcacgccgtttggcggatggatcaacggcggtatccgcacgctactgacggcggcgggtgaaaaaggaacgctgatgtatgcaatggggatctcagcggcaacggcaattgacctcggcggcccgattaacaaggccgcaggatttgtcgcttttagtttcactaccgatcacgttttacccgtcaccgcgcgttctatcgcgattgtgatcccgccgattggtctggggctggcaacgattctcgatcgtcgcttaaccggtaaacgcctgtttaacgcgcaactgtatccgcaaggcaaaaccgcgatgttcctggcgtttatggggatcagtgagggggcgattcctttcgcgctggaaagcccgatcacggcaatcccttcgtatatggtgggcgcgattgtcggctcgacaaccgccgtctggctgggcgccgtgcagtggttccctgagtctgcgatttgggcatggccgctggtgagcaatcttggcgtctatatggcggggatcgtgttaggggcggtgatcacggcgctgatggtcgttttcctgcgtcacatgatgtatcgcagaggcaaactgctgattgaaagcctctga

SEQ ID NO: 72227 - DNA, 327 bp, Citrobacter koseri
atggcgaaaaaactcattgctgtttgcgcatgcccgatggggctggcccacacatttatggcggctcaggcgctggaagaggcggcggttgaagcgggatacgaggtgaaaattgaaacccagggggcggacggcatccagaatcgcctgacggcgcaggatatcgctgaggcgacgctaatcatccattccgttgccgttacccccgaagacaatgaacggtttgagtcgcgcgatgtgtatgaaattacgctccaggacgcgataaaaaacgccgccggtatcattaaagaaatcgaagagatgattgcggcagagcaacaataa

SEQ ID NO: 72228 - DNA, 966 bp, Citrobacter koseri
atgacaaaatatgctttagtaggtgatgtaggcggcaccaacgcgcgtcttgctctgtgcgatatgaccagcggggagatttcgcaggcgaaaacctattccgggctggattatccgagcctcgaagccgtggtgcgcgtgtatctggacgagcataacgccagggttgaagacggctgtatcgctatcgcctgcccgatcaccggtgactgggtggcgatgaccaaccacacctgggcattttctattgcggagatgaaaaagaaccttggctttagccatctggaaatcatcaacgattttaccgccgtgtcgatggcgatcccgatgctgcgcaaagagcatctgatccagttcggcggcgcggaaccggttgccggcaaaccgattgccgtttacggcgccggaaccggattaggggtggcgcacctggttcatgtcgataaacgctggatcagcctgccgggcgagggtggtcacgttgacttcgcgccgaacagcgaagaggaaggcattattctcgaagaactgcgtgcggaaattggtcatgtctccgccgagcgcgtgttgtcggggccagggctggtgaatctgtatcgcgctatcgtcaaatctgatggccgtctgccggaaaatctgcaaccgaaagatattaccgaacgcgcgctggcggatacctgcattgactctcgtcgtgcgctgtcgctgttttgcgtcattatgggccgttttggcggtaatctggcattgacgctgggcacgtttggcggcgtctacattgcgggcggcatcgtgccgcgcttcctggagttctttaaagcctctggctttcgtggcgggtttgaagacaaaggccgtttcaaagcctacgttcaggatattccggtttacctgattgtgcatgataatcccggtctgctcggctccggcgcgcatctgcgccagacgttagggcaaattctgtaa

SEQ ID NO: 72229 - DNA, 1236 bp, Citrobacter koseri
atgctccatccgcgagccagaacgatgctgttattatcgcttcccgcactcattattggcattgcctccagtctggtattgatcgccgtgatgaaagtcgcctccgttttacagcgcctgctgtgggagcaaatccccgtcggcctaggcattgctcatgattcccccgtctggattatcggcatgctcacgtttaccgggatcatggtcgggcttgtcatccgctacagccctgggcatgcaggcccggacccggcgaccgaaccgctgatcggcgcgccgatgagccctgtcgcgcttccgggcctgctgatcgcgctcattctcggcctggcaggtggagtaagcctggggccggagcatcccattatggcggtgaatatcgcgctggccgtcgctatcggcgcgcgccttttcccacgcataggggcgctggactggacgatcctggcttccgcaggcactatcggcgcgctgttcggcacccctgtcgccgccgcgctgattttctcgcaaaccctgaacagttctgacgatacgcccttgtgggatcgtctgttcgctccgctgatggcggcagccgcaggatcgttaaccaccagcctgttcttccatccacacttctctttgccgattgcgcactacacgcaaatgcggctgagcgatattttcagcggcgcagtggtggcagccattgcgattgcggcgggtatggtggcggtatggtgtttaccacgtctgcatacgttggtgcatcgtctgaaaaatccggtacttatcctcggtatcggcggttttatgctgggaattctgggcgtattgggcgggccgctgaccctctttaaagggctggacgagatgcagcagctggcgttcagccagacgctgggcgccacggactactttatgctggcgatcgttaaactgggcgcgctggttatcgccgccgcctgcggtttccggggcgggcgtatcttcccggcggtctttgtgggcgtggcgctgggtctgatgctgcacgcgcatgttgaagcggttccggcggcaattaccgtctcatgcgcgattctggggctgatgctggtcgtaacccgtgacggctggctgagcctgtttatggccgcagtcgtcgtaccggacaccaccctgcttccgctgttgtgcatcgttatgcttcccgcctggctcctgctggcaggcaagccaatgatggccgtcaaccgccacgacagataa

SEQ ID NO: 72230 - DNA, 1656 bp, Citrobacter koseri
atgcaaaccccatattccgttgcggattacctgctggacagactggcaggctgcggtatcgggcatctttttggtgtgccgggcgattataatttgcagtttcttgaccatgtgattgcgcatcgtgacgtatgctgggtagggtgcgcgaatgagctgaatgccgcctatgcggctgatggctacgcccggttagccggggcaggggcgttgttgaccactttcggcgtaggggagttaagcgcgcttaatggcctggcgggaagctacgcagagtacgttcccgtgctgcatattgtcggcgcgccatgcagcggcgcacagcggcggggcgaactgatgcatcacactctcggcgatggcgactttcagcatttttaccgtataagccaggctgtaacggccgccagcgccgtgttgaatgaacagaacgcctgttatgaaatcgaccgcgtattacgcgaaatgctgacgatgcgcagacccggctatctgatgttaccggcggatgtggcaaaacgacctgctgtccctcctgtaaacgttctcacacctgaccgtgctgaaggggaaaatgacacggtggcggcgtttcgctatcgcgcgcgccagcggctgatgaacagcccgcgcgtggcgctgctggcagactttctcgccttgcgttttggcttgcagccagttttacaacgctggatggcggaaacgccaatagcgcacgcgacgctgctcatgggcaaagggctgtttgatgagcagcacccgaattttgtcggtacatacagcgccggagccagcagtgaatcggtgcgtcaggcgattgaagaggcggataccgttatctgcgttggcacccggtttgtcgatacgctgacggcgggcttcacacagcaactgccgcaggaacgcacgattgaaatccagccgcatgcttcgcgcgtcgggaatagctggttcagcggtctgtcgatggagcaggcggtcactacgttgcgcgagttatgtctggaactttcattttcgcctcctccgaccccggcgcatgcgcccggcggccatattgagaaaggggcgctgacgcaagaaaacttctggcatacggtacaggcgtacctgctgccgggcgatattatccttgccgatcagggaaccgccgcgtttggcgcggcggatctttcactgcctgctggcgcggacgtgctggtgcaaccgctttggggatcaatcggctatgctttgcccgctgcctttggcgcgcaaaccgcctgcccggaacggcgagtgattctgattaccggagacggcgcggcgcagctgacgattcaggaactggggtcaatgatgcgggatggacagtcgccggtcattctgctgctcaataacgatggctataccgtggagcgcgccattcatggggcgaaccagcgttataacgatatcgccggatggaactggacgcaggttccgcaggcgctcaatgcgaactgtcaggcggagtgctggcgggtaacgcaggctatccagctggaggaagtgctggcgcgcctgaaatccccgcagcggctttcgctgattgaggtcgtgctgccgaaagccgatttgccggaattgctgcgtaccgtcacccgcgcgctggaatcgcgcaacggggagtaa

SEQ ID NO: 72231 - DNA, 999 bp, Citrobacter koseri
atggtttatcgggccgatgaaaatcgctaccagacaatggagtatcgccgctgcggtcagagcggtttaaagctccccgccatttcacttgggctatggcacaatttcggtgataccactcaggtagagaacagccgggcgctgctacagcgtgcttttgatctgggaattacccattttgatctcgcgaataattacggcccgccgccaggctcagcagagcgccactttggccgtatcctacaggaagattttttaccgtggcgcgatgaactgatcatttccactaaagcgggttataccatgtgggatggcccttacggtgactggggttcgcgcaagtatttgatagccagcctcgatcaaagcctgaaacgtctggggctggagtatgtcgatatcttctatcaccaccgccctgacccggaaacgccgctcaaagagacgatgaaagcgctggatcatattgttcgtcagggaaaagcgctgtacgtcgggatttctaactatccagcggatctggccagacaggccattgagatcctggacgacctgggcacgccgtgcctgattcaccagcccaaatactcgatgtttgagcgctgggtcgaagacggcttgctggcattattgcaggagaaaggcgttggcagtatcgccttttcaccgctggcgggcgggcaattaaccgatcgttatctcaacggcattccggctgattcccgggccgccagcggaagccgcttccttaacccggatcagattaccccggagaaactggaaaaagtgcgccagttaaatgcgctggccggacgtcgggggcaaaaactgtcccagatggcgctggcctgggtgctgcgcgacgacaaggtaacgtcagtgctgattggcgccagcaagaccgcgcaaattgaagatgccgtggggatgctggcgaatcgtcatttttctcccgccgaatgcgcagaaatcaacgcaatcctgaacggcagccaataa

SEQ ID NO: 72232 - DNA, 321 bp, Citrobacter koseri
atgttcaggtcactgattctggcggcagccttattggcttttacaccgcttgccgcgaatgctggcgaaatcaccctgttgccatcgataaaattacaaattggcgatcgcgataattacggtaactactgggacggcagatactggcgcgaccgggattactggcaccaccattatgaatggcgtaaaaatcgctggtggcgacacgataatggctatcatcgcggctgggataagcgcaaagcctatgaacgcggctaccgcgaaggctggcgcgatcgcgaccaccaccctggccggggtcacggacaccgtcattaa

SEQ ID NO: 72233 - DNA, 1239 bp, Citrobacter koseri
atgacaaacgatcgcgttgaaagcagtagtggacgagcggcgcgcaagttaaggctcgcattgatgggcccggcgttcatcgccgcgatcggatacatcgatcccggtaactttgcgaccaatattcaggccggagccagctttggctataaattgctgtgggtggttgtctgggcgaacctgatggcgatgctcatccaggttctgtcggccaaactggggattgcgacaagcaaaaacctggcggagcaaattcgcgatcattacccgcgccctgtcgtctggttctattgggttcaggcggaaatcatcgcgatggccaccgacttagcggaatttatcggggcagcgatcggctttaagctcattctcggtatctccctgttgcagggggcggtgctgacgggtatcgccacattcctgattctgatgttgcagcgtcgtgggcaaaaaccgctggaaaaagtgattggcggattactgctgtttgtggccgcagcctatattgtggaactgattttttcgcagccaagcctggcgcagctgagcaaagggatgataatccccagcctgccgaactctgaggcggtatttctggccgccggggtgctgggcgcgaccatcatgccccacgttatctatctgcactcttctttaacgcagcatctgcacggcggctcccggcagcagcgctatgctgccactaaatgggatgtggcgatagcgatgacgattgcagggttcgtgaacctggcgatgatggcgaccgctgccgccgcgttccattttagcgggcataccggtattgccgatcttgatcaggcgtatctgacgctggaaccgctgcttagccatgctgcggcgacggtgttcggcctgagcctggttgcggcggggctctcttccaccgtggtcggtacgctggcggggcaggttgtgatgcagggatttgttcgcttccacattccgctgtgggtacgccgcaccatcacgatgatgccgtcgtttatcgttattcttatggggcttgatccaacccgaatcctggtgatgagccaggtcctgctgagtttcggcattgcgctggcgttggtgccgttattgatttttaccagcgatcgcacattgatgggcgatctggtgaatacccaatgggtcaagtacatcggctggatgattgtggtgctggtggtggcgctgaatatctggttgctggtaggaaccgcgctggggttgtga

SEQ ID NO: 72234 - DNA, 1188 bp, Citrobacter koseri
atggaccgcgtccttcattttgtcctggccctcgctgttgttgcggtactcgcactgctggtaagccatgaccgtaaaaaaattcgcattcgttacgtcattcagctgcttgttatcgaagttttactggcctggttcttcctgaactcaaacgttggcctgggcttcgtgaaaggtttctccgagatgtttgaaaaactgctcggttttgccaacgaagggaccaacttcgttttcggcagcatgaacgatcagggcctggccttcttcttcctgaaagtcctttgccccatcgtctttatttccgcgctgatcggtattcttcagcacatccgcgttctgccggttgtgattcgcgcgattggtttcctcttatccaaagtcaacgggatgggtaaactggaatcatttaacgccgtcagctccctgattctgggccagtctgagaactttatcgcgtataaagatatcctcggcaaaatgtcccgcaatcgtatgtacacgatggcggcaacggcaatgtctaccgtatccatgtctatcgtgggcgcgtacatgaccatgctggagccgaaatatgtcgttgcggcgctggttctgaacatgttcagcacctttatcgttctgtcagtgatcaacccgtatcgcgtcgaagccagcgaagaaaatattcagatgtctaacctgcacgaaggtcagagcttcttcgaaatgctgggcgaatacattctggcgggctttaaggtcgcgattatcgttgcggcgatgctgattggctttattgccctgatcgcggcgctgaacgccctgttcgcggccgttctgggcatctccttccagggcattctgggttacatcttctacccggtggcctgggtcatgggggttccggcgaatgaagcgcttcaggtaggcagtatcatggcgaccaaactggtatctaacgaattcgtcgccatgatggatctacagaaaatcgcctctacgctctctccgcgcgcggaaggcatcatctctgtattcctggtctccttcgctaacttctcttccatcgggattatcgcaggcgcgattaaaggtctgaacgaagagcaaggcaacgtggtttcacgttttggtctgaaactggtgtacggctcaacgctggtgagcgtactgtctgcgtctatcgcagcgctggtgctgtaa

SEQ ID NO: 72235 - DNA, 2199 bp, Citrobacter koseri
atgcaggataagcataacttactaaaaaatataagaatatttatcgtttctttgacgctatccattgtcggcatacagttctcccgctctatttctccgctcgccgttgtcgatgacagctctattttcctggcctggctgccgctatgcgtcatgttttccgtgctgttcttatttggccgacgcggtattgtccctatcattttagcgatgatggcgaccaatcactggaaccttcatctcccgttaatgcaggcagcggtgctgttattttgtcagaccttttccgtattgggcatttgcgggattgtccgctggcaagtgggggcgcgctggcgtcatggattgcctgacaggaatatctggttgcgtatcttctggctcgggtttgtcgcgccggcgggcatcaaagccagcatgtatctcgcggggcattgtctggactaccctgttgcgatatcaacattctttggtacggcaaccattatttatactatcgtggatattctgagcctgatttcagcggtcctgattttcactatgctcttttattatcctctgcggatgataatcaacccgcgctattgccgcattttctggcgcagggacattgcgccgtatctggtcaaagagaagcgtctgtttaccctgacctggatctccgtcgtcgtggcgctgatcgttctgatgtgcgcgccttttgatgccgactatattgccggttatctggtacccgtcttttttattgtttttacgctcggcgtgggcaagctgagttatccgctgctgaacctcagctgggccatctctgcgctgtgcctgctggtgtataaccggaatttcttgcagggcgtcggctccgaatattcactggcctttatcctctctgttctcatctcctttagtatttgcttgctgtatatggtgtgtatttatcaacgcagcgaatggttgaaccgacagtggcatggtcaggcgttaaccgacccgttgacgcgccttcctaacattcgcgcgctggagcaatttttgttgcagggaacaggacaaacggtttgctgcctgcggatggaaaacctggaatttttgagtcgacattacggtatgctgatgcgcgttcattgcaaacgctcggtgtgtcgaatgctgcaaccgtttctgcaagaaaacgagagcgtatttcaggtgccaggcagcgaattgttgttagtgcttcgcggccctgagacggaagcccgcctgcaacatatggttaatctcctcaatagccgcaaaatttactggaacaataccgggctggacatggaatacggcgccgcgtggggcgcttacgacggcaggcaggagacgctgcaacccctgctggggcaacttagctggctgtcggagcaatcctgcgcgaaccaccgggttatggcgctgacccaaagccttgaggcggtctccgatcagacgacggagcgggtattactgctgcaaaaggttcgcaaggcgctggagaacggcgatctggttttgtacgcgcaaccgattctcaacgcgcaggggaaggggtatgcggaggttctggcgcgactgaaaagtgatgacggcatcatgacgccggatcagtttattccactgattgcccaatttaacctcagcgcccgctttgatttacaggttgtggaagccctgctgcgatggatagctacccacccgacgacagcgccgggcgcccgtttctcggtcaatttaatgccgttgacgttactgaataaagagagcgcatcacgcattatcggcctgttcaggcgttatggtattacgcctgaaagcgtgatcatcgaaatcaccgaagagcaggcgttttccaattctgaaatcagcacgcagaatattgcgcaactgcggaatttcggtttcaggatagccattgatgattttggtacgggatacgcgaactatgaacgtcttaaacgcctgcgggcagacatcatcaagattgatggttgcttcataaaagacattatgacggactctctggatgcgatgatcgtgaaatcaattaccgatctcgcgaaagcgaaatccttatgcgtggttgccgaatttgtcgagacgccggagcagcgggaattactcttaagcctgggcgtgaattatctgcaaggttatctgattgggcgcccgcgcccgctggaaacgtcacagccataa

SEQ ID NO: 72236 - DNA, 363 bp, Citrobacter koseri
atgttcaaggaacggatgacaccagaagaactcgctaatctgaccggttacagccgacaaaccatcaataaatgggtgcgcaaggaaggctggacgacgtcgcccaaaccaggcgtacagggaggaaaagcccggctggtacatgttaatgagcaggttcgcgaatatatccgcagcgccgaacgttctgcggagggagcatcggaatccttttcgttaaccagcgatacctctcttgaatcgctgctggtcacgctggccaaagagatgacgccatctgaacagaagcactttacgtctttgcttttgcgtgaagggattaccggtttgttacaacgcttagggattcgcgatagcaaataa

SEQ ID NO: 72237 - DNA, 390 bp, Citrobacter koseri
atgaaaaaattacgcagcaaaatgacgaccgaagagctggcggagtgccttggcgtcgccagacaaaccgttaatcggtggatcagagaacaaggatgggaaactgaaaagtttccgggcgtaaaaggcggtcgggcaaggctcattcacattgatgctcgcgtacaggaatttattcttaacatccctgccttccgcaaccattctgcgttttatcaggcggaggagccgcttgccgaatacagccacgttgtgcgcagccacgcctatcgccagattattgatgccgtggaaaacatgtcgtccaaagagcaggaaaagctggcgcagtttctgtcgcgagaaggcatacgcggttttctcgcccgtttgggccttgatgaatcgtag

SEQ ID NO: 72238 - DNA, 1416 bp, Citrobacter koseri
atgaaaatcaaaactcgcttcgcgccaagcccgacaggctatctgcacgtcggcggcgcgcgtactgctctttactcctggctttttgcacgtaaccacggcggtgagtttgtgctgcgtattgaagacaccgatctcgaacgctccacgccggaagctattgaagccattatggatggtatgaactggctgagcctggaatgggatgaaggcccgtatttccagaccaaacgttttgatcgttacaacgcggtgattgatgagatgctggaagcgggtacggcatataaatgctactgctccaaagagcgtctggaagcactgcgcgaagaacaaatggcgaaaggcgagaagccgcgttacgacggccgctgccgtcatggtcacgaacatcattctgacgatgagccttgcgttgtgcgttttgccaacccgcaggacggctccgttatttttgacgaccagatccgtgggccgatcgaattcagcaaccaggagctggacgatctgatcattcgtcgtaccgacggttccccgacctataacttctgcgtggttgtggatgactgggatatggaaatcacccatgtgattcgtggcgaagaccatatcaacaacacgccgcgccagattaacatcctgaaagcgctgaacgcgccggttccagtgtacgcgcacgtttccatgatcaacggcgacgacggtaaaaaactgtccaagcgtcatggcgcggtcagcgtgatgcagtatcgtgacgacggctacctgccggaagcgctgctgaactacctggtgcgtctgggctggtccagcggcgatcaggagatcttcacccgtgaagagatgatcaagctgttctcgttgaatgccgtgagcaaatccgccagtgcgttcaacactgacaaactgctgtggctgaaccatcactacatcaattctctggcgccggaatatgtggcaacgcacctgcaatggcacattgagcaggagaatatcgatacccgtaacggcccgcagctggctgaactggtgaaactgctgggcgaacgctgcaaaacactgaaagagatggcgcaaagctgccgctatttctatgaggactttgctgagttcgacgcagatgcggcgaaaaaacacctgcgcccggtcgcgcgtcagccgctggaagtggtgcgtgataagctggcggccatcacagagtggagcgcagaaaacgtacaccatgcaattcaggcgacagccgatgagctggaagtggggatgggtaaagtcggtatgccgctgcgcgttgccgtcactggcgcaggccagtctccggcgctggacgtcacggtgcatgcgattggtaaatcccgcagcattgagcgcatcaataaagcgctggcttttatcgcggaacgtgaaaatcagcagtaa

SEQ ID NO: 72239 - DNA, 1197 bp, Citrobacter koseri
atgtggctattgagcgtaagtcaggtcggtttggctgccgtcagccaggtcgtcgcggtacgcatctggcctgcgtccagctatacccgcgtcacggtggaatcgaaccgtctgctgaaatacaaacagtttgccctgagtaaccctgagcgcgtggtggtggatattgaaggcgtgaatctgaactcggtgcttaaaggcattggcgcgcagatccgcgcggacgatccgtatatcaagtcagcgcgagtaggacagtttgatccacagacggtgcggatggtgtttgagctgaagcaaaacgtgaaaccgcagctgtttgcccttgcgccagtggcgggctttaaagaacgcctggtgatggatctctaccctgccaatgcgcaggatatgcaggacccgttgctggcgctgctggaagattacaacaaaggcgatctggataagcaggtgccgcctgcgcagagcgggccgcagccgggcaaggcgggacgcgatcgcccgatcgtgatcatgctcgatcccggtcatggaggggaagatcccggcgccgtggggaaatacaagacgcgcgaaaaagacgtggtgttgcagattgcccgccgcttgcgcgcgttaattgagagagaaggcaatatgaaggtctacatgacgcgtaatgaggatatcttcattccgctgaaagtgcgcgtggcgaaagcccagaagcagcgcgccgacctgtttgtctctatccatgcggacgcgtttaccagccgacagcccagcggttcatccgtttttgcgctctcgacgaagggcgcgaccagtacggcggcaaaatacctcgcgcaaactcagaacgcctcggatttgatcggcggcgtgagtaaaagcggcgatcgctatgtcgatcacacaatgttcgacatggtgcaatcgttgaccatcgccgatagtctgaagttcggtaaagcggtgctcaacaagctgggaagggttaataatctgcacaaaaatcaggtcgagcaggccggctttgcggtgctgaaagcgccggatattccctctattctcgtggaaaccgcctttatcagtaatattgaagaggagcgtaagctcaaaacggcgaagttccagcaggaagtggcggagtcgattctggcgggtattaaagcctactttgccgatggggcgacgctggcgagaaggggataa

SEQ ID NO: 72240 - DNA, 1332 bp, Citrobacter koseri
gtggtgaaggaacgtagaaccgaactggtacagggattccgccattctgttccctatatcaatacccatcggggaaaaacgtttgtcattatgcttggcggtgaagccattgagcatgaaaatttctccagtatcgtcaatgacatcgggcttctgcacagtctgggcattcgcctggtggtggtgtatggcgcgcgtccgcaaatcgacgcgaaccttgccgcacatcatcatgagccgctgtaccacaaaaatacccgcgtgacggacgccaaaacgctggaactggttaagcaagcggcaggcacgttgcagctggatatcaccgcccgtctgtcgatgagcctgaacaacacccccttacagggcgcgcacatcaacgtcgtcagcggcaattttattattgcacagccgttgggcgtggatgacggcgtggattactgccacagcggacgcattcgccgtattgatgaagaggcaattcatcgccagttagacagcggcgcaattgtgctgatggggccggtcgcggtttccgtcacaggcgaaagttttaacctgacctcagaagagatcgccacgcagctcgccatcaaactgaaggcggagaagatgatcggcttctgttcgtcgcaaggggtaactaacgacgaaggcgacatcgtttccgaacttttcccgaacgaagcgcaggcacgcgttgaagcgcaggaagaaaaaggcgattacaattcaggcaccgtgaggttcctgcgcggcgcggtgaaagcctgtcgcagcggcgtgcgtcgctgccatctgattagctaccaggaagacggcgcgctattgcaggagctgttctcacgcgacgggatcgggacgcaaatcgtgatggagagcgccgagcagattcgccgcgccaccattaacgatatcggcgggatcctggagctgattcgcccgctggagcaacaggggattctggtgcgccgctcccgtgaacaactggagatggagatcgacaaattcacgattatccagcgagataatctgaccatcgcctgcgccgcgctgtaccctttccccgaagaaaaaatcggcgaaatggcctgcgtggcggtacatccagattatcgcagttcatcgcgtggcgaagtcttgctggagcggatcgccgtgcaggcaaggcagatgggcctcagcaagctgtttgtgctgacaacgcgcagtattcactggttccaggaacgtgggtttacgccggtggatatcgaactgctgcccgagagcaaaaaagagatgtacaactatcagcgtcgttcaaaggtgttgatggcagatttgggataa

SEQ ID NO: 72241 - DNA, 1827 bp, Citrobacter koseri
atgacaattcagaagcgattactggaggccgtagaacaaaagctgttgcggccattagacgctcagtttgcgctggcggttgccgggcaggacgatccgtgtgtgacgctggccgttgcattgctcagccgcgatgcgggggaagggcatgtctgtatgccgctttcgcgcctggcgataacggaagagtcgcatccgctactggtctcctggtttagcgagagggacgcgcctgaagactgggcatcgtgtctgctggcttccggggcggtcagtcggggagagcggccaacgccgttgattctgcatgaagatcgcctttacctgaaccggatgtggagtaacgagcgcacggtagcccgcttttttagcgaggttaaccaggcgatcgcggtagatgaacagcaactggcccgcacgctggatgcgcttttcccgccgacggatgacgtcaactggcaaaaggtggcggcggccgtggcgttgacgcgccgtatttccgtcatttccggcgggcctggcaccggtaaaaccactaccgtggcgaagctgctggctgcgttgattcagatggcggacggcgagcgatgccgtatacgactggcggcgccgacggggaaagcggcggcgcgtcttaccgagtcgcttggcgcggcattgcgccagcttccgctcacggatgagcaaaaaaaacgcatcccggatgacgccagtacgttgcaccggctgttgggcgcacagcccggtagccagaggctgcgccatcatgcgggaaacccgctgcatctggacgtgctggtggtggatgaggcatcaatgatcgatttgccgatgatgtcgcggctaattgaggcgctgccgccgcacggacgcgtgatttttctcggcgatcgcgatcagctggcttccgttgaggcgggggcggtgctgggcgatatctgcgcctgggtaaatgccggatttaccgccgggcgcgcgcagcagctgagccgactgacgggaggccccattcctgcgggtgcaggcacggaggcggcctctttgcgcgatagcctgtgtttgctgcaaaaaagttatcgcttcgggcatgattccggcattggtcaactggcggcagccattaattgcggcgataaagcggcgatgaaaacggtctttcagcagggattcagcgatattgaaaaacgaacgctacagagcagcgaggattacgccgccatgctcgatgaggcactggccggttatgggcgttatctggcgcttgttcgcgagggcgcggagccgggggcgattattcaggctttcaatgagtaccagttgctgtgcgcgctgcgtgaagggccgtttggcgttggcggtctgaatgaacgcatcgaacaggttatgctgcaaaagcgcaaaattcagcgtcacccgcacagccgctggtatgaagggcgtccggtaatgattgcgcgcaatgacagcgcgttggggttgttcaatggcgatatcggcattgcgctcgatcgcggccaggggttgagggtgtggttcgccatgccggatggcagcattaagtcggtgcagcccagccgtttgccggagcatgaaacaacctgggcgatgacggtgcataaatcgcagggatcggagttcgatcatgcggcgctgattttacccagccagcgctcgccggttgtgacccgcgagctggtgtataccgccgtgacgcgcgcacgtcgtcgcctgtctctctatgccgatgaacgtattttgagcggggcaattgcgacgcgcacggagcgacgtagcggactgtccgcgttttttaataacgggctgtga

SEQ ID NO: 72242 - DNA, 3546 bp, Citrobacter koseri
atgaatgatgccgctgagtcccttgatcctttacgcttgccccttacgggcgagcgtctgattgaagcctctgcgggcactggcaaaacgtttactatcgccgcgttgtatctgcgcctgctgctcggattgggcggctctgccgcctttccccgaccgctgaccgtggaagaactgctggtcgtgacgtttaccgaggcggccaccgaagagttacgcggccgcatccgcagcaacatccatgaactgcgtatcgcctgtctgcgtgaaactaccgataacccgttatatgcccgcctgctggaagagatcgaggataaaaagcaggcggcgcagtggttactgttggcggaaagacagatggatgaggcggcggtattcaccatccacggtttttgccagcgcatgctcagcctgaatgcgtttgagtccggcatgctgttcgagcagcaattaatcgaagatgaatcccttctgcgctatcaggcctgcgccgacttctggcggcgtcactgttatccgctgccacgcgaaattgcccaggttgtctttgaagcgtggaaaggcccccgggcgctactgaaagatatcgatcgttatttgcagggcgaagcgccggtcatcaaagcaccgccgccgtcagacgagacgctggcgtctcgccacgaacacattttgtcgcgtattaacgccctgaagcaacaatggtgcgcgtccgttgatgaactggatggggtgatagagtcgtcgggaatcgatcgcagaaaattcaatcgcggcaaccagacgaaatggatcgagaagatcactgcgtgggcgcaggcggaaacgcaaacctatcaattacccgatgcgctggagaaattctcccggcgcttcctggaagagagaaccaaagcgggcggcataactccgcagcatccgctgtttgtcgccattgaggaactgctggctgaaccgttgacgataaaagatctgctgatcacccgtgcgctggcggaaatccgcgagacggttgcgcaggaaaaacaacgccggggtgaattaggtttcgacgacatgctgagtcgtctggatgttgcgctgcgtagtaatagcggcgatgcgctggcaagcgcaattcgtggccgtttcccggtggcgatgattgatgaatttcaggataccgacccgcagcagtaccgcattttccgccgcatctggcggcatcagccggacaccgcgctgttgctgattggcgatccgaaacaggcgatttatgcgtttcgcggcgcggatatcttcacctacatgaaagcccgcagcgaggtcagcgcccattatacgctggataccaactggcgttccgcaccgggcatggtcaacagcgtgaatacgttgttcagtcagatgaacgacgcctttatgttccgcgaaattccatttgcgccggttaaatcggcccggaaaaaccagtcgctgcgctttgtgctgaacggcgagacgcagcccgccatgaatatgtggttgatggaaggggaaagctgcggcattggcgactatcagagttacatggcgcaggtgtgcgcgacgcaaattcgtgactggctgaaagccgggcaaactggcgatgcgctgcttgttagcgagaaaacctcacgcccggttcgagcctcggatatcagcgtgctggtgcgaagccgccaggaagcggcgcaaattcgtgatgcgctgacgctgctggcgattccgtccgtttatctctccaaccgcgacagcgtatttgagacgctggaagcgcaggagatgctgtggatcttacaggccgtcatgacgcctgagcgtgaaaatacgctgcgtagcgcgatggcggcctcgatgatggggctgaccgcgcaggacatcgaaacgctgaataacgacgaaaatgcctgggatacggtggtcgaagagttcgacggttatcgtcaaatctggcataagcgcggcgtcatgcccatgctgcgcgcgctgatgtcagcgcggaatattgccgaaaacctgctggcgacggcgggaggcgagcgccgtctgaccgatattctgcacattagcgaattgttgcaggaagccggttcgcagctggaaagcgagcatgcgctggtgcgctggctgtcgcagcatattcttgagccgaacagcaatgccgccagccagcaactgcggctggaaagcgataaacatctggtgcaaatcgtcaccatccataaatcaaaagggctggaatacccgctcgtctggctgccttttattacccatttccgcgtgcaggatcaggcgttttatcacgatcgcaattcgtttgacgcggtgctggatctcagccacgccgaggagagcgttgaactggcggaagcagagcgtctggcggaagacctgcgtttgctttatgtggcgctgacccgttcggtgtggcattgcagcctcggcgttgcgccgttggtgcgtcgtcgcggagataagaaaggcgataccgatgtacaccagagcgcgctcgggcgcctgctgcaaaaaggtgagccgaaagatgccgctgggcttcgcgcctgcattgacgcgctttgcggggaggatatcgcctgtcggacgccagacgaaccggacagcgaacgctggcaggtaacggaagcgtcgcgtgcggcgctaagcgccagagcgttacgccgaacgcctgccgacaactggcgagtaaccagttattccggcttacagcagcaaggccatagcgttgcccaggatttaattccgcgtctggatgtggatgccgccggggtaggggacgtggtggaagagccggagctgacgccgcaccagttcccgagaggggcatcgccgggtacattcctgcatagcctgtttgaagacctcgactttacgcagcccgttgacccggcctgggtacgggaaaaactggagcttggcggttatgacgcgcactgggagccggttttaacgcagtggctggacgctgttttgcaggctcccctgaccgaacgcggcgtgagtctgcgtcatctttccgcccgtgaaaaacaggtggagatggcgttttatctgccgatcgcacagccgcttatcgccagtcaactggatgcgctgattcgccggtttgatccgctctcggcgggctgcccgccgctcgacttcatgcaggttcgcggcatgctgaaagggtttatcgatctggtgtttcgccatgaagggcggtattacctgctcgattacaaatcaaactggctgggcgaagacagcacggcctacactcaggaggcgatggcctcagcgatgcaggcgcatcgctatgacctgcaatatcagctgtatacgctggcgttgcaccgctatctgcgccatcgcatcgccgattatgactatgaacgccatttcggcggcgtgatctacctttttctgcgcggcgttgaccgtgaatatccacggcagggcattttctcgacccggccggacggcgaactgattgcgttaatggatgagatgtttgcaggcgttgtagcggaggaggcgcaatga

SEQ ID NO: 72243 - DNA, 2889 bp, Citrobacter koseri
atgccccgcagcacctggttcaaagcgttactgttgtttgtcgccctttgggcacccttaagtcaggcagataccggttggcagcctttggcggaaaccatccgtaaaagcgagaaagatacgcgtcagtatcaggcgattcgtctggacaatgacatggtggttttgctggtatccgacccgcaagcggtgaaatcgctttccgcgctggtggtgcctgttggatcgctggaggaccccgatgaacatcaggggctggcgcactatctcgaacatatgagcctgatggggtctaaaaaatatccccagcctgacagccttgccgaataccttaaaatgcacggcggcagccataatgccagcaccgcgccgtatcgtactgccttctatctggaggtggaaaacgacgccctgtcaggtgcggtcgatcgccttgccgatgccattgccgccccgttgctggataaaaaatatgccgagcgtgagcgcaatgcggtcaatgccgaactgacgatggcgcgtacgcgagacggtatgcgtatggcgcaggtcagcgcagaaaccatcaacccggcgcacccgggttcgcgcttctctggcggcaatctggaaaccttaagcgacaaaccgggcaatccggttcagcaggcgttgcaggcgtttcacgaaaaatattattcagcgaacctgatgaaggcggtgatttacagtaacaaaccgctgccggaactggcgcgtattgcggctgaaacctatggccgggtgccgaataaaaatatcaaaaagccggaaattaccgtgccggtagtaacggacgcgcaaaagggcatcatcattcattatgtgcctgctctgccgcgtaaagtgctgcgcgtagagtttcgtattgataacaacagcgcgcagtttcgcagcaaaaccgacgaactggtgacctacctgattggcaaccggagcccgggaacgctctccgactggctgcaaaaacaaggattagtggaaggcattcgtgcggactctgacccggtggttaacggtaacagcggcgtactggctatttccgctaccctgacggacaaaggactggcgaaccgggacgacgttgtcgccgccatcttcagctatctcaacctgttacgtgaaaaaggcgtggataaacgctacttcgatgagctggcgcatgtgctggatctcgacttccgttacccctctatcacccgtgatatggattacgtcgaatggctggcggatacgatgattcgcgttccggtggaacatacgctggatgcggtgaatatcgccgatcaatatgatgcggcggcggtgaaatcacgcctggcgatgatgacgccgcagaatgcgcgtatctggtacatcagcccgaaggaaccgcacaacaaaacggcctattttgtcgacgcgccttatcaggtgaataaaatcgacgacaaaacgctcgccgactggcagcaaaaagcgcagggcattgcgctgtcattaccggagcttaacccctatattccagacgatttcacgctgatcaaaccggagaaggaatatccccacccggagctgattgtcgatgaaccggatttgcgcgtggtttatgcgccgagccgttattttgccagcgagcctaaggcggatgtcagcgttattctgcgtaacccgaaagcaatggacagcgccagaaaccaggtgatgtttgcgttaaacgattatctcgcggggatcgcgctcgaccagttaagcaaccaggcatcggtcggcgggattggcttttccaccaacgccaacaatggcctgatgcttaacgcgaacggttacacgcaacgcttgccgcagcttttccaggcattgctggaagggtatttcagctacaccgcgacggaagaacagctggaacaggcgaaatcctggtatgcgcagatgatggattccgcagaaaaagggaaggcctacgatcaggcgattataccggcacagatgctttctcaggtgccttacttccagcgtgatgaacgccgtaagctgttgccttcgatcacgctgaaagaggtcatggcttaccgcgatacgttaaaagcaggcgcgcgaccggagttcctggtgattggcaatatgcgcgaagcgcaggtgaaaaccatggcgcgggatatccaacagcagcttggcgccaacggttcagagtggtgtcgcaataaagacgtactggtggataaaaagcagtcggtcatctttgagaaggcggggagcagcactgactccgcgctggcggcggtattcgttccaaccggttacgatgaatatgccagttcagcctacagcgcgatgttagggcaaatcgttcagccgtggttctataatcagttgcgtactgaagaacagttaggttatgcggtgttcgctttcccgatgagcgtcgggcgtcagtgggggatgggtttcctgctgcaaagcagcgacaagcaaccgtcttatctctgggagcgttacaaagcattcttcccaacggcggaagcgaagctgcgggcgatgacgccggaagagtttgcgcaaattcagcaggcgatcatcgcgcagatgttgcaagcgccgcaaacgctgggcgaagaagcgtcgaaattaagcaaagatttcgatcgcggcaatatgcgctttgattcacgtgataaaatcgtggctcagattaaactgctgacgccgcaaaaacttgccgatttcttccatcaggcggtggttgagccgcaaggcatggcgatactgtcacaggtttccggcagtcagaacgggaaagcagagtacgtgcgcccggaaggctggaaagtgtgggagaacgtcagcgcgttgcagcaaaccttacccctgatgagtgaaaagaatgaatga

SEQ ID NO: 72244 - DNA, 3369 bp, Citrobacter koseri
atgttaagggtctaccactccaaccgtctggacgtgctggaagcgttaatggaattcatcgttgagcgcgatcggcttgacgatccctttgaacccgaaattgtgttggttcaaagtaccggtatggcgcagtggctgcaaatgaccctttcgcagaaatttggtatcgccgcgaatatcgattttccgctacccgcgagttttatctgggatatgtttgtacgcgtgctgcctgatatcccgaaagagagcgcgttcagcaagcaaaacatgagctggaagctgatgacgctgctgccgcaactgctggagcgtgaggattttacgctactgcgccactatctgacggacgacgctgacaagcgcaagctattccagctttcctcgcgtgccgccgatcttttcgatcagtatctggtctatcgccccgactggcttacccagtgggaggcggggcagatggttgatgggttaggggaggctcagatctggcaggcgccgctgtggaaggcgctggtggaatacacggctgaactggggcagccgcgctggcaccgtgcgaatgtgtatcagcgttttatccagacgctggaaaatgcgacaaccagcccgacggggctaccttcgcgcgtctttatttgtggtatttccgcgctgccgccggtgtatctccgggccttacaggcgctgggaaagcacatcgaaatccatctgctgttcactaacccctgccgttattactggggggatatcagagatcctgcctggctggcaaaactggtggctcgtcagcgtcgtcacagctttgaggagcgcgacttaccgctgtttcgcgataaccaacgcgccggggagttatttaatagcgacggcgagcaggatgtcgggaacccgatgctggcgtcctgggggaaactggggcgggactacatctacttgctttccgaactggaaaacacacaggaactggatgcgtttgtcgatattcccccggacaatctgcttcataacattcaggcggacatccttgagctggaaagtcgcgccgtggctggggtgaacctcgaagagtacgcccgaagcgacaacaagcgtctgcttgacccgaatgacgccagcgtgacctttcacgtatgccatagcccgcagcgtgaagtggagatcctgcacgatcgtctgctggcgatgctggaggccgacccgacgctgatgccgcgcgatattatcgtcatggtggcggatatcgacagctatagcccctttattcaggccgtatttggcagtgcgcctgccgaacgctatttaccttatgctatctccgatcgccgggcgcgtcagtcgcatcccgttttgcaggcgtttatcagcctgctgtcgttgccggacagccgttttgtctctgaagatgtgctggcgctgctggacgtaccggttctggcggctcgatttaacatcaacgaagaagggctgcgctatcttcgcttatgggtcaatgagtcgggtatccgctgggggattgatgacgacaacgtgcgcgagctggcgcttcctgcaacggggcagcatacctggcaatttggcctgacgcgtatgctgctgggttacgcgatggaaagcgcgcagggcgaatggcagtccgtgctgccttatgacgagtccagcgggctgattgcggagctggtcgggcatctggcgtccctgcttatgcagttgaacctctggcgtcgcgggctggcgcaggcgcgtccgctggaagagtggctcccggtttgccgcgacatgctcaatgactttttcctgcccgatgcggaaacggaagccgcaatgacccttatcgagcagcaatggcaggctattatcaccgaagggcttgaggcggagtatggcgatgcggtgccgctgtctctgttacgggacgagctggcgcaaaggctggatcaggaacgcatcagccagcgttttctggcggggccggtaaacatctgtacgctcatgcctatgcgttctatcccctttaaggttgtgtgtctccttggtatgaatgacggcgtctatccgcgtcagctggcgccgctcggttttgacctgatgagtcagaaaccgatgcgcggggatcgtagccgtcgcgatgatgaccgctacctgttccttgaggccttaatctctgcgcagcagacgctctatattagctacatcgggcgctctattcaggataacagcgaacgtttcccgtcagtcctggtgcaggaactgatggattatatcgggcaaagtcactatttgccgggagatgaagaactgaccagcgatgagagcgaggctcgcgtgaaagcgcatatcgctcgcctgcacacgcggatgccgtttgatgcgcaaaactatcttcccggtgaacagcaaagctacgcgcgcgaatggctacctgctgcaagtcagtcaggcgaggcccactctgattttgtacagccgttgccctatgaactccctgagacgttgacgctggaaaaacttcagcgcttctgggcgcatccggtgcgggcgtttttccagatgcggctacaggtgaatttccgcgcggaagagagtgaaattcccgatacggagccgttcattctggaagggctaacccgctatcagcttaatcagcagttgcttaatacgctggtcgaagaagaggatgccgggcttttattccgtcgcttccgggcggcgggcgatctcccgtatggcgcttttggcgagatcctctgggatacgcagcgtcaggagatgcagtcgctggcggacaggattatcgcgtgtcgtcagccggggaaaagtatggaagttgatctgctctgcaatggcgtgcagatcacggggtggttgccgcaggtgcaggaagacggtttgttgcgctggcgcccatctttaataagcgttgcgcagggaatgcaactttggctggaacaccttgtctattgtgcctgtggcggaaaaggcgaaagtcgtttgttcctgcgtaaagagggagagtggcgcttcccgccgttagaggctgaacaggcgttaacttacctcgcacagctgattgacggttatcgggaagggatgtcatccccactgctggttcttcctgaaagcggcggcgcatggataaaagcttgttatgacgcggcgaatgatgccatgttagatgatgctgacacgttgcaaaaagcccggacgaagttcttgcaggcttatgaaggtaacatggtgatacgcggagaaggggatgatatctggtatcaacggttgtggcgtcagctggagccgaagacgatagagagcattatttctcagtctcaacgttatctgttaccgctattttgttttaatcagtcgtga

SEQ ID NO: 72245 - DNA, 324 bp, Citrobacter koseri
atgccagataccgtgaacaggcagcgtggttttagtctgccagaagtgatactggcgatggcgctgctggtgataaccgtcaccgcgttatcgggttatcagcgggcgttgatgacgagtcttgtcgtcagggcgcaatatcaacagctctggcggtacggctggcagcaaacggcgctgtattcattttcacctcccgaaagctggcaggccaaccgaatgcagacaacacaagcgggatgtgtcagcatcagcgttaaactcatttcccctttgggcaggcaaggccagatgtcgcgcttacactgcccgaaaagtcagtag

SEQ ID NO: 72246 - DNA, 408 bp, Citrobacter koseri
gtgaagcgtgaacggggtgtgtcttctctggcgatggtgcttttgctgctggtattgggcagcctgctgcttcagggggcaaaccagcagcaggtgagcttttccactctggtggcgacagaaagccgggccttgcagcgtcaggcggtggcgcagtcggcgttggaatggggaaagatgcagtcatggtcggcgcagactgcggttgagtgtcggcaatacgccacgccgaatgcccgcgtttgcctgcgcctgctcgggaacaacaccgctttattgattgcgcagtatgatggcgcatcggtctggcgtctgggagcgcgggaggaaagcggcgttgtattttctccgcatggatggagcgatttttgcccgttgagtgaggtggcgttatgccagataccgtga

SEQ ID NO: 72247 - DNA, 564 bp, Citrobacter koseri
atgtcgatgaacgagcgcggtttttctctgctggaggtacttatcgcgatggcgataagcagcatgctactgctcggcgcggcacgatttttacccgcgctacagcgtgagattctacagaccacgcggcagttgttgctggaagatgagatctggcagcgtgcttataccgtggcaaaacacctgcaacgcgcgggatattgtcggggaaactgcacagggaaaggactggtgattgccgggcagggggagtgcgttatcgtacagtgggacgccaataataacgggcgctgggagactgcgccgggaaaagaggccgaacagaccgggtttcgtttaaacaataaaacgctggaaacattgcgtggggcaacatcatgcgcagataaagggtgggataaaatgaccgatcccgatacggtacagattgaggcatttaacgttgagcgtcaggagatgcccggttttgcgccggtactgacgctgtctcttcaggggcgcagtaaagcggcttctaaaaccgctgttaaggcgcaatacagcgtcaccgggtttaatctgtga

SEQ ID NO: 72248 - DNA, 471 bp, Citrobacter koseri
atgaaaaaacaacagggctatacgctcattgaaacaattgtcgccatgcttcttatggttagccttagcgccacagggctctatggctggcagcgttggcaacagcagcaacggttatggcaaaccgccagccagctgcgggattatttgctgcaactgcgtgaggatgcgaactggcacaaccgggatcacattgttcaggtcatcagagaacgcggcggctggtgctttgtcagcactgcttcggcgcaaggtgcctgtacgccagacgcgccgtttgtctttattccagcatggcgcgatatagacatggtggagatcaccccctcgctggcgttttttggtctgcgcaataccgcctgggccgggcatatccgcctgaaaaacgctgcgggcgaatggcgtctggtggtttcgtcctgggggcgaatccggctctgtgagggacgcgaggccgaagcatgtcgatga

SEQ ID NO: 72249 - DNA, 795 bp, Citrobacter koseri
atgaaacagtatttagaactgatgcaaaaagtgctggatgaaggcacacagaaaaacgaccgtaccggaaccggaacgctttccatttttggtcatcagatgcgttttaacctgcgggaaggatttccgctggtgacgacgaagcgctgccatttacgctccatcattcacgagctgttgtggttcctgcaaggcgataccaacgtcgcttacctgcatgaaaacaatgtgacgatctgggacgaatgggccgatgaaaacggtaatttaggcccggtatatggcaaacagtggcgcgcatggcctgcgccggacggtcgccatattgaccagatcaccacggtcatgaaccagttgaaaaatgacccggactcccgccgtattattgtttccgcctggaacgtcggcgagctggataaaatggcgctggcgccgtgtcatgcgttcttccagttctatgttgcggacggcaaactctcctgccagctgtatcagcgctcctgcgacgtcttcctggggctgccgtttaatatcgccagctatgcgttactggtgcatatgatggcgcaacagtgcgacctggaagtgggcgactttgtctggaccggcggcgacacgcacctgtacagcaaccatatggaacagacgcacctacagttaagccgcgaaccgcgcgcgctgccgaaactggtgatcaaacgtaagcctgactctatcttcgactaccgttttgaagattttgagattgaaggctacgacccgcatcctggcattaaagcgccggtcgctatctga

SEQ ID NO: 72250 - DNA, 876 bp, Citrobacter koseri
atgaccagtagctatctgcattttccggaatttgatccggtcattttctcaattgggcccgttgcgctgcactggtacggcatgatgtacctggtcggttttgtctttgcaatgtggctggcgattcgccgggcaaaccgtccgggcagcggctggaccaaaaacgaagttgaaaacttactctatgccggttttctcggcgttttcctcggtggccgtattggttacgtcctgttctacaacttcccgctgttcctggaaaatccgctctatctgttccgcgtctgggatggcggcatgtctttccacggcggcctgatcggcgtcattctggtgatggtgatcttcgccagacgcactaaacgttctttcttccaggtatccgattttatcgcgccgctgattccttttggcttaggcgcagggcgtctggggaactttatcaacggcgagctgtgggggcgtgtcgatccgagcttcccgtttgccatgctgttcccgggctctcgtgcggaagatatcgcgctgttgccgtcaaacccgcagtggcagtcgatctttgatacctatggcgttctgcctcgccatccgtcccagctgtatgagctggtgctggaaggtattgtgctgttcattattcttaacctgtttatccgcaagtcgcgcccgatgggggctgtctctggcctgttcctgattggctatggcgcgtttcgtatcattgttgaattcttccgccagccggatgcgcagtttaccggcgcatgggtacagtacatcagcatggggcagattctctctatcccgatgattgtcgctggtgtgatcatgatggtttgggcttaccgccgcagcccacagcaacacgtttcctga

SEQ ID NO: 72251 - DNA, 204 bp, Citrobacter koseri
atggcgctacgcttatcaggcctacgaaccgcgcaacacctttgcctgatggcgctgcgcttatcaggccaacagacggcaccgcgccgtaggccggataaggcgcgtgcgccgccatccggcaatcaagggcacagcgcctgtcacaaccccccgcgtatcaggcctcccatgccacggcgctccataaacgccgccacctga

SEQ ID NO: 72252 - DNA, 2247 bp, Citrobacter koseri
atgctcacccgcctgcgcgaaatagtggaaaaggtggccagtgcgccgcgccttaacgaggcgttgaatattctggtcactgatatctgtcttgcgatggatacagaggtctgttcggtctatctggccgatcacgaccgacgttgttactacctcatggcgacgcgagggctaaaaaaaccgcgtggccgtactgtcacactcgcatttgatgaaggtatcgtcggcctggttggcaggctggcggaaccgatcaaccttgccgatgcgcagaaacaccccagctttaaatacatcccgtcagtaaaagaggagcgtttccgcgcttttctgggcgtgccgattatccagcgccgccagctactgggtgtgctggtggtacagcagcgtgaactgcgccagtacgatgaaagcgaagagtctttcctcgttacgctggcgacccagatggcggctatcctttcgcagacgcagctaaccgcgttatttggtcaataccgccatacgcgcatccgtgcgctgcccgccgcgcccggcgtggcgatagcggaaggctggcaggatgcaacgttgccgctgatggagcaggtctacgaagcctccacccttgacccggcgcttgagcgcgagcggctgaccggcgcgctggaagaggccgctaacgaatttcgtcgttacagtaagcgctttgccgctggcgcgcagaaagagacggcggcgatcttcgatctgtattcacacctgctttctgatgcccgactgcgtcgtgaactgtttgccgaagtcgataaaggcgcggtggcggagtgggccgtcaaaaaagtcatcgaaaagtttgccgagcagtttgccgccctgacggatggctacctcaaagagcgtgccggagatttacgcgcgctgggccagcgtctgttattccacctggatgacaccattcaggggccgaacacatggcccgagcgttttgtgctggtggcagacgaactctcagccaccacgctggcggaactgccgcaggacagactggccggcgtcgtggttcgcgacggcgcagctaactcgcatgcggcgattatggtacgcgcgctcggtattccgaccgtgatgggcgcggatattcagccttcggttcttcatcaccgtacgctggtggtggatggctatcgcggggagctgctggtcgatcctgaaccggtattgttgcaggaatatcagcggcttatcagcgaagagaatgaactaagccggctggcggaagatgatgtcaatctgcccgcgcatctgaaaagcggcgaacgcgttaaggtgatgcttaacgcagggttaagcccggaacatgaagagaagctgggcagccgtatcgacggtatcgggctttatcgcaccgaaattccgttcatgttgcaaagcggtttcccctcggaagaagagcaggtggcgcagtatcaggggatgctgcaaatgtttaacgacaaaccggtgactctgcgtacgctggatgtcggcgcggacaagcaactgccctatatgccgatcagcgaagaaaacccatgtctgggctggcgcggcattcgtattacgctcgatcagccggagatcttcctgatccaggtgcgcgcgatgctgcgcgccaacgccgcgaccggcaacctgagcattttactgccgatggtcaccagcattgatgaagtggatgaagcgcgacgcctgattgagcgtgccgggcgtgaagtcgaagagatgatcggttacgcgatccccagaccgcgcattgggatcatgctggaagtgccgtcgatggtatttatgctgccgcaactggtgaaccgggtcgattttatctccgttggcaccaacgatctgacgcagtacatcctggcggttgatcgcaacaatacgcgtgtggccagtatttacgacagcctgcacccggggatgttacgtgcgctggcgatgatcgctcaggaagccgaaaaacaggggcttgatttgcggctatgcggtgaaatggcgggcgatccgatgtgtgtggcgatcctgataggcctgggattccgccatctgtcgatgaacggtcgctccgtcgcgcgcgtgaaatacctgctgcggcacattgattatgaagacgcgcaaacgctggcgcagcgcagtctggaagcgcaaatggcgacggaagtgcgtcatcaggtggcggcgtttatggagcgccgtggcatgggaggcctgatacgcggggggttgtga

SEQ ID NO: 72253 - DNA, 531 bp, Citrobacter koseri
gtgattgatgacgatggctaccgcccaaatgtaggtatcgtaatttgtaatcgccaggggcaggttatgtgggcccggcgatttggtcagcactcctggcaattcccgcaaggcgggataaattcaggggagtcagcagaacaagcgatgtaccgggaactgtttgaagaagtcgggttgagccgtaaagatgtgcggatacttgcttctactcgcaactggttgcgttacaagttaccgaaacgtttggtgcgttgggacacgaagccggtttgtatcggccagaaacaaaaatggtttcttctgcaattgatgagcgctgatgcggaaatcaatatgcaaaccagcagcacccctgagtttgatggctggcgctgggtaagttactggtacccggtcaggcaggtggtgtcatttaaacgcgatgtctaccgcagggtgatgaaagagttcgcaagtgtcgtgatggcgcttcaggagagtacgccgaagccacaaaacgcacctgcctggcgacgtaaaagaggttaa

SEQ ID NO: 72254 - DNA, 693 bp, Citrobacter koseri
atgcccggactccgcccgctactttctccgccagcatctgaagcccttttgcttgcccaggcgcagcagctttcaggttactcgctgggcgaactggcggcgctggccggtttagtggcccccaaggatttgaagcgggataaaggctggattggcgtgctgctggagatctggctcggcgccagcgccggtagcaaaccggaacaagatttcgccgcgcttggcgtggagctgaaaacaattcccgtcgatagccttggccacccgctggaaactacgtttgtctgcgtcgcgccgctaaccggcaacagcggcgtgacgtgggaaacaagtcacgtccgccacaaattaaaacgtgtgttatgggttcccgtagagggggatcgcagtattccgttagccgatcggcgcgtcggttccccactgttatggagcccaaatgaagaagaggaccagcagcttcgcctcgactgggaagagttgatggacatgattgtgctgggtcaggttgagcggatcaccgcccggcatggcgaatttttacaactgcggccaaaagcggcgaatgccaaagcccttaccgaagcaattggcgcgcagggagagactattctgacgctgccgcgcggcttttatctgaaaaagaacttcactcgcacgctgctggcccgccatttcctgttacagggctaa

SEQ ID NO: 72255 - DNA, 714 bp, Citrobacter koseri
atgttatttgcatgggtaaccgatcctaacgcctggctcgcgctcggtacgctgacgctgctggagatcgttcttgggatcgacaatattattttcctctctctggtggtggcgaaacttcctacagcgcaacggaatcacgcccgacgccttggactggcggcggcgatggtaatgcgcctggctttgctggcttctatcgcctgggtcacacgcctgacaaacccgctgttcgagattttcggcgaagcgatttccgcccgcgatctgatcctgctgctgggtgggttgttcctgatctggaaagccagtaaagaaattcacgaatcgattgaaggcgaggaagaagggctgaaaacgcgcgtctcctccttcctgggcgcgattgtccagatcatgatgctggatattattttcagccttgactccgtcatcacggcggtgggcctctcggatcatctgtttatcatgatggcggcagttgtgattgccgtcggcgtgatgatgttcgcggcgcgtcctatcggcgagtttgttgaccgccacccttccgtaaaaatgctggcgctctctttcctgattctggtcggctttaccctgattctggaaagtttcgatgtacacgttccgaaagggtacatctacttcgccatgttcttctctatcgcggtagagagcctgaacctgatgcgcaataaaaagaaccctctctga

SEQ ID NO: 72256 - DNA, 219 bp, Citrobacter koseri
atgaaaaaatgggcagttgtgatttccgctgtaggactggcttttgctgtttctggatgtagcagcgattatgtaatggcgaccaaagatggtcggatgattctgaccgacggtaaaccagaaattgacgatgatacgggtctggtgagctaccacgatcagcaaggcaacgcgatgcaaatcaatcgtgacgaagtctctcagatcattgaacgctaa

SEQ ID NO: 72257 - DNA, 1041 bp, Citrobacter koseri
atgcactatcaccgtataccccacagctcgcttgaaataagtacactggggctgggcacaatgacgtttggtgaacaaaacagcgaagccgacgcacatgcacagctcgattacgccgtggatcagggcattaacctgatcgacgtcgccgaaatgtatccggtgcctccacgcccggaaacccaggggctaacagaaacctatgtcggtaactggcttgctaaacacggcagccgtgagaagctggttatcgcttccaaggtaagcggcccatcgcgtaataacgacagcggaattcgccccaatcaggcgctggatcgtaaaaatatccgtgaggccttacacgatagcctcaaacgcctgcaaaccgactatctggacctgtatcaggttcactggccgcagcgcccgaccaactgcttcggcaagctgggctacagctggacggattcggctccggttgtcacgctgctcgaaacgctggatgcgctgacggagttccagcgcgcgggcaaaattcgctacatcggcgtctctaacgaaacggccttcggcgtcatgcgctatctgcatctggcagataaacatgacctgccgcgcattgtcactatccagaacccttacagcctgctgaaccgcagttatgaggtgggattagcggaagtcagccagtatgaaggcgtcgagctgctggcctactcttgcctggcattcggtacgttgaccggtaaatatctgaatggcgccaaacccgccggcgcgcgcaacaccctgtttagccgctttacgcgctacagcggcgagcaggcgcaaaaggcggttgcggcctacgtcgacatcgccagacgccacaacctcgatccggcccagatggcgctggcgtttgtgcgtcgtcagccgttcgtcgccagcaccctgttgggcgcaacgacgatggcgcagttaaaaaccaacgttgagagtttgcatctggagttaagcgaagaggtgctggcggagatcgaagcggtgcatcaggtttatacctacccggcaccgtaa

SEQ ID NO: 72258 - DNA, 1197 bp, Citrobacter koseri
atgcgtgagtcagtacatactaacacctcgatctggtcgaaagggatgatgtcggttatcgccgcgcagtttctctctgcgtttggcgataacgcgctgttgttcgcgacgctggcgctgctgaaggcgcagttctacccggactggagccagccgatcctgcaaatggtgtttgtaggcgcttacattctttttgccccctttgtcgggcaggtggcggacagctttgccaaaggtcgggtgatgatgttcgccaacggcctgaaactgttgggcgctgcgagcatctgttttggttttaatccctttgtcggctatacgctggtggggattggcgcggcggcttactctccggcgaaatatggcattcttggcgagctgaccacgggcgacaaactggtgaaagccaatggtctgatggaagcctccactattgccgcgattctgctgggatcggtggcaggcggcgtactggcagactggcatgtgattgcggcgctggtcgcctgtgcgttggcctatgcgggcgcagttgtcgctaacctttttattccgaaacttgcggcggcgcggccaggccagtcctggcatttgcgtaagatggtgcgcagcttcttctgcgcctgcatgtcgctctggcgtaacggggagacgcgtttctcgctggttggcaccagccttttttggggcgcgggcgtcacgctgcgttttctgctggtgctgtgggtgccggtagcgctgggaattaccgataacgccacgccgacttacctgaacgcaatggtggcgatcggtattgttgtgggcgcaggcgctgcggcgaagctggttacgctggagacggtggcgcgttgtatgcctgcgggtattctgattggcgtggtggtgctgattttctctttgcagcacgcgttgcttccggcctatgcgctgttgacgcttattggcgtgctgggcggctttttcgtggtgccgctcaatgcgttattgcaggagcgcggcaagaaaagcgtcggcgcgggcaacgcgattgcggtacagaacctgggggagaacagcgcgatgctgttgatgctgggtctctattcgttggccgtactggtgggcattccggtcgtggcgatcggcattggttttggcggactgtttgcgctggcgattgcggcgctgtggatttggcagcgccgccagatgtga

SEQ ID NO: 72259 - DNA, 2160 bp, Citrobacter koseri
atgctttttggattttttcgcaacctgttccgcgtgctttatcgtgtacgcgtcaccggggatgccagggcgctacagggtgagcgcatcctgatcacgccaaaccatgtctcttttatcgacggtattttactcgccctgtttttaccggttcgccctgttttcgcggtctattcctctatcagccagcaatggtacatgcgctggttaaagtcgctgattgatttcgtgccgctcgacccgacgaagccgatggcgattaagcacctggtgcgtctggttgagcagggccgcccggtggttatcttcccggaagggcgaatttcggtgagcggttcgttgatgaaaatctacgacggcgccgggtttgtggcggcgaagtctggcgcaacggtggtgccggttcgtattgagggcgcagagcttacgcactttagccgcctgaaaggtctggtaaaacagcgctttttcccgcgcattcacctgcatatcctgccgcctactcatctgccgatgccggaggcgccgcgagcgcgcgagcgccgcaaactggccggagaaatgctgcatcaaattatgatggaagcgcgcatggcggtgcgcccgcgtgaaacgctgtatgaatcgctgttagccgcgcagtaccgctacggggcgggtaaaaactgtgttgaagatattaacttcacgccggacacttatcgcaaattgctgacaaaaacgctgtttgtcggccgcattctggaaaaatacagcgcgcagggtgaaaacatcggcctgatgctgccaaacgcggccatcagcgccgccgtcatttttggcgcggtttctcgtggccgtatcccggcgatgatgaactacacgtcgggcgtgaaagggttgaccagcgccattaccgctgcggagatcaaaaccgtattcacctcccgtcagtttcttgagaaaggcaaactctggcatctgccggagcaactgacgcaggttcgctggatttatctcgaagatttaaaagctgatgtgacgctcgccgataagctctggatttttgcgcatctgctgatgccgcgcctggcgcaggtcaaacagcggccggaagaggcggcaatgatcctctttacatccggttcggaagggcacccgaaaggcgtggtgcacagccataaaagccttctggcgaacgttgagcagataaaaaccattgccgatttcacggcgaacgaccgctttatgtcagcgctgccgctgttccactccttcggtctgaccgtcggcctgttgacgccgctgctgaccggcgctgaggtgtttctctatcccagcccgttgcactatcgcattgtgccggaactggtctatgaccggaactgcacggtgctgtttggcacgtcgacgtttctgggcaactacgcgcggtttgccaacccgtatgacttctatcgtctgcgctatgtcgtcgccggcgcggaaaaattgcaggacagcacccgacagctctggcaggacaaattcggcctgcgcgttctggaaggttacggcgtgaccgaatgcgcgccggtcgtgtcgattaacgtacctatggcggctaagccgggcaccgttgggcgcattttgccaggcatggatgcgcgcttgctggcggttccgggcattgatgacggcgggcgtctgcaactcaaagggcctaatatcatgaatggctacctgcgggttgaaaaaccgggcgtgctggaagcacctgcggcggaaaatgcgctgggcgacgttgaacagggctggtacgacacgggcgatattgtgcgtttcgatgaaaacggttttgtgcagatccaggggcgagcgaagcgctttgcgaaaatcgccggagagatggtttcgctggagatggtcgaacagctggcgctgggcgtctcgccagataaaatgcacgccacggcgattaaaagcgacgccagcaaaggcgaagcgctggtgctgttcacgacagacggcgagctgacgcgtgaaagcctgctgcaatatgcccgcacacacggcattcctgaacttgccgtaccgcgtgatatccgctatctgaaacaacttccgttactgggcagcggcaagccggactttgtgacgctgaaaagctgggttgatgaaccggaaaaacaacatgcgtga

SEQ ID NO: 72260 - DNA, 1029 bp, Citrobacter koseri
atggcgaccataaaggatgtagcccgactggctggtgtttcagtcgccaccgtttctcgcgttattaatgattccccgaaagccagcgaagcatcccgcctcgcggtcaccagcgcgatggaatcgctcagctatcaccccaacgccaatgcgcgagcgctggcacagcaatccacggagacaattggtttagtcgtgggggatgtctccgaccctttctttggcgcgatggttaaagcggtcgagcaggtggcctaccacaccggtaatttcttactgattggcaacggctaccacaatgaacaaaaagagcatcaggcgattgaacaactaatccgccatcgttgcgcggcgttagtcgtacacgccaagatgatcccggacgcggacctggcgtcattaatgaaacagatgcctggcatggtgctgattaaccgcatcctgccagggtttgagcagcgctgcgtggcgttagatgaccgttacggcgcctggctggcaacgcgtcacttaattcagcagggccatacccgcatcggctatatctgttccaaccattcgatttctgatgcggaagaccggctcaaaggttattacgacgcgctggaagagagccatattccggctaacgacaggctggtcacatttggtgaaccggatgagagcggcggtgaacaggcaatgaccgaactgttaggtcgcggaagaaacttcacggcgatcgcttgttacaacgattcgatggccgcaggcgcaatgggcgtattaaacgacaacggtattgacgtgccgggcgaaatttcactgattggtttcgatgatgtgctggtctcgcgctacgtgcgtccacgtctgaccacagtacgctacccgatcgtgaccatggcgacccaggccgccgaactggcgctcgcgctggcggaaaaacggcctgtacccgaaatcacccatgtctttagccctactctggtacgtcggcattccgtttcgacgccgtcggaaaccgggaattcttcgtcaaacgattaa

SEQ ID NO: 72261 - DNA, 1020 bp, Citrobacter koseri
atgacaacaatgctggatgtttcacgtcgcgcgggcgtatcaaaagcgacggtttctcgcgtgctgaacggaacgggacaggtgaaagagagcacgcgccagaaagtcttcaaagcgatgcaggcgttagattaccgacccaattttttggcgcgatcgctggcgaaccgcaccagtaacagcattgggcttgttgtctcgacctttgacggattttacttcgggcgtttgctgcaacaggcgtcacgccagacggagtcgcacggtaagcagcttatcgtgaccgatggccatgacacgccggagcgcgagcaagaggcggtgcagatgctggccgacaggcagtgcgacgcgatcattctctatacccgctatatgagcgaaaaaacgatcatctcgttgattaataccatagagacgccgctggtcgtgatcaaccgcgatgtcagtctggcccgcgatcgcgccatattctttgaacaggaagatgccgcgtttcaggcggtggattacctgatctcacagggccatcgggatatcgcctgcattaccgtaccgaatcacacgccaacgggaaaatcccgcctgacgggctaccgcaaggcgctggagaaaaacgggatcgcctgggacccggcgaaagtgaaatacggcgactccagcatgacacgcgggtacgaagcgtgccgtgaactgctgaaggaagggatcgcctttaccgcgctctttgcctgtaacgacgatatggcgcttggcgcatcaaaggcgctgcatcaggccgggctgcggataccgcaggatatttcgctgtttggcttcgatgacgcgcccagcgcgaagtggctggaaccggcgctgtccaccgtttatctgccgatcgacagtatgatcaccaccgcaatcgatcaggcgattcggctggcgagcggcgaggagctggagccgatcccaccgtttacaggaacattagtgctgcgtgattcagtaaccaccgggccattttttcagtcggattgctga

SEQ ID NO: 72262 - DNA, 1263 bp, Citrobacter koseri
atgccacattcactgaattgcactgatactgacctcaacgctgaaaatctgctcagactaccggcggaattcggctgcccggtatgggtctatgacgcgcagattattcgccgtcagatcgcggccctgcaacagtttgatgtggtgcgctttgcgcaaaaggcctgctcgaatattcatattttgcgcctgatgcgtgagcagggcgtaaaggtggattccgtctcgctgggtgaaattgagcgcgcgctggcggcgggatacgatccgcaaaaccatcctgatgatatcgtcttcacggctgatgttattgacgccgccacgctggcccgcgtcagcgaactgcgcattccggtgaatgccgggtcggtggatatgctggatcaactggggcaggtttcgccgggtcatcgcgtctggctgcgtatcaatcccggttttggtcacgggcacagccagaaaaccaataccggcggcgagaacagcaaacacggcatctggcataccgatctgcctgccgcgctggcggtgatgcagcgccatcggcttcagcttgtcggggttcacatgcacattggttccggcgttgattacggtcatctggagcaggtatgcggcgcgatggtgcgtcaggttatcgattttgggcaggatctggaggcgatttcggcgggaggcgggctatcgatcccttatcacgagggagaagaggcggtcgatacgcagcattacttcggactgtggaacgccgcccgcgagcaaatcgctcgccatctggggcatcgggtgaagctggaaattgagccgggacgttttctggtggcgcaatccggcgtgctggtgacgcaggtacgcagcgtgaaagagatggggcgccgtcattttgtgctggtggatgccggtttcaacgacctgatgcgcccggcaatgtacggcagctatcaccatattacggcgctggcggcggacggtcgctcgcttgaacatgcgccgctgctggacaccgtggtggcggggccgttgtgcgaatctggcgatgtctttacgcagcaggaaggtggtaatgtggaaacgcgtgcgctgcctgcggtcgcgccgggggattacctggttctgcacgataccggcgcgtacggcgcgtccatgtcatcaaattacaacagccgaccgctgctgccggaagtgctgtttgataacggtaaagcgcgattgattcgccgccgccagacgattgaagagttgctggcgctggaagttttttaa

SEQ ID NO: 72263 - DNA, 936 bp, Citrobacter koseri
atggcagccgtgaacctgcgccacattgaaatctttcatgccgtgatgaccgccggaaacctgaccgaagcggcgcgcctgctgcatacctcacagcccaccgtcagccgggaactggcgcggttcgaaaaagtattgggtcttaaactgtttgagcgcacgcgcggacgcctgcacccgacggtgcaaggattacggctattcgaagaggtgcagcgttcctggtatgggctggatcgcattgtaaacgcggcggagagcttgcgtgaatttcgccagggcgagctgtcgattgtctgcctgcccgttttctcccagtcctttttacccacgctgctgcaaccgtttctcgcccgctatcctgatgtcagcctgaacatcgtgccgcaggagtcgccgctgctggaagagtggctttccgctcaacgccacgacctcggcctgacggagacgttgcataccccggcaggcaccgaacgcaccgcgttgttgacgctaaatgaagtgtgcgtgctgccgcccggccacccactggcgaccaaatccgtgctaacgccgggcgactttcagggagagaattacatcagcctgtcgcgcaccgacagctatcgccagctgctggatgcgctgtttaacgaacaccaggttaaacgccggatggtcgtggaaacccacagcgcggcgtcggtttgcgcgatggtgcgcgcgggcgccgggctctcggtggttaacccgctcaccgcgctggattatgccgccagcggagtgaccgtgcggcggttcagtgtcgacgttccgtttaccgtcagtctgatccgcccgctgcaccggccatcatccgcgctggtggatgcgttcagcgagcacctgcaaaccagccttcctcgtcttgtcgatccgctggaggccattctggagccggttacgaaagcataa

SEQ ID NO: 72264 - DNA, 693 bp, Citrobacter koseri
atgaaaacgattggactgctgggcggcatgagttgggaatcgacgatcccctattaccgtttgattaatgaaggaatcaaaacacggctgggcggtttgcattccgccagcctgttgctgcatagcgttgatttccatgaaattgaagagtgtcagcgccagggcgagtgggataaaacgggagatattctggcgcaggccgcactgggtttacagcaggcgggcgcagaagcgatagtgctgtgtactaataccatgcataaagtggcggagacgattgagtcgcgctgttcactgccgtttttacatattgcggatgcgacagggcgggcgattgcgcgcaaaaacatgacgcgcgtggcgctactggggacgcgctacacgatggagcaggatttttatcgcgggcgtctggaacagcgatttgcgattgaaaccctggtgccggaaacggacgaccgcgcgcagatcaaccagataatctttgacgaactgtgcctcggcgagtttagcgaacgctcccgccagtattatttgcaggtgatcgaacgtctggcggcgcagggcgctcagggcgtgattttcggctgtactgagattgggttgctggtaccggaagcgcagagcgcgctgccggtgtttgatactgcggcgatccatgcggctgacgccgtggagtttatgctttcgtaa

SEQ ID NO: 72265 - DNA, 327 bp, Citrobacter koseri
atgtttatttttcataatgagacgacgcttgaggatctgggaaatggcgttacccggcgtattctggctcacgacggcaacatgatggcggtagaggtaaatttcgaaaaaggcgcaatcgggccgttgcacaatcatcctcatgaacagctgacttacgttttgtccggtgaatttgagtttactattggtgaagaaaagcatgtggtgcgcgccggcgacacgctatataaacggcccaatatcatgcatggctgcgtgtgtttacaaccggggacactgctggataccttcacgccagtacgcgaagatttcctcaacgcgtaa

SEQ ID NO: 72266 - DNA, 762 bp, Citrobacter koseri
atgattttgaatgcattctctcttgaaggtaaggtcgcggtagtcacaggttgtgataccggtctgggtcaggggatggcgctgggtctggcggaagcgggctgtgatattgtcgggatcaacattgttgagccgacggaaaccattgaacgcgtcaccgcgctgggtcgccgttttttaagtctgacggcggatttgcgtcagattgacggtattccagccctgcttgaacgtgcggtggcggaattcggccacatcgatattctggtgaataacgccggtctgatccgccgtgaagacgcgatcgacttcagtgaaaaagactgggatgacgttatgaacctgaacattaagagcgtgttctttatgtctcaggctgcggcgaagcacttcatcgcccagggtaacggcggtaaaattattaatatcgcctctatgctctccttccagggcgggattcgcgttccttcttacaccgcatctaaaagcggcgttatgggcgtaacgcgcctgatggcgaacgaatgggcgaaacataacatcaacgtgaacgctatcgcgccgggttacatggcgacgaacaatactcagcaactgcgtgctgatgagcagcgtagcgcggaaatcctcgaccgtattccggcggggcgttggggtctgccgagcgatctgatggggccggtggtgttcctggcgtccagcgcatctgactatattaacggctataccgttgcggtagatggcggctggctggcgcgttaa

SEQ ID NO: 72267 - DNA, 837 bp, Citrobacter koseri
gtggacgtaagacagagcatccacagcgcgcacgctaaaacgctggacacccaggggctgcgcaacgagtttttggtcgagaaagtgtttgttgctgatgaatacaccatggtttacagccacatcgaccgcattattgtcggcggcatcatgccggtagcgaaaacggtttccgttggcggtgaagtcggtaaacagctgggcgttacctacttcctggagcgtcgtgaactgggggtgatcaacatcggcgggccgggcacgatcgctgtcgatggtcagtgctatgagatcggccaccgcgatgccttatacgtcggtaaaggcgcgaaagaagttgttttcgccagcgttgatggcgcaaatccggcgaagttctactacaactgcgcgccggcgcataccacttacccgactaaaaaagtgacgccagccgatgtcgcgccggttactctgggcgacaacctcaccagtaaccgccgcaccattaacaaatacttcgtgccggacgtactggagacctgccagctgagcatgggcctgaccgaactggcgcccggcaacctgtggaacaccatgccttgtcacacccatgaacgccgtatggaagtgtacttctatttcaacatggaagagaacgcctgcgtctttcatatgatggggcagcctcaggaaacgcgtcatatcgtgatgcataacgagcaggcggttatctccccaagctggtctattcactccggtgtcggcacccaggcctatacgttcatctgggggatggtgggtgaaaaccaggtctttgatgatatggaccacgttgcagtaaaagatctgcgctag

SEQ ID NO: 72268 - DNA, 1179 bp, Citrobacter koseri
atgaaagaggttgtgatagttggggctttacgtacgccgatcggatgcttccagggaacgctgtcccgccattctgccgttgagctgggcagcatggtggtaaaagcgttgatggagcgtaccggcgttgatgtacatgctatcgatgaagttatcctcggtcaggtgctcacggcgggcgcaggacaaaacccggcgcggcagtcagccatcaaaggtgggctgcccaacaccgtttccgctatcaccatcaacgatgtctgcggttccggcctgaaagcgctgcacctggctacgcaggcgattcagtgcggcgaggcggatattgtcattgccggcgggcaggagaacatgagccgggcgccgcacgttcttaccgacagccgcacaggggcgcagctcggtaacagccaactggtggacagcctggttcacgacggcttgtgggatgcgtttaacgattaccacatgggcgttaccgctgaaaatctggcgcgggaatacggcatcagccgcgaattgcaggacgcctatgccctcagctcccagcaaaaagcgcgggcggccattgatgccgggcgttttaaagctgagattgtcccggttgtcacccagcgtaacggccagcctgtcgttgtcgatactgatgagcagccaagaaccgatgccagcgcggaaggattggcccagttgaacccggcatttgatctcctcggctcggtcacggcgggcaatgcctcgtcaattaacgatggcgcggctgccgtcatgatgatgagcgaagccaaagcgcaggaactggatttacccgtactggcgcgtattcgcgcttttgccagcgtcggcgtcgatcccgcactgatgggtatcgcgcccgtttacgccacccgacgttgtcttgaacgggtaggctggcaactggcagatgtggatcttatcgaggctaacgaggcttttgctgcgcaggcgttatccgtcggcaaaatgctggagtgggacgaacgccgggtgaacgttaacggcggagcgattgcgctcggccatcccattggcgcatccggctgtcggattctggtgtcgctggtgcatgagatggttaaacgcgatgcgcgaaagggcctggcgacgctctgcattggcggcgggcaaggcgtggcgcttgctatcgaacgagattaa

SEQ ID NO: 72269 - DNA, 876 bp, Citrobacter koseri
atgcgctactctcccgaagcattaatcgcatttgttgagacggtctcctgcggctcgttttccgctgcggcgcgccggttacggaaaagtcagtccaccgtcagtacggcgattgcccacctggaagccgatctggggttttcactgtttgatcgctcttcacgacagccagtgctgacggaagagggcaagcgggtgctcagctatgtgcaggctattctgtcagcaagcgatcgtctggatgaggtggcgttatccctgtctggcgaaacggaaacccgtctgacattcgtgctatccgacaccctgcatccagacgttctggaagaattaatggtgcagttcgaccgccagtttccccatacggaatttgaatgtctgatcggcgaagatgaagatgtcatcgatctcctgcaaaagggacgcgcgcaggtcgggctgattgaagcgcgcaatcattaccctaccgagatgggggtgacgcgcctgcccatgcaaacctggatgggactctacgtggcggcctcgcatcctctggccgcgcagaaaaccctgcaatgggatcagctgcatacctggcgtgaactgcggctgaatacctatctggaaagtggtgccagcgtggcgcgcggcccggcctggtctgcgcctaactatttgttattactgagtatggcggtgcagggatttggctggtgcgcattgccttgcgcgctggtggaagagttcgcggctgaaaaaccgctggtgcaactggatgtgcccggctggccaaaggcgatctcgattgatcttctctggaacaaaaagtcgccgccgggtgcggcgggaagctggctccgtgatcatttacagcagggacgtataccgggctga

SEQ ID NO: 72270 - DNA, 456 bp, Citrobacter koseri
atgcaacatgatttagtccaacgccgttcgctactcgaacgcattttccatgcggtctgcttcgaaggcattgccaccgccattctggccccgactaccgcctggctgatgcagcgctcagtgctggaaatgggaggcttaaccattctgctggcaaccacggcgatgatctggaatatcatctataacgcgctgtttgaccgcttctggccgtcacacgtagtgacgcgcaccgctaaagttcgcgcactgcacgcgctgggatttgaaagcggctttatcgtcattggtgtgagtattgtcgcctgggcgctgaacgtcagcctgttgcaggccttcacgctggaaatcggtttcttccttttcttcctgccatacaccatgttctacaactgggcctatgacacgttgcgtcttcgcgtagtaagacgccgccagcagcgcgttactgcctga

SEQ ID NO: 72271 - DNA, 1230 bp, Citrobacter koseri
atgtcgaaaatttggtcaaaagaagaaactctctggagttttgcactatatgggactgcggtcggcgcaggcacccttttcctccccattcagttgggttccgcgggggccatcgtgctgtttattaccgcactggttgcctggcctctgacttactggcctcataaagcgctgtgccagtttatcctctcttcgaaaacctccgctggcgaagggatcaccggtgcggtaacgcattactacggcaagaagatcggcagtctcatcacctcgctatactttattgcgtttttcgtggtggtcctgatttacgccgtggcgataaccaattccctgacggaacagctggcaaagcagatgacgatagacctgcgggtgcgtgttctggtcagtctgggcgtcgtattgattctgaatctgattttcctgatgggacgacatgcgactatccgcgtgatgggctttttagtgtttccgcttatcgcctatttcttatttctgtcgctttatttgaccggaagctggcagcccgcgttattgaccagccagatgtctttcgatcggcacacacttcatcaggtatggatatccattccggtgatggttttcgcttttagccatacgcccattatctccacgtttgctatcgacagacgtgaaagatacggcgagcaggccatgggtaaatgcaaaaaaatcatgaaggtggcttatctgatcatttgcctgagcgtgctgtttttcgttttcagctgtctgctctccattccgccatcctatattgaagccgcgaaacatgaaggcgtgaccatcctgtcagcgctgtctatgatgccagccgcaccggcatggctctccatttcagggattattgtcgccgttgtcgcgatgtcaaaatcgtttctgggcacctattttggagtgattgaaggggcaacagagatagtacgaacggcgttacttcagactggcgtgaagaaaagccgggcatttaatcgcgccctgtctatcatgctggtctcgctgattacctttgtcgtttgctgcattaatcccaacgccatttcgatgatttatgcgatcagcggcccgcttatcgccatgattttgtttatcatgccgacgctgtcgacctatctgatccccgcgctcaaaccataccgctctctgggaaatctgcttaccctgattgtgggtctgctttgcgtgtccgtgatgttttttggctaa

SEQ ID NO: 72272 - DNA, 462 bp, Citrobacter koseri
atgatgaaaattaaaatactggcagcggctattattatcacgttcttcattgtgggcggtggaggattctggtatgcacacagcattaacccgaaaattgattgcagtggttatgccgtctgggatattgatcatgaactttttgctggtgatattacctaccagatgcataatcatcagggaatcgtgacattaaccggcgtgttgaatacgcccgacgctcattcttataaaattagccggattatttattttacgtaccagaagttgcagaaaaactatattattacgacgcataatctggtccgatatccgtctgacgaattacagggcagtcatgaacgcaaggctatgccgcttatttatttatcaaaggacgcgacgttctcgtttttgatacaaccctggcgggaaggctggacgtttacgacagtcgggtcgccctcactattatgccgatag

SEQ ID NO: 72273 - DNA, 792 bp, Citrobacter koseri
gtgtcggatttgttaaaacacgccagatgttacacaattaataacctggttgactttcaccctggaaatcgggcgttatcgaatagcgcaatgcagaagaccgtaacgttacaaagtcctgcaagctttatccttttatatcttattcagcataacaacacggtggtttctcaaaaccagctgattacagcgggttggggagagaagaatcatgttacctcggcgaatactttttatcagacgattctcattctaagaaatgcgttaagtgatattgggttaccgcgcgatcttataaaaaccattgcccgtcgcggtatgatgatttcagcgaatattcagacggatgagataaccgcaaaagcatccgcgaccgaagcgccggcgcagattgttgcaccccaaatggagccgaagggagacacgccaataaaaaagcgccatctctcgttgcctgcggcgctttgcggactggcgcttctggtggtgatgataagcattgccgccagcctgttttatatgtctccagagtctctgctgtcgtcttatgaggttctggattccgagactttttcatcctgtaccgtcctgcaaaaagggaatgatgtgctggagataaattatattcgctttatgcacaaacatcgcgagatttgcgataacaataactatgtgtttctctcaggaatgagcagcgcaaaaaatatcacggcgattatatgcccggaggatgccagagaaaatccgtccgtaaagtgtataacctactattcgataaatgatgaaaattaa

SEQ ID NO: 72274 - DNA, 702 bp, Citrobacter koseri
atggagctggatgttaaattaaaaaaccttacgtgcagtagttgttctttacattgtaaaataatgccagaaaaatcacctcgtttacaatattgtgctaacgcatgtttttgtatgtggccggaagaaagtatctactttaacagaggtgttattgagggcattttaaataataatcataatgcccgattaaatggttatatttttgtcgatttctctatcagctttttgcggctgtttctcgacaaacagtggattgattatctcgccagcacacgtatgggtattgtactggtgagcgatcggaacatgcagtcgttagccaactactggcgtaaacatcatccggcggtttctgtcgtcatttatcacgatgatggactggcggttgcaaatgaaaaaatcagacaagtatttattgggcgacatctgtcttttacaaaagggaataccctgacccagacggagttcatcattatgggtaacatggttgcagggaaaaatccgcatcaaatcgccgagttgctgagtatggatatccgcagcgtctatgcttataaacagaggatcgagaaaagaatgggcgggaagataaacacgctgtttattcattcgcatccactttccaatgaaaaagccgcattcccaatgatcacaaaggaatgcaaaggctcgcttattcatctgcaaagacggcgttaa

SEQ ID NO: 72275 - DNA, 273 bp, Citrobacter koseri
atgtcacatacgatccgggataaacaaaaacttaaagctcgcgccagtaaaatccaggggcaggttgtcgcactgaaaaaaatgctggatgaacctcacgagtgtgccgcggtattgcagcaaatcgcggcgatacgcggcgcggtgaacggattaatgcgtgaggtgatcaaagggcatctgaccgaacacattgttcaccagagcgatgaagtgaagcgcgaagacgatctggaagtgatcctgaaggtgctggattcctatataaaatag

SEQ ID NO: 72276 - DNA, 945 bp, Citrobacter koseri
gtgacgctactggggggtagtatttggtactgggggggagtagaatgcggggaaataagacaactaagaatcattctcatgggcgaattttcaacattacttcagcaaggaaacgcctggttcttcattcccagcgccattctgttgggcgtattacatgggctggaacccgggcactccaaaacgatgatggcggcgtttatcatcgccatcaaagggacgattaagcaggctgtgatgctggggctggcagccacgctttcacataccgccgttgtgtggcttatcgccctgggcggcatgtacatcagcagagcgtttaccgcagaatccgtggaaccctggctacagctggtctccgccatcattattctgagcacggcgttctggatgttctggcgtacctggaaaggggagcgggacgggttggctaaccggcttcctgcccacactcaccaccaccacgaccatgagcaccaccatcacgaccacgaccacgaccacgaccacgaccaccagcatgttcatatttccctgaaggggctaacggacggatcgcacgcctggcaggatgcccatgaacgggcacatgcgaccgatattcagcgccgctttcacgaccgggaagtgacaaacggacagattttactgtttggcctgacgggcggcctgattccttgcccggcagccatcaccgtattgctgatctgcatccagcttaaagccttcacgctgggagccacgatggtactgtgcttcagcattggtctggcgttaacgctggtagccgttggcgtaggcgcagccatcagcgtgcaacaggccgcaaaacgctggagcggatttaataccctggcgagaaaagccccctatttctccagcatactgatcggtctggtggggctttatatgggaatgcatggttatctgggcattatccactaa

SEQ ID NO: 72277 - DNA, 213 bp, Citrobacter koseri
atgttgagcgtgggagagaacaatttttccgcaataaatccgcaatgcctgcgcgcttgtcgcaaaagcgcggaactgcaatacgcgttgggtaatagcatcgaattatacggccaggcgactttctggaaagattcgttaatgcgcttcactcatcagagcggcttaccgcccgtctacggtctgctcatggcttgcgaaaaattgatatga

SEQ ID NO: 72278 - DNA, 534 bp, Citrobacter koseri
atgaaactgaatcgtgccctaattccggcgctggtgatctccgcgatctattctgcgggcgcgctggcttctgataataccattacatttatgggagaagtttctgatgaaacctgttccgtatcggtaaatggttctgaggcctcacctgtcgtcttactgcctaccgtcacggtaaacaccttgaacaccaatcaggttgcaggacaaacgaccttcgacatcggcgtcagcggatgcaccggctcagcctccgggatcaatatttcaaccgtcttcgtcggaaataacatcagcgccacgaccggaaacctggccagcaatggctcggcgagcgatgttgaaattcagatcctcgacaccagtgatacagagatcgattttcgcaacgcgtttaatggcggcggagatttagcgctggcggcaaatgagacatcagccacggcaacctacaaggcccaatattactcagggggcgcagcaaccaccggtacggtgcaggcctccatgcaatacgcggtttcttaccagtaa

SEQ ID NO: 72279 - DNA, 750 bp, Citrobacter koseri
atgaatcccattcgcggcgccctgtattctctcgcggggtttctgtttatcttttttacactctggagtgaacacgtcgccgccagtattaccatgaccgggacgcgaattatttataatggttcagccaactctgtcgatgttcatttaaagaataaagattccttcccttacgtggtctcaacctggttcgataatggcaatatggcagacgggccggagaaatcagctcaacttccctttatcgccacgccgccggtatttcgtattcaacccggcgaagggcaaattattcggattgtttttacggcggcccagtccctgccacaagacagggaatctctgttctattttaattttatgcaggttccgcccacgaatgtgggccaacgtagcccggatcagggcaatcaaaacagcctgctgatcatgctacgcaaccgggtgaagttattttatcgtccggctgaattaaacggtaatccacaaaaaatgctggcgaaccttcaggtcacgcgaacgggtcaaaccggcatcaccattaaaaataatcagccttattacatcaccattgccgggctacagttgatcaatgcctcagaaacccgcacccaaaaagcaggcatgattgcccctttcagcagtgagcgttatgtctttaccgacgcccgatcggctgcaaatcagcgtgttcgcatcacgttgattaacgatcagggagcgagaatcagtgaagattttcctctttga

SEQ ID NO: 72280 - DNA, 2568 bp, Citrobacter koseri
gtgaagattttcctctttgatcgcccggcgggtttcggcctgatggtatgcgttacggcattttccgctgcgaccagggctgattactattttgatcccgcgctgctccaggggtccgcatacggtcatggtctggatctccagcgctttaatcatacccaagacagcgtgcctgcgggtgaatacgtgctggatatttatcttaataaccagttgattcgccagcaggaaaagatcgaacttatcgcatccgccacgccggataaggccgtcgaaccctgtctgccgtttgaggtggttcgcgccagcgcgattcgcacgcgctcctctgcggcgtcttcaacgccgcactgtctgcgcatcagcgagaccgggcaaaaaatcagttggcaagtggatatggcgaagctgcgcctgaatatgacgattcctcaggccgggctttaccacgctccccgggggtatattcccgtttccgaatgggacgccggagagaccgcgctgtttttgcgccacaataccaatttttatcatacggaaaatacagactcacacctgcgctacgactacctgtggagcaatatcaatggcggtttcaacatcgggctgtggcaatttcgccatcaggggaacctccgctatgccgatgacaaccagacgggtagccactacaaatacaatgcggtagcgactgcgattcagcgccctctacctcagtttgagagcgtgatagcgtttggggacaattacaccaacagcagcctgttcggcagcctctcattcaacggcataaaactgaacaccgatcaacggatgtggccgcagggcaaacgcggttatgcgccggaagtgcgcggcgtggcgaccacaaccgcccgcgtggtgatacgccagcagggtaaagtgatttacgaaaccaccgtcgcgcccggcgcttttgttattaacgatctctacaatacccgtggccagggcgaactggccgtcgatgtcatcgaagcgaacgggcaaatctcaagttttaccgttccctactcggcggttcctgattccgttcggccgggaaactggaactatgagctggcaatgggctacgttcgccactactacagcgtggagaataaatttgtcgaaggcgttttgcagcgcgggatgagcaacacgctaaccgccaatttgggttcacggctggccgatgattatcaggcgtttctgctgggcggggtaatggcaacatccgtcggagcattcggcctcaataccgtttactcaaacgccagagtcgaaaacgacgataacgagcagggctggcgcattgaggccagctacagcaaaacgtttaccaccggcacaaatctggtgctggcggcctatcgttactccaccagcggttatcgtgatttacaggatgtgctgggcgtgcgccgtcagcagaaaaacagcgtggcgtattattcggatacgctgcaccagcgtaataacttttccgctacgctcagccagccgatgggcgactggggcatggttagcttcaccggcagtacgtcagattactacagcgacgcgtcgcgcatcacccaactccagtttggctacagcaacagctggcgcaacatcacctttaatcttagcgccgccaggcagcgcagcagttatgccagccgctacgacaccagcgtaaacgaccgggattttgaccgcgaaaaccagcgtaaatacaccgaaaacacgctttcactggggatctccatccccttcgatgttggcgccagccgcacgcagctaaatctggatatgaatcgcagccgcgacgttcgcaccgccacggtggggataagcggcgccacgggcgagaacagcgccacatcctgggccgtttatagcggtctggagcgagataagcacgacggcagcggcgcaacctggggcggcaacgtggagcaacgaaccgccgtcggcgcgtttcgcggctttgcctcccgcggcagcgattaccagcaatatggtctggggatgtccggcacgctggttgcgcaccgcggcgggatcaccgctggcccctacaccagcgatacatttgcgcttatcgaagcgccaggcgcacgcggcgcggcggtacgtaacgggcaaggcgcaacggttgattatttcggctatgccctgctcccttccatgaccccctatcgctataacaccgtaagcctggacagcggaaacatgaatgccgaagttgagctacagagcggcagcaagcgcatcgtgccctacgccggcgcgatttcccgcgtgaaattcacgaccaccagcggtaaagcggcgctcatcaacacaacgcttcccgatggcgagcagccgccgatgggcgctgacgtgacggacggccacggcgaatccgtgggaatggtcggccagggcgggcaaatttacgcccgactggcggaacaatccggcgtgctgttcgtacagtgggggcaaaaatccacgcagcggtgccaggtctggtatcaactaccggctaaaacgcatgcgccgctgtatcagctcacactaccttgtcgtcaggaataa

SEQ ID NO: 72281 - DNA, 1338 bp, Citrobacter koseri
atgaaaatcagacagctcttttacggcctgttattcagcggcatggttgcgcatcctgccctgtccgcctgcatcaaagtcacgtcagccagccccctttctcaggcggcgaaagacgcaggctatgtgggcgccagttggggcggcgtgggggatggcgatgtaaaagggaaactgggcttgcccggcgtcattaccttaagcaacgggacgggatttcagagcgaaggcacgttgctgggcagcgccgctgccagtttcgtccccaatggacgaacgcagggcgtcacggccaatcagattatgtttcgctgtaccgtttccgaaatcggccagatatatgaatactatgccaccaacggcgacgattactggggaggcatggtcgacgtaccgggaatcgacggcgcttactacacctacgttaaaaacgtggcggtcaggctgaccaatctaaaaaccggagaatattactcccgttactggaaagcgcgcgcaatcacggaaagtgaaatgttcaatgacggcacctatatctacgtcccagccagcgcctttagcgacgtatttgttgaactgtttcgggttgatgacagcgccagaggcgttgatggttccaaccgttatacctatccctacgcgggaccggcaggctatatcgctttccacggcggcggcatgagttcagggcttttcgagggcgctgacagccgaaccaactatagcggctggggcgcggcgcagtggcccggcggctggacgttaaccagccagaccgtgttcgtgcgcggcgccgcctgccgggtcaacgactatcctgccattgtcaggttaccgcctaccagcgttggcgaactcatcagcggcggcagcagtcaggctccttttagcattagcgtcgaatgcgaaaccggggcgttgtccggcacgacggcgtccaccagcttaagagcatatgtagcgatgggattcctggtcagcaatcccaccgcagccaatgcggcctctcagttgggcctcaagaccggttccggcgcctatacatggctactcgacaatcattatggcgtaaacggcgttgcatcaggcgtcggcattcgcctctacagcgacaagcaaaatggcaatgcgctgaatcttctgcccaaccaaatagccacagccacgggcaacgcgggcggctggtacggctatcaggatctgaccacgcaaaccgccagcggctcaaccagcctctacagcggcgactttaccgcctctctggaagcgattccgggggaaaacgtaacagcaggaacggtctatgcacagctccaggtggtggtcagttttcagtaa

SEQ ID NO: 72282 - DNA, 783 bp, Citrobacter koseri
atgcacagctccaggtggtggtcagttttcagtaactggcccacatacacgcttcttatcgtctggacagggtggacggcgactcccgcacgggccgtggtcaatacggaagtgacccgcgttatttttaacgccggggagagccattattcgctggcgctggcaaattcagcgcagcaccctgccctggttcaaatctggacggatgaaggcgatccgctgagtcagcctgctgagaccatcacgcccatcgtcgcgataccgcccgtattcaaaatgcagccgacggaaattcggacggtaaagttacagctcgcagagaagcctgagttagcgcgcgagcgggagtcgctttactggctgaatatctaccagatcccgccgatgaccgatcaggatgcgaaaacgcggcaaaaactcgtgctgccgctgcgcatccgcatgaaagtgtttattcgtccacagggcgttgggccattgagagaacaggatggcgaacggctgaccttcacattccagccgcaggaggcgcagctttatgttaataacccgacgccgtggtacatcacgctggcagcgctggcgtgcgacaacaccagcgcaacgccgctgatgatcgctccgctgtcttcacaaccgctagcgttatccgggaaagtgggacattgtcgtaccgtcaggtacgagcttatcaacgaccacggtaatcgctgggtttatgagaaaccgataataaacagcggggcgccggaaaataccgtgggcagaaacccacggcgatga

SEQ ID NO: 72283 - DNA, 273 bp, Citrobacter koseri
atggagatactcgaaggccacaacaaattttatgtgaatgatgctgcgggtaatcaggtcgccgaaatcgtatttgtaccgacgggcgaacatctgagcattattgagcatacggatgtcgatcccagcctgaaggggcagggcgtcggtaaacagcttgtcgcgaaggtggttgaaaagatgcgccaggagaaccgcaaggttattccgctttgccctttcgccaaacatgagtttgataaaacgcgcgagtatgacgatatccgcgcctga

SEQ ID NO: 72284 - DNA, 231 bp, Citrobacter koseri
atggatcaggaactactggatgcgggttaccgggcctataccggcgagaaaatcgatgtctatttcaatacggccatttgtcagcactcgggtaattgcgtgcgcggtagtgcgaagctctttaatctgaaacgtaagccgtggatcatcccggatgaagtggatgtggcaacggttgtgcgtgttattgatacctgtccgagcggcgcgctgaaataccgccagaaataa

SEQ ID NO: 72285 - DNA, 1554 bp, Citrobacter koseri
atgaacgaatattttatgtttgccctggcactctctcctttgctgcttatggtatttttaattctgaaattgaaaatgcccatccattattcagttttgatttcgctggcattcactgccgcgctgtctgcaatattctgggacatgccagtacaaaatcttaaagcctcgatgggttatggcgcactgaaaggattatggccgatcgtgattgtgatcctcggcgctatattcagttataacgtcatgcaggcgaccaaagcgctggatattctccgcgatattctcgccagtattagcgaagataagcgtattcaggtactgctgatttcgtggtgtttcggtggattccttgaagcggctgccgggtacggtacggcggtcgcgatacctatcggtattctcatcgcgctgggattcaacccactgaaggcagcaattgcttcacttgtggccaacaccgtacccacggcgttcggggcggttggtattccggtctctatcctggctgaacaggttaatctgccggtttacaccttaggcggaacgattattctgcaattagccctttttaatatcctgctgccgtttgtcataatttgcattattggcggtggcctgaaagccattcgcggcgtgttccttattacgctgctttgcggtatcacaacgcttgttccgcagtattttgtcgccatacatctcggggcagaattacccgcctttgccggcagtctggtcagtctttttgctgtcgcaattgccagccgcctgcgcaaagggaaaacagatcccgagtggcgcattgaagtcagccacacccgtgaaacgacgccgcgctcggcgaaagtgctgttccgggtcggttctatctatctgtttatttttgtctttattctgctgtgctcgccgttatttccaacgataaaagcggcggcttctcagttggcttcggtgctgcattttacgctggccgatggcaaaacgctggcgctgaaagtcgaatgggtcaccacgcccggaatgttgatcatctttgcgactattattggcggttttattcagggggcatcagcacgcggtatgctggaagtgtttatcaagaccgtgttccagcttaaaaattccattgtcgcgattatggcgatcgtcgctctggcaacggtaatggatctcagcggtattatctccacgctggcccagtcgattgtcgatctgaccggaagctcgtacgtttttctcgctccggtgattggcgcgctgggaacgtttgttaccggcagcgacaccaactcgaatattctgtttggcaaactacaaaccattgccgccagtaaattaaatattgatccaaactggctggctgcggcaaatacctccggcgcaacaggcgggaaaatgatttcaccgcaaagtatcgccattgcggtttcggcaaccaaaatggagggacaggcgaatcagataatgtccggcactatgaagtactgctgtgcctatattgtgatccttggattaaaagttggtctcttttattactggtttatgacttaa

SEQ ID NO: 72286 - DNA, 720 bp, Citrobacter koseri
gtgaatgtaaatttctttgttacctgtattggtgacgcgctgaaatcacggatggcacgagactccgtattgctgctggaaaaactgggctgccgcgttaatttccctgagaagcaagggtgttgcggccagccagccatcaacagcggctacatcaaagaagcgatccctgggatgaaaaacctgatcgcagcgctggaagacaacgacgacccgattatctctcctgctggctcctgtacctacgcggtaaaaagctacccgacatatctggtcgatgaacctgaatgggcgttacgtgcggaaaaggtcgccgcgcgcatgcaggatctcacctcctttatcgttaataaactgggtgtggtggatgtgggagccagccttcagggcagagccgtctatcacccatcctgtagcctgacccgcaagctgggagtgaaggaagagccgctcacgctactgaaaaacgtgcgcgggctggagctgttgacgtttgccgatcaggatacctgctgcggatttggcgggacgttctcggtcaaaatggccgaaatatccggcgagatggtgaaagagaaagtcttacacctgatggatgcccggcctgaatatttgattggcgcagacgtcagttgcctgctgaacattggcggtcgactgcaacgggaaggccagccggtcaaagtgatgcatattgctgaagtgctgatgagccgctga

SEQ ID NO: 72287 - DNA, 1428 bp, Citrobacter koseri
atgtcgataaaaaccagcgatgtagaatttaaactgcgcattcgtcagcaaattgaagatccgatcatgcgcaaagccgtggccaatgcgcaggagcgtatcggcgcgaatcggcaaaaaatggtcgatgagttagggcactgggacgaatggcgtgaccgtgccagccagatccgcgatcacgttctgagtaatctcgacgcttacctgtatcaactcaccgagaaagtgacggaaaacggcgggcacgtctacttcgccaaaaccaaagaagaagccacccgctacattttacaggtcgcacaaagtaaaaacgcgcgcaaggtagtgaagtccaagtcgatggtgaccgaagagattggcgtcaatcatgtattgcaggatgccggaattcaggtgatcgaaaccgatctgggcgaatatattctccagttggatcaggacccgccttcacacgttgtggttccggcaatccataaggatcgctatcagatccgccgcgtgctgcatgaacgtctgggctatgacggcccggaaacgccagaagcgatgaccttattcatccgccagaagatccgcgaggatttcctcagcgctgaaatcggtattaccggctgtaatttcgccgtggcggaaaccggatcggtgtgcctggtgaccaacgaaggcaatgcgcggatgtgtaccacgctgccgaaaacgcacattgcggtgatggggatggagcgtatcgcccccacctttgccgaggtggacgtactgatcaccatgctggcgcgcagcgccgttggcgcacgtttgacgggatacaacacctggctgaccggcccgcgcgaggctggccacgttgacgggccggaagagttccacctggttatcgtggataacgggcgctcccgggtactcggttctgaatttcgcgacgtgctgcgctgcattcgctgcggagcctgtatgaacacctgcccggcataccgccacattggtggacacggctatggctctatctatcccggccctatcggcgcggtgatttccccgctgctcggcggctataaggattttaaagatctgccgtatgcctgttcattatgcacggcctgcgacagcgtctgcccggtgcgcattccgctgtcaaaactgatcctgcgccatcgcagagtgatggccgaagagggcattaccccgaaagccgagcgacgggcgatcaaaatgttcgcttatgccaatagccatcctgggctgtggaaagtcgggatgatggcgggcgctcatgcggcaagctggtttattaatggcggtaaaacgccgcttaaagtcggcgctattggtgactggatggaggcacgagatctccctgatgctgacggagagagtttccgtagctggtttaagaaacatcaggcagaggagaaaaagaatggataa

SEQ ID NO: 72288 - DNA, 696 bp, Citrobacter koseri
atggataaccgtagcgcgtttttaaacaccatcgcccaggcgctgggccgcccgctgcgattcgaaccgcaggcagatacgctgccggttaacagctatgcgaacgagcgactgaccgaacttagccagcagcagcgctgcgacgcgtttatccagtttgcgagcgatgtcatgctggtacgctgcgaactgaccagcgaagcgcaggcgccggaagcggcgttacgcctgtgtgaagaactgggacataaatcggtggtactcagcggcgatagccgactggtggaactggggatcaccgaacgcttgcagcaggaatgcaacgccgtggtctgggacccggcccgaggagcagagaatgttacccaggccgaacaagcgaaagtcggcgtagtgtatgccgaatacggcttaacggaatcgggcggcgtggtgctgttttccgcgcctgagcgcgggcgttcattaagcctgctgccggaatcctcgattttcgtgctgcgcaagagcactatcctgccgcgcgtggcgcaactggcggaaaaactgcatcagaaagcgcaggccggtgaacgcatgccatcgtgtattaacatcatcagtggccccagctcaacggcggatatcgaactgatcaaggtggtcggcgtgcatggcccggttaaggcggtatatctgattattgaagattgttga

SEQ ID NO: 72289 - DNA, 747 bp, Citrobacter koseri
ttgagtgcaggatgcctgaacaacaagagcctgagtattgtgatgctgctttgtgcaggcttgcttttagcgggctgctccagcaatcaatcttctgattcgggttccgtctataccgttaagcggggagatacgctctaccgcatttcgcgcacgacgggaaccagcgtgaaagaacttgcccgcctgaacggtatttccccgccttacaccattgaggtagggcaaaaactgaaactgggcggaggggcgaagcgttccggttcatcgcgtgcgaccacggcgaaatcctctacgaaaacggcggcagtcagaccgtcctcttctgtgccgcaatcttcctggcctccggtagggcaacgttgctggcgctggcctgccagcggcaaagtcattttgccttattcaacggcggaaggcggcaacaaaggcattgatatatccgccgcgcgcggcacgccgatttatgcggcaggggcagggaaggtggtctatgtcggcaaccagttacgcggttacgggaacctcatcatgattaaacataatgaggattacatcaccgcttatgcccacaacgacacgctgttagttaacaacgggcagagcgtgaaagccgggcagaaaattgccacaatggggagcactgatgcggattccgttcgcttgcacttccagattcgctaccgcgcaacagcgattgatccactgcgttatttaccgccgcaggggagcaaaccaaaatgctga

SEQ ID NO: 72290 - DNA, 546 bp, Citrobacter koseri
atgaccggggaacatgtcatattgctggatgagcagggtaatcctgacggcatactggagaaatatgcggctcatacctctgatacccttttacatctcgccttctcatgctggttgtttaacgcacaggggcaattgctggtcactcgccgctcgctcagtaaaaaagcgtggccgggagtctggaccaactcagtatgcgggcacccacagcagggagaaagcactgaagcggcaattatccgacgcagccgttttgagcttggcgtcgaaattaccaacctgacgcccgtctatccagattttcgctatcgggcaactgacccgaatggcatcgtggaaaatgaggtctgtccggtatacgccgcgcaggtgaccagtgcgctacaggtaaacccggatgaagtgatggactaccagtggagcggcctggaaaccgtactgcaagcattgagcgcggcgccgtgggcgttcagtccgtggatggtgttgcaggcgtctgacgaccaggcgcgtgagttgttgcgggagtataaccaggggtaa

SEQ ID NO: 72291 - DNA, 1518 bp, Citrobacter koseri
atgtctgaacaacacgcacagggcgctgacgcggtaaccgatcttaacaatgaactgaaaacgcgccgcgagaagctggctagcctgcgcgagcagggtatcccgttcccgaatgatttccgtcgcgatcacacctcagaccaactgcacgctgacttcgacgcgaaagagaacgaagaactggaagcgctgaacatcgaagtgtccgttgcgggccgtatgatgacccgtcgtattatgggtaaagcgtctttcgttacgttgcaggatgtcggcggccgtattcagctgtacgttgcccgtgacgatctgccggaaggcgtttacaacgagcagttcaaaaaatgggatctgggcgatatcctcggcgcgaaagggaagctgttcaagaccaaaaccggtgagctgtccatccactgcaccgaactgcgtctgctgaccaaagcgctgcgtccgctgccggataaattccacggcttgcaggatcaggaagcgcgctatcgccagcgttacctggatcttatctctaacgatgaatcccgtaacacctttaaagtccgttcacagattatggcgggtattcgtcagttcatggtgggccgcggctttatggaagtggaaaccccgatgatgcaggtgattcctggcggtgcggcagcacgtccgtttatcacccatcacaacgcgctggatctggacatgtacctgcgtatcgcgccggaactgtacctgaagcgtctggtggttggcggcttcgagcgtgtgttcgaaatcaaccgcaacttccgtaacgaagggatctccgttcgtcataacccagagttcaccatgatggaactctatatggcgtatgcggactataaagacctgatcgaactgaccgaatcgctgttccgtacgctggcgcaggatatcctgggcaaaactgaagtgccttacggcgatgaagtgttcgacttcggcaagccgttcgaaaaactgaccatgcgcgaggctatcaagaaataccgtcctgaaacggatatggccgatctggataacttcgactccgccaaagcgatcgctgaatctatcggcatcaaggttgagaaaagctggggcctgggccgcatcgtaactgagatcttcgaagaagtggcggaagcgcacctgattcagccgaccttcatcaccgaatatccggcagaggtttctccgctggcgcgccgtaacgacgtgaacccggaaatcaccgaccgctttgaattcttcatcggcggccgtgaaatcggtaacggctttagcgagctgaacgatgcagaagatcaggcgcagcgtttccaggatcaggttaacgcgaaagaagccggtgacgacgaagcgatgttctacgacgaagactacgttaccgctctggagcacggcctgccgccgacagcgggtctgggaattggtatcgaccgcatggtaatgctgttcaccaacagccacaccatccgcgacgtgattctgttcccggcgatgcgtccggtaaaataa

SEQ ID NO: 72292 - DNA, 882 bp, Citrobacter koseri
atgactcagggtctggaagatgtttccgggctgctggagctggctgtagaagccgacgacgaagaaacctttaacgaagccgtagctgaactcgatacgctggaagaaaagctggcgcagctggaattccgtcgtatgttctccggtgagtatgacagcgcggattgctacctcgatattcaggcaggttccggcggcactgaagcgcaggactgggcaagcatgctggagcgtatgtatctgcgctgggcagaagcgcgcggctttaaaaccgaaattattgaagagtctgaaggtgaagtcgcggggatcaaatccgtcaccatcaagatttccggcgaatacgcctatggctggctgcgtaccgaaaccggcgttcatcgcctggtgcgtaagagcccgttcgattccggcggtcgtcgtcatacctcgttcagctccgcgttcgtctacccggaagttgacgatgatattgatatcgagatcaacccagcagacctgcgtatcgacgtttatcgcgcatccggcgcgggcggtcagcacgttaaccgtacagaatctgcggtacgtattacgcacatcccgaccgggattgtgacgcagtgccagaacgaccgttcccagcacaaaaacaaagaccaggccatgaagcagatgaaagcgaagctttatgaactggagatgcagaagaaaaatgccgagaaacaggcgatggaagataacaaatccgacatcggctggggcagccagattcgttcttatgtccttgatgactcccgcattaaagacttgcgtaccggggttgagacccgcaacacgcaggcggtgctggatggcagcctggatcaatttatcgaagcaagtttgaaagcagggttatga

SEQ ID NO: 72293 - DNA, 1734 bp, Citrobacter koseri
gtgaaacaacagatacaacttcgtcggcgtgaggccgacgagacagctgagctgcctgctgacctgccgccgctgctgcgccgtttatacgccagccggggcgtacgcagcgcgcaggagctggagcgcagcgtaaaagggatgctgccgtggcagcagcttagcggcgtcgaaaaggcggttgagatcctctataacgcgtttcgcgaggggactcgcatcgtcgtcgtgggcgattttgacgcagatggcgccaccagtacggcgcttagcgtcctcggtatgcgttcgctgggctgtaacaatatcagctacctggtgccaaaccgttttgaagacggctacggattaagcccggaagtggtcgatcaggcgcatgctcgcggcgcgcagctgattgtgacggtggataacggtatctcttctcataccggtgtggaacatgccagagcgttggggattccggtggtagtgaccgatcaccacctgccgggcgatacgctccctgacgcagaagccatcattaacccgaatttgcgagattgcgatttcccgtcgaagtcgctggcaggcgttggcgtggcgttctatctgatgctggcgttgcgcactttcctgcgtgataaaggctggtttgatgagcgtggcattacgccgccgaatctggcggaattgctcgacctggtcgcgttaggcacggtggcggacgtggtgccgctggacgccaataaccgcatcctgacgtggcaggggttgagccgtatccgcgccggaaaatgtcgcccaggcattaaggcgctgcttgaggtgtcgaaccgcgatccgcagaagctggcggccagcgatttaggctttgcgctggggccgcgtctgaatgccgcagggcggctggatgatatgtccgtcggcgtggcgttgctgctgtgcgataacatcggcgaagcgcgggtgctggcgaatgaactggatgcgctgaaccagacgcgtaaagagatcgaacaggggatgcaggctgaagcgctgaccctgtgcgagaaactggaacgcagccgtgaaacgctgcctggcggcctggcgatgtaccatccagaatggcatcagggcgtggtcggcattctggcttcgcgcattaaagagcgcttccatcgcccggtgattgcctttgcgcccgccggtgacggtacgctgaaaggttccggtcgttccattcaggggctgcatatgcgcgatgcgctggagcgtctggatacgctgtatccggggatgatgctcaaattcggcggccatgcgatggcggcaggattgtcgctggaagaggcgcagtttgaacatttccagcagcgttttggcgagctggtgaccgaatggctcgacccatctctgctacagggcgaagtggtttctgatggcccgctgagcgtggctgagatgacgatggaagtggcgcaactgctgcgtgacgcagggccgtgggggcagatgttcccggaaccgctgtttgacggacgttttcgcctgttgcagcagcggctggtcggcgaacgccacctgaaagtgatggtcgaaccggttggcggcggcccgctgctggacggcattgcgtttaacgttgataccgcctgctggccggataacggcgtacgcgaagttcagcttgcctataagctggatatcaacgagttccgcggcaaccgtagcctacagctgatcattgatcacctctggccaaattga

SEQ ID NO: 72294 - DNA, 714 bp, Citrobacter koseri
atgaaaaaacgttttatgatgttcaccctgctggcggcggcattttcgggaatggttcatgcggacgatgcagccattcgccagtcgctgactaagctgggcgtgcagagcacggaaattcagcccgcgccggttgcaggcatgaaaaccgtgctgaccaacagcggcgtgctgtacgtcaccgacgatggcaagcatattattcaggggccgatgtatgacgtcagcggcgcgtcgccggtaaatgtcaccaatcagttgctgatgaaacacctgaatgcgctggaaaaagagatgattgtttacaaagcgccgcaggaaaaacacgtcatcaccatctttaccgacatcacctgcggctactgtcacaagctgcatgaagagatgaaagactacaacgcgctggggattaccgtgcgttatctggccttcccgcgccaggggctggaaagccaggccgagcaggatatgaagtccatctggtgcgcgaaagaccgaaacaaagcctttgatgacgcgatggcgggcaaaggcgtgaaagccgccacctgcgatatcgatatcgccaatcattatgcgctgggcgtgcagttcggcgtgagcggcacgccagcgattgtgctgagcaacggctatgtggtgcctggctatcaggggccgaaagagatgaaggcgttccttgacgcgcaccagaaacagaccagcggtaaataa

SEQ ID NO: 72295 - DNA, 897 bp, Citrobacter koseri
atggataaggatctggcgcgtatcgagcagtttctcgatgccctgtggctggagcgtaatctggcggaaaatacgctgagcgcgtatcggcgcgacttgtcgatggtggtcgaatggttgcatcatcgtggaaaaacgctggcgacggtgcagagcgatgatttacaaacgctgctggcggaacgtatggatggcgggtataaagccaccagttccgcacgattgttgagcgccacgcggcgcttctttcagcatctgtaccgtgaaaaatttcgtgaggacgatccgagcgcgcagcttgcgtcgcccaaacttccgcagcgtttgccaaaagatctcagcgaagcacaagttgagagattattacagtcgccagttgttgaccaaccgctggaattacgcgacaaagcaatgctggaagtgctgtatgcgacgggcctgcgcgtttctgagctggtcgggctgaccatgagcgatatcagcctgcgccagggcgtcgtgcgggttatcggtaaaggcaataaagaacgtctggtgccgttgggcgaagaggcggtgtactggctggagacgtatctggagcacgggcgcccgtggctgctgaacggcgtgtcgattgacgttttatttcccagtcagcgggcgcaacaaatgacgcgtcagaccttctggcaccgcattaaacactatgccgtgctggcgggaatcgacagcgaaaagctgtcgccgcacgttttgcgtcacgctttcgccacccatttgctgaatcatggcgctgacttacgcgttgtacagatgctgcttgggcatagcgatctctcgaccacacaaatttatactcatgtcgcaacggagcgcttgcgtcaacttcatcaacagcatcacccgcgagcgtga

SEQ ID NO: 72296 - DNA, 525 bp, Citrobacter koseri
atgaatatcggccttttttatggttccagcacctgctataccgaaatggcagcggaaaaaattcgcgacattattggcccggaactggtcacattacacaacctcaaggatgactctccgaccttaatggagcagtacgatgtgctcattttaggcattccgacctgggattttggtgaaatacaggaagactgggaagccgtctggaatcaactggacgatctcaagctggaaggcaaaattgtcgcgctctacggcatgggcgaccagttgggctacggcgagtggttcctggatgcgctgggtatgctgcatgacaaacttgtcaccaaaggcgttaaatttgtcggctactggcctaccgaaggctatgagttcaccagcccgaaaccggtcattgccgatgggcaactttttgtcggcctggcgctggatgaaaccaaccagtacgatctcagcgatgagcgcatccaagcctggtgcgagcaaattctcggtgagatggcagagcactattcctgctga

SEQ ID NO: 72297 - DNA, 408 bp, Citrobacter koseri
gtggtcctgtggcaatctgatttacgcgtctcctggcgcgcacaatggctctctttgctcattcatgggcttgtcgccgcattggttttattgatgccctggccattgagctacacgccgctctggctgatattgctttcgctggtggtgttcgactgtgtgcgcagtcagcggcggattaatacccgacagggcgaaattaaattgctgatggatgggcgtttacgttggcaagggcaagactggacgattcagggcccgccctggatgcttaaaactggcatgatgctgcgtttgcgcgccgacagcgggaagcgtcagcacttgtggctggcggcagacagcatggatgacgccgagtggcgggatttacggcggttaatgttgcaacaggcgacgcaggggtaa

SEQ ID NO: 72298 - DNA, 267 bp, Citrobacter koseri
atggatattaataacaaagcacgtattcattgggcatgccgtcgcggtatgcgtgagctcgacatttccatcatgccgtttttcgaacatgagtacgataacttaagcgatgaagaaaaatgcatctttgttcgtttgctggaatgcgacgatcctgatttatttaactggttgatgaaccacggtaaaccgggtgatgcagagctggaacaaatggtgaaactcatccagacacggaatcgggaacgtggtcctgtggcaatctga

SEQ ID NO: 72299 - DNA, 981 bp, Citrobacter koseri
atggcttttacaccttttcctcctcgtcaaccgtccgcgtcagcccgtttgcctctgacgctgatcactctcgatgactgggcgctggcctcgatcaccggcgccgacagcgagaagtatatgcaaggtcaggtcaccgcggacgtcaaccagcttaccgaacagcaacacttactggtcgcccattgcgatgcaaaagggaagatgtggagcaacctgcgtctgttccgcgacggcgacggttttgcctggattgaacgccgcagtctgcgcgaggcccaactgaccgagctgaaaaaatacgccgtgttctctaaagtcacgatcgtgcctgacgatgagcgtgttctgctcggtatcgctggttttcaggctcgcgcagcgctggcgaatatctttagcgagttaccgaacagcgaaaaacaggtcgtgagcgaaggggcgtccaccctgctttggtttgaacatccggcggaacgttttctgctgattacggatgtcgccacggctgaatccctgactgaaaaactgcgtggcgaagcggcgctgaacaacagccagcagtggctggcgctggatattgaagcgggcattccggtcattgactccgcgaacagcgggcaatttataccgcaggcaaccaacctacaggcgctgggcggtatcagctttaagaaaggctgctacagcgggcaggagatggtcgcccgggcaaaattccgcggtgcgaacaaacgcgcgctctggtctctggcgggtaaagccagccgcgtaccggaagccggagaagatctggagttgcagatgggtgagaactggcgtcgtaccggcaccgttcttgcggcagtgcaactggatgacggccaggttctggtgcaggtggtcatgaacaacgatatggaagctgacagcgtatttcgcgtacgcgatgatgcgaatactctgcacatcgtaccgctgccctattcgctggaagagtaa

SEQ ID NO: 72300 - DNA, 660 bp, Citrobacter koseri
atggtgcagaaaccattaatcgcacagggatattcgctggcagaggaaattgccaatagcatcagccacggtattgggttggtgtttggtattgtcggtctggtgctgttactggttcaggcggtagacgcgaatgccagtgcaacggccattaccagctacagcctgtacggcggcagcatgatcctgctgtttcttgcttcaaccctctaccacgcgattccgcatcagcgggcgaagatctggctgaaaaaattcgaccactgcgctatctatctgctgattgccggaacctatacgccgtttttgctggtggggctggattcgccgctggcgcgtgggctgatgattgtcatctggagcctggcgctgctcggtattttattcaagctgactattgcccaccggtttaaggttctctcgctggtaacgtatttaacgatggggtggctgtcgctgattgtggtttatcaactggcgatcaaactggcggcgggaggcgtgacgctgctggcggtcggcggcgtggtctattcgctaggcgtgattttctacgtctgcaaacgcattccctataaccatgcaatctggcacgggttcgtgctgggcggcagcgtgtgccactttctggcgatctatctgtacgtagggcaggtctga

SEQ ID NO: 72301 - DNA, 219 bp, Citrobacter koseri
atgcagccaaatgacatcactttttttcagcgtttccaggatgacattctggccggacgcaaaactatcaccattcgtgacgagtctgaatcacacttcaaagccggggatattctacgggttggacgcttcgaagatgagggttacttctgcacaattgaggttgttggcacttcaaccgtcacgctggacacgctgacggaaaaacatgcctggtag

SEQ ID NO: 72302 - DNA, 735 bp, Citrobacter koseri
gtgagtatgttctcccacgctgccatcgccagtctcaacaatcttgagatgctggtctacaactatgtcatcaaaaaccgtgacaaagtcatgtacatgaccattcgcgaactggctgatgccgtgggcgtttccaccaccaccgtgctgcgtttttgtcgcaaacttcactgtgacggctactctgaattccgcgtgcgctttaaattatatttagagcaggatgagccgcaacaggctaattttggcgccagcgaaattatcagtttctttaaaagcgtcaataacgatgagtttgataaattactcgatcaggctgtcgatatcattttatcttccgaacgtattatatttgtcggcgcaggaacttccggcgcgctggcaaaatatggcgcacgttttttctctaacgtcgggaaattcagtaatcatattgatgatccttattttccggtcaccaacgatatggcaaaaaacgcgctggcgattgtgctttcagtatcgggagagactgcggagatcctgcgctttgccagccagttcagcctgcacaactgcaaagtgctgtcgattaccagccatgaacattcggcgctggcaaagctggccgattttaatctctcctggcatgtaccacaaacccgtattgctggcgtttatgatattacaacgcagatccccgttatctatattcttgaatcattaggccgtaagctggcgaaaaaattagcgtaa

SEQ ID NO: 72303 - DNA, 1434 bp, Citrobacter koseri
atgaaaaaactcaccttaccaaaagatttcttatggggcggcgcagttgccgctcatcaggttgaaggcggctggaacaaaggcggcaaagggccgagcatctgtgatgtgctgaccggcggagcgcatggcgtaccgcgtgaaatcacccgacaagtcgtagcgggtaaatattatccgaaccatgaagcggtcgatttttacggtcactataaagaagacattaagctgttcgccgagatggggtttaaatgctttcgcacctccatcgcctggacccgcattttcccgcagggtgacgagacgcagccgaacgaagaagggctgaaattctacgatgatatgttcgatgagttgctaagatacaacatcgaaccggtcatcaccctctcccactttgaaatgccgctgcatctggtacagcaatacggcggctggaccaaccgtaaagtggtggatttcttcgtccgcttcgcggaggtggtatttgagcgctacaagcacaaagtcaaatactggatgaccttcaatgagatcaacaaccagcgcaactggcgcgcgccgctgtttggctactgctgttccggagtggtgtataccgagcatgaaaacccggaagaaaccatgtatcaggtgctgcatcaccagttcgtcgccagcgcgctggcggtgaaggcggcacgccgcatcaacccggagatgaaggtcggctgtatgctggcgatggtcgcgctctatccgttttcctgtaagccagaagatgtcatgttcgcgcaggaatccatgcgcgagcgctatgtgtttaccgacgttcagctacgcggctactacccgtcttatgtactgaacgaatgggaacgtcgcggctttaacatcaacatggacgctggcgacgcggagattctgcgcgaaggcacctgcgattaccttggcttcagctattacatgactaacgcagtaaaagcggaaggcggtagcggcgatgccatttccggcttcgagggcagcgtgccgaatccgcacgtcaaagcttccgactggggctggcagattgacccggtcggcctgcgttattccctgtgcgagctgtatgaacgctatcagaagccgctgtttattgtggaaaatgggtttggcgcctacgacaaagtggaagaagacggcagcatcaacgacgattaccgcatcgactatctgcgtgctcacgtagaagagatgatgaaagcggtgacgtatgatggtgtggatctgatgggctatacgccgtggggctgcatcgactgcgtgtcattcacgaccggacaatacagcaagcgttacggttttatttacgtgaacaagcatgacgacggtagcggcgatatgtcacgctcgcggaagaaaagttttacctggtataaagaggttatcgccagcaacggcgagaagctgtaa

SEQ ID NO: 72304 - DNA, 2874 bp, Citrobacter koseri
atgacacagacgctaagccagcttgaaaacagcggcgctttcattgaacgccacattggaccggacgccgcacagcagcaagagatgctgaataccgttggcgccgagtcgttaaacgcgctgatcggccagattgtgccgaaagacattcagcttgccatgccgccgcaggtaggtgaagcggcgacggaatacgccgcgctggccgaattaaaagcgattgccggtcgcaacaagcgcttcacgtcttacattggcatgggttataccgcggtgcagctgccgccggttatcctgcgcaatatgctggaaaatccgggctggtacactgcgtatacgccttatcagccggaagtttcgcaggggcgtctggaagcgctgctgaatttccagcaggtgacgctggatctgaccgggctggatatggcctccgcttcgttgctggatgaagcaaccgctgccgcagaagcgatggcgatggcaaaacgcatcagtaaactgaaaaacgccaaccgcttctttgtcgcctctgacgttcacccgcaaacgctggacgtcgtgcgcacccgcgcggagaccttcggttttgatgtgatcgtcgatgacgcggaaaaagtgctggatcaccaggatgtgttcggcgtgctgttgcagcaggttggcaccaccggtgaagtccacgactacagcgcgctgattagcgaactgaaatcacgtaaaattatcgtcagcgtagccgccgattttatggcgctggtgctgctgacggcgccgggtaaacagggcgcggacattgtgttcggctctgcgcaacgcttcggcgtaccgatgggctacggcggcccacacgcggcgttctttgccgccaaagatgaattcaaacgctccatgccgggccgtattatcggcgtatcgaaagatgcggcgggcaataccgcactgcgcatggcgatgcagactcgcgaacagcatatccgtcgcgagaaagcgaactccaatatttgtacttcgcaggtgctgctggccaacatcgccagcctgtatgccgtttatcacggcccggttgggctgaagcgcattgctaatcgcattcaccgcctgaccgacattctggcggcgggcctgcaacaaaaagggctgaaactgcgccatgcgcattacttcgacaccctgtgcgtagaggtggccgataaagccgccgtcctggcgcgcgcggaagccgcagagatcaacctgcgcagcgacatccacaatgctgtcggcatcacgctggatgaaacgacaacccgcgaaaacgtgctgcaactgttctctgtactgctgggtgacgaccacggtctgaacattgatacgctggataaagacgtggcgcacgatagccgctctatccaggagagtatgctgcgtgatgacgcgatcctgacgcacccggtgttcaaccgttaccacagcgaaacggagatgatgcgctacatgcactcgctggagtgtaaagatctggcgctgaaccaggcaatgatcccgctgggttcctgtaccatgaagctgaacgcggcggcggagatgatccccatcacctggccggaatttgcggaactgcatccgttctgcccggcagatcaggcggaagggtatcatcagatgatcaaccagctttctgactggctggtgaaactgacgggctatgatgccgtgtgtatgcagccgaactccggcgcgcagggcgaatacgcgggcctgctggcgattcgtcattatcacgaaagccgcaacgatgggcatcgcgatatctgtctgatcccggcctccgctcacggcaccaacccggcttccgcacagatggcgggtatgcaggtggtggtggtcgcatgcgataagaacggcaacatcgatctggcggatctgcgcgctaaagccgagcaggcgggtgacaatctctcttgcatcatggtgacttacccatccacccacggcgtgtacgaagaaaccattcgtgaagtgtgcgagatcgtgcatcagttcggcggccaggtatacctcgatggcgcaaacatgaacgcgcaggttggcattacctctccgggcttcatcggcgcggatgtttcacacctcaacctgcataaaaccttctgcattccgcacggcggcggcggcccgggtatggggccgatcggcgtgaaatcacatctggcgccgtttgttccgggtcacagcgtggtgcagatcgaagggatgctgacccgtcagggcgcggtgtccgccgcaccgttcggcagcgcatccattctgccgatcagttggatgtacatccgcatgatgggcgcggaagggctgaagcaggcgagccaggtggcgattctgaacgccaactatatcgccagccgcctgaaagacgcgtatccggtgctgtataccggtcgcgatggccgcgtggcgcacgagtgtattctcgacatccgcccgctgaaagaagaaaccggcatcagcgagctggatattgccaagcgtttgatcgactacggcttccacgcgccgaccatgtcgttcccggtggcgggaacgctgatggttgaaccgacggagtctgaaagcaagatggagctggatcgctttatcaatgcgatgctggcgattcgcgcggaaatcgatcgcgtgaaagctggtgagtggccgctggaggataacccgctggttaacgcgccgcacacgcagaatgagctggtcgcggagtggaaccacggatacagccgtgaagtcgcggtgttcccggcgggggtagcgaacaagtactggccgaccgtgaaacgccttgatgacgtttacggcgaccgtaacctgttctgctcctgcgtaccgatgagcgaatatcagtaa

SEQ ID NO: 72305 - DNA, 390 bp, Citrobacter koseri
atgagcaacgtacctgtagaactgaaatacagcaaagaacacgaatggctgcgcaaagaagcagacggtacttacacggttggcatcacggaacacgctcaggaattgctgggcgatatggtttttgtcgatctgccagatgtcggcgccaccgttgcggcgggcgatgactgcgcggtagcagaatcggtaaaagccgcttctgacatttatgcgccggtgagcggtgagattgtggcggtaaacgacgcgctcagcgactcccctgagctggtcaacagcgagccgtatgcgggtggctggatcttcaaaatcaaagccagcgacgaaagcgaaatcgactcgctgctggatgcaaccgcatacgaagcattgttagaagacgaataa

SEQ ID NO: 72306 - DNA, 1095 bp, Citrobacter koseri
atggctcaacagactcctttatacgaacaacacacgctttgtggcgcgcgcatggtggatttccatggctggatgatgccgctgcactatggttctcaacttgatgagcaccatgcagttcgcactgatgccggtatgtttgatgtgtcgcatatgaccatcgtcgatctacgcggtagccgcacccgggagtttttgcgttatctgctggcgaatgacgtggcgaaactcacaaagaccggtaaagccctctactctggcatgctcaatgcctcgggcggcgtgatagatgacctgattgtctattacttcactgaagatttcttccgcctcgttgtaaactccgccacccgcgaaaaagacctctcctggattacccaacacgccgaaccttacgccatcgacatcaccgttcgtgacgacctgtcgctgattgcggtacaggggccgaatgcgcaggcgaaagcggccacgctgtttactgaagaacagcgcaaggcggtggaaggcatgaaaccgttctttggcgtgcaggcgggcgatctgtttattgcaacaaccggttataccggcgaagcaggctatgaaattgcgatgccaaacgaaaaggcggcggatttctggcgtgcgctggtggaatccggcgtgaagccgtgtggcctgggcgcgcgcgatacgctgcgtctggaagcgggtatgaacctgtatggtcaggagatggatgaaggcgtctctccactggcggcgaacatgggctggaccatcgcctgggaaccggccgatcgcgattttattggtcgcgaggcgctggaagtccagcgtgaaaaaggcaccgaacaactggtgggtctggttatgaccgagaaaggcgtactgcgtaatgaactgccggtacgctttaccgatgcccaggggaatcagctggaaggcgttatcaccagcggcactttctctccgacgctgggctacagcattgcgctggcgcgcgttccggcgggtattggcgagacggcgatcgtgcagatccgcaaccgcgaaatgccagtaaaagtcactaaacctgtttttgtgcgtaacggcaaagccgtcgcgtga

SEQ ID NO: 72307 - DNA, 1203 bp, Citrobacter koseri
gtgcaaagtgttgatgtagccattgttggcggaggcatggtaggcctggctgtcgcctgcggtttgcagggcagcggtttacgcgtggccgttctggaacagcgcgttccacagccgctggcgagcgacgctcccccggcattacgcgtatcggctatcaatgccgccagtgaaaaactgcttacgcgtcttggggtctggtcagacattcttgctcgccgcgcaagctgctaccacggtatggaagtctgggataaagacagctttggccgcatcgagtttgatgacaaaagcatgggatacagccacctggggcacatcattgaaaattcggtgatccactacgcgctatggcaaaaggcgcagcagtcagcagatattaccctgatggcgccggctgaattgcagcaggtcgcctggggagaaaatgaaaccttcctgaccctgaaagatggcgcgatgctgacggcaaggctggtgattggcgcagacggcgcgaactcctggctgcgcaacaaagcggatattccgctgaccttctgggattaccgtcatcatgcgctggtggcgaccatccgcaccgaagaggcgcacggcgccgttgcgcgtcaggcgtttcatggcgaaggcatcctggcattcctgccattaagcgatccgcatctgtgttccattgtctggtcgctgtctccgcaggacgctgagcatatgcagcaggcgagtgaggatgcgttcaaccgggcgctgaacgtcgcgtttgataaccgcctcggcttatgccgcgttgagagcgaacgccaggtgttcccgctgacgggacgctatgcgcgtcagtttgccgcacaccggctggcgctggtgggcgacgccgcacataccatccatccgctggcggggcagggggtgaacctcggctttatggacgccgcagagttgatcgatgaactcaaacgtctgcaacgccagggcaaagacattggtcaatacctctatttgcgtcgttacgagcgcagccgtaagcacagcgccgcgatgatgctggcaggtatgcaaggttttcgcgaactgtttgccggagagaacccggcgaagaaattgctgcgcgatattggtctgaaactggccgatactctcccgggcgtaaaaccgcaactgattcgtcaggcgatgggattgaacgatctgcctgagtggctccgctaa

SEQ ID NO: 72308 - DNA, 1179 bp, Citrobacter koseri
atgagcgtgattattgttggcggcggtatggtgggcgcgacgctggcgctggccctttctcagcttagccacggcaaactggccgtgcacctgattgaagcgagcgcgcctgaagccgccgcgcatcccgggttcgacgcccgggcgatcgcgctggcggcaggcacctgtcagcaactggcgcggattggcgtctggcaggcgattgctgattgcgcaacggcgatcaacacggtacatgtcagcgatcgcggccatgccggttttgtcactctggacgcgcaggattacagcatcgctgcgttggggcaggttgtggagctgcatgatgtcggtcagcgactgtttgcgctgttgcgcaaagcgccgggcgtgacgctgcattgcccggatcgcgttgccagcgtggcgcgaacgcaagaaaaggtgaatgtcactctggaaaacggtgacgtgatttctggtcatgtcgtggtggcggccgacggtacgcactccgctctggcgaccgcctgcggcgttgactggcagcagcagccttatgaacaactggcggtgatcgccaacgttgcgaccgctatcgcgcatgacggacgtgcgtttgaacgctttacccaacacggcccgctggcgatgttgccgatgtctgaaggtcgctgttcgctggtgtggtgccatccgcttgaacagcgcgatgagatcatgcgctggtcggatgaacgcttttgccatgagctacagtcggcgtttggctggcggctgggacgtattacccatgcgggtaagcgcagcgcttatccgttagcgctcaccacggcggccaaagcgataacccatcgcaccgtgctggtcggcaatgcggcgcagacgctgcatcctatcgccgggcaagggtttaacctggggctgcgcgatgtgatgagccttgccgaaacgctggtgcaggcgcatgagtctggggcggacgtcggcgagtacggcgtgctttctgagtaccagtcgcgccgtcaggctgacagagaggtgacggttggcataacggatagtctggtgcatctgtttgctaaccgctgggcgccgctggttgccgggcgcaacgtcggcttaatggctatggagttattgcctccccttcgcgacacgttggcaaaacggacgttgggctgggtcgcacgataa

SEQ ID NO: 72309 - DNA, 1326 bp, Citrobacter koseri
atgagcgatatatctcagcaggagtatcagcgtcgccgccaggcattactggcgcaaatgcagccgggcagcgccgcgttgatttttgcagctcaggaagccacgcgcagcgcggacagtgaatatccgtatcgccagagcagtgatttctggtatttcaccggttttaacgagccggaagcggtgctggtgctgattaaaagtgatgacactcataaccacagcgttttgtttaaccgcgttcgcgatctgacggcggagatctggtttggccgccgcctggggcaggacgccgcgccggaaaaactgggcgtggatcgcgcgctggcgttcagcgaaatcaaccagcagctttatcagttactcaatggccttgacgtggtttaccacgcgcagggcgaatatgcgtatgccgacgagattgttttcgccgcgctggataaactgcgtaaaggttcccgacagaacctgactgcaccggcgacgatgaccgactggcggccaatggtgcacgagatgcgcctgtttaaatcgccggaagagattgccgtcatgcgtcgcgcgggcgagatcagcgcgctggcgcatacccgcgcaatgaaaaaatgccgtccggggatgttcgaatatcaactggaaggtgaaattcaccacgagtttaaccgtcacggcgcgcgctatccgtcttataacaccattgtcggcagcggtgagaacggctgcatcctccactacaccgaaaatgaaagcgaaatgcgcgacggcgatctggtgttgatcgacgccggatgcgaatacaaaggttatgctggcgacattacgcgtactttcccggtgaacggcaaatttacgcccgcccagcgcgaaatctacgatatcgtgctggcgtcgctggaaaccagcttacgcctgtttcgtccgggaacgtctatccaggaggtcacgggagaagtggtgcgcatcatgatcgcggggctggtgaatctgggcattttgcagggtgacgtggagcagttgatcgcggaaaacgcccatcgtccattctttatgcatggtcttagccactggctggggctggacgtacacgatgtcggcgtttacgggcaggatcgctcccgcgtgctggagccgggcatggtgctcaccgttgagccgggtctgtacatcgcgccggacgccgacgtgccggaagcgtatcgcggcatcggcatccgtattgaagatgacatcgtcattacggaaacgggcaacgaaaacctgaccgccagcgtggtgaaaaaagcggacgatattgaagccttaatggcggcggcgcgtcagctatga

SEQ ID NO: 72310 - DNA, 579 bp, Citrobacter koseri
atgtctatacagaacgaaatgcctggttacaacgaaatgaaccagtttttgaaccaacaggggacggggttaaccccggccgaaatgcacggtttgatcagtgggatgatttgcggcggcaacaacgacagctcatggcagccgctgttgcacgacctgacgaacgaggggctggcctttggtcacgaactggcgcaggcgctgcgtaaaatgcacgcggcaaccagcgacgcgctggaagacgacggcttcctttttcagctttttctgcctgaaggcgacgacgtgagcgtgttcgatcgcgctgatgcgctggccggctgggttaaccactttttactggggcttggcgtcacgcagcctaagctggataaagtgaccggcgaaaccggtgaagccattgacgatctgcgcaacatcgcccagctcggttatgacgaagacgaagatcaggaagagctggagatgtcgctcgaagagatcatcgaatatgtgcgggttgcggcgttgctgtgccacgacacctttacgcgtcagcagccgacggcgccggaagtccagaaaccgactctgcactaa

SEQ ID NO: 72311 - DNA, 330 bp, Citrobacter koseri
atgtctgcacaacccgtcgatatccaaatttttggccgttcactccgcgtgaattgcccgcctgaacaaagggatgcgttgaatcaggctgcggacgatctgaatcagcggttgcaagatctaaaagttcgcactagagtcacaaatactgagcagctggttttcattgccgcattgaacatcagctatgaattaactcaggaaaaagcgaagacccgcgactacgcggcgagcatggaacaacgaattcggatgcttcaacagaccattgaacaggcgttgcttgatcagggtcgcataaccgaaaaaacgggccaaaactttgaataa

SEQ ID NO: 72312 - DNA, 483 bp, Citrobacter koseri
atgcttgcttatcctcccgtggttcttgcccacaccgtcgcggtgtttctttcattcgatggcgagctggacacgcaacccttgattgagcagctctggcgcgcgggaaaacgcgtgtatttaccggttctccatccgttcagccccggcaatttgctgtttctgcattatcatccgcaaagctcgctggtgatgaatcgtctgaaaattcaggaaccgaagctggacgtgcgcgacgtgctgccgctctctcagttagatgtgctggttacaccgttagtcgctttcgacgaagacggccagcgtctgggaatgggcggcgggttctacgacagaacgttgcagaactggcgacagcataagatccaaccggtgggttatgcgcacgattgtcagttagtggaaaagttgcctgtcgaagagtgggatatcccgctgcctgcggtggtgacgccgtcaaaagtgtgggagtggccgcagtga

SEQ ID NO: 72313 - DNA, 1233 bp, Citrobacter koseri
atggcaaaggtatcactggagaaagacaagattaaatttctgctggttgaaggtgtgcaccaaaaggcactcgaaaaccttcgcgcggcaggttataccaacatcgaatttcacaaaggcgctctggatactgagcagttgaaagagtccatccgtgatgcccatttcattggcctgcgatcccgaacccatctgaccgaagatgtgattgacgccgcagagaaactggtggcgattggatgtttctgcatcggcaccaaccaggttgatctgagcgcagcggcaaaacgcggaatccccgtgtttaacgcgccgttctccaacacgcgttctgttgcggagctggtgattggcgagctgctgctactgcttcgcggcgtgccggaagcgaacgcgaaagcgcaccgtggcgtgtggaacaaactggcggccggttcgtttgaagcgcgcggcaaaaagctggggatcattggttacggccacattggcacgcagttgggcattctggcggaatcgctgggcatgcacgtcttcttctacgatattgaaaacaaactgccgctgggcaacgcgacccaggtacagcatctttccgatctgctgaacatgagcgacgttgtgagcctgcatgtgccggaaaacgcctccaccaaaaacatgatgggcgcgacggaaatcgcactgatgaaaccgggcgcgctgctgatcaacgcgtctcgtggtacggtggtagacatcccggcgctgtgcgatgcgctggcgagcaaacacctggcgggcgcagctattgacgtgttcccgacggaacctgcgaccaacagcgatccgtttacttctccgctatgtgaattcgacaatgtgcttctgacgccgcatatcggcggctctacccaggaagcgcaggagaacatcggccttgaagtggcgggcaaactgacgaagtattctgataacggctctacgctatctgcggtgaacttcccggaagtctccctgccgctgcacggcggtcgtcgtctgatgcatatccatgaaaatcgtccgggcgtgctgaccgcgcttaaccagatttttgccgagcagggcgttaacatcgccgcgcagtatctgcaaacgtctgcccaggtcggttacgtggtgattgatatcgaagcggatgaagatgtggcggagaaagccctgctggcgatgaaagcgctaccgggtacgattcgcgctcgtctgctgtactaa

SEQ ID NO: 72314 - DNA, 660 bp, Citrobacter koseri
atgacgcaggatgaactgaaaaaagcagtaggatgggcggcacttcagtatgtacagcccggcaccattgtgggcgtaggtaccggttcaacagccgcgcactttattgatgcgctgggcacaatgaaaggtcagattgaaggggcggtgtccagctcggatgcatctactgaaaaactcaagagcctcggcattaccgttttcgatctgaacgaagtggacagcctgggcgtctatgttgatggcgcggatgagatcaacggccacatgcagatgattaaaggcggcggcgcggcgttgacgcgtgagaaaatcattgcttcggtggcgaagaaattcatctgcatcgcggatgcctccaaagaggtcgatattctgggtaaattcccgctgccggtggaagtgatcccgatggcgcgcagcgctgtcgcacgccagttagtgaagctgggcggtcgtcctgagtaccgtcagggcgtagtcactgataacggcaatgtgatcctcgacgtatacggcatggaaattcttgatccgatcgcgatggaaaacgcgattaacgccattccgggcgtcgtgaccgtcggcctgttcgccaaccgtggcgcggatgtggcgctgattggtacggcagacggcgtaaaaactatcgtaaaatga

SEQ ID NO: 72315 - DNA, 894 bp, Citrobacter koseri
atgaaacgtccagactacagaacactacaagcgctggatgcggtgattcgtgaacggggatttgaacgcgccgcacagaagttgtgcatcacacaatccgctgtctcacaacgcataaaacagcttgagaatatgtttgggcaaccgctgctggtacgaaccgttccgccgcgtcctaccgaacaaggacaaaaattgctggcgctgctgcgtcaggtagagctactggaagatgagtggcttggcgatgagcaaaccggctccacgccgctgctgctgtcactggcggtcaacgccgacagtctggcgacctggctgcttccggcgctggcgccggttctggccgactcgcctattcgcctcaatttgcaggtggaagatgaaacccgcacccaggaacgtctgcgtcgcggcgaagtggttggcgcggtgagtattcagcaccaggcgctgccaagctgcctggtagacaaacttggcgcgctcgactatctgttcgtgggatcaaaacccttcgccgagcgctacttccccaacggcgtcacccgttccgcgctgctgaaagcgcccgcagtggcgtttgaccatctggacgacatgcaccaggcctttttacagcagaacttcgatttaccgccgggcagcgtgccgtgccatatcgttaactcttccgaagccttcgtacagctcgcgcgtcagggcaccacctgctgtatgatcccgcatttgcagatcgagaaagagctggagagcggtgagctgatcgatttaacgcctggcctgttccagcgtcggatgctctactggcaccgttttgcgccggaaagccgtatgatgcgcaacgtgactgacgcgctgctggagtatggacataaggttttaagacaggattaa

SEQ ID NO: 72316 - DNA, 729 bp, Citrobacter koseri
gtgaagttcaaagtgatggcccttgcggcattagtcggatttagcgcaatcccggtacaggcaaatgagttgccgaatggaccgcacatcgtgacttccgggacggcaagcgtggatgcgacgcctgacatcgccaccctggcgattgaagtcaacgtgtcggctaaggatgccgcttccgccaagaaacaggccgatgagcgtgttgcgcaatacctttctttccttgaacaaaatcagattgccaagaaagacatcagctctgcaaacctgcgcactcagccggactatgactaccagaatggtaaaagtgtgctgaaaggctaccgcgcggtgcgaaccgttgaagttacgctgcgccagctggacaaactcaactctctgctggatggcgcgctgaaagcgggtctgaatgagatccgttcggtgtcattaggcgttgcgcaaccggatgcctataaagataaagcgcgtaaagcggcgattgacgacgcggttcaccaggctgagcaactggcagcgggctttaacagcaagctggggccggtttatagcgtgcgttaccacgtttctaattatcagccgagcccggtggtgcgaatgatgaaagcggacgcggcgcctgcggtgtcggcccaggaaacctatgagcagccgacaattcagtttgctgatcaggtcgatgtggtgttccagttagaaccagcagcagagacgaaagcgcagtaa

SEQ ID NO: 72317 - DNA, 594 bp, Citrobacter koseri
atgatcctgccgctcggcccgcagaatgcgtttgtgatgaatcaggggattcgtcggcagtatcacatcatgattgcgctgctttgcgcgatcagcgatttagtgcttatctgcgcaggcatctttggcggcagcgcattgctcatgcagtccccctggctgatggcgttagtgacctggggcggtgtggcgtttttattgtggtacggctttggcgcgttaaaaacggcaatgagcagcaacctggaactggccagcgccgaggtgatgaagcaggggcgctggaaaatcatcgccacgatgctggcggtgacgtggctgaatccgcacgtttatctggacactttcgtagtgctgggtagcctgggcgggcaactggatatggagccgaagcgttggttcgctttaggaactgttagcgcctctttcctgtggttcttcggtctggcgctgctggccgcctggctggcgccgcgactgcgtaccgccaaaacccagcgtatcatcaatactctggtagggctggtgatgtggtttatcgcttttcaactggcaaaagaaggggttgcacacgttcacgcattgttcaactaa

SEQ ID NO: 72318 - DNA, 858 bp, Citrobacter koseri
atggaagatttgaatgttgtcgacagcataaatggtgcgggcacctggctggtgcgcaaccaggagctgctgctgagttatgcggttaacatcgttgcggctatcgctatcatcatcatcgggatgatcgtggcgcgtattgtttccaataccgttaatcgcctgatgctggcgcgccatattgatgcgaccgtggctgacttcctgtctgcgctggtgcgttacggcattattgccttcacgctgattgccgctctggggcgcgttggcgtacaaacggcttccgttatcgctgtgttgggtgccgccggtttagcggtcggtctggccttacaaggctctttgtctaacctcgcggcaggcgtactgctggtgatgttccgtcctttccgcgcgggagaatatgtcgatctcggcggcgtcgcgggtacggtactgaacgtacaaattttttcgaccaccatgcgtaccgtggacggcaaaattgtggtgatcccgaatggcaagattattgccggaaatatcattaacttttcccgtgagccggtgcgtcgtaacgaatttatcattggcgtggcgtatgactctgatatcgaccaggtgaaaaaaatcctgaccgatattatccagtctgacgagcgtattctgaaagaccgtgaaatgacggtgcgcctgaatgagctgggcgcctcctccattaatttcgtggtgcgtgcatggagtaaaagcggcgatctgcaaaatgtttactgggatgtgctggaacgcattaaacgtgagttcgatgccgcaggcattagcttcccgtatccgcagatggacgtgaatttcaaacgagtgaaagagaacgcggaataa

SEQ ID NO: 72319 - DNA, 804 bp, Citrobacter koseri
gtgggaacgcagctctttttacgcacgacccgatcggtcagcctgacccttgccgggcagcacttgcttgagcattgccgtcagtggcttaactggctggatgcaatgccggacgagcttcagcagatcaacgcaggcgttgagcggcaggtgaatatcgttatcaataacctgctgtatcagccgcagaccacggcggacttactgacgtggttacatcaacagtttccgtttacccgttttcaaatttcccgtcaggtctacatgggcgtgtgggattcgcttttgtatgacgacttccagttagcgattggcgtaacgggctcggagtcgctctccaataacatctctctgctgccgctgggggatatcagctggcagtttgtggtggcgcagagtcatcctttggcgagccatcctgcaccggtattgtctgacgatatgctgcgccgttaccccgccattaatattgaagatacttcgcgaacgctgacgcgccgtgttgcctggttgctgagcggacaaaaggagatcaaggttccagatctcagcaccaagctggcctgccatttaagcggcctcggcgtcggttttttaccggagcgattgtgccgtccgtatgtcgagtccggggcgctggttgcccgctcagtggtcaatccacgccagccttcgccgctgtctatcgcctggaagaatgcgggcagcggaaaagtggtgagtgaaatcgccgacgtatttaagcagaagagtgcattagtgagcggatttatcagaatggtcgatcgacctgcggagtattaa

SEQ ID NO: 72320 - DNA, 873 bp, Citrobacter koseri
atgagcattatcaatcctctggcctgtgccggactttatcgacttcccgatggtgagtggccgttacacagccgcttctcgcaggcgattaacttttgccattccggtggcgagctgttgacgctgtttcgctatgggaaaggtatggggccgacgggcgtgttactgagcaccgcgcagttttcccgcgtggcccatgttgaacgactcatcaaacaggggaacaccctgtgggggcagggcataatgcttgaccctcatcgcatacttcgtgtgtcgctgagttctgctgctgtcgctcctgtcgatctctcattctgtacgcaacgcagcggcttctccggggcgttaaatcaaccgctgacggctatgccgcactatcctgaaataattaagcagcttgcatgctggcatcatggcatgatgccggactggcgctggcttatcgggtgcgggccaggactgacgcccagcggcgatgatatgctgacgggtatgcttgccgtgctgtatgccgccgggttttctgtgcggctggggcatttcttacctccggcggatcagcttgcgcaacttacaacatcggtaagttgcagttatctgaacagcgccagaatgggggagttttcaataccggtgctgaaggtgatgcgccgtttacagtcagggcgcgacccacagcccgcgattcagcgtttgctcgcggttggacacacttcaggcgccgatacattactggggatagcaatagcgcaacggtggttacagatggtcgactcaaggggaaggcatgctcgatcaggaaacaatacgcacatttattcgggttgcggagacggagagcttttcccgcgcggccagctcgctacataa

SEQ ID NO: 72321 - DNA, 1263 bp, Citrobacter koseri
atgtattcatctattgcacaggccaacgaagccattattgaacgaatcaaagcctcgcgcccacattgggttgcggtacgcccggcgaaagacgcggtggccgaattagcgtctggacgtaaattactgcacgccggcccgccgatcgcctgggaagagatgaccggcccgatgcgcggcgcctgtatcggcgcgtcgctgtttgaaggctgggcggccagcgaggaagaggccgtacgcatgctggaacaaggtgaggtggcgtttattccttgtcatcatgtgggcgcggtagggccgatgggcggtatcacctccgccagtatgccggtgctggtggtgcgtgacgtggtgcatggcaacttgtcctgctgcaaccttaatgaagggatcggcaaagtgatgcgtttcggcgcttacggcgatgacgtccagaaacgcctgcgctggatgcgtgatgtgctggcgccagtgttgcaggaagcgctctcgcggatggaaaacggcgtcgatctgacggcactgatggcgcaggcgatcactatgggggatgagttccaccagcgtaatattgccgcctcttctttgctgctgcgcacgttgtcgccggtgatcgccggactggatcgtccgaaggctgaaatcattgacgtgctgcaattcctcagtgtcaccgaccagttcttcctcaacctggcgatggcctacagtaaagcggtgatggatgcggcggcggaaattaaagccggatcggtcgttacggccatgacgcgtaacggtcgcgactttggtattcgcgtaagcggcaccggcgaccgttggtttaccgcgccggtgaacacgccgcaggggctgttttttaccggttacagtcaggccgatgcgaacccggatattggcgacagcgccatcacggaaacgctggggatcggcggcgcggcaatgattgccgcgcctggcgtaacgcgttttgtcggcgcaggcggtatgggggcggcgctggaaacgtcggaagagatggctgaaatctatctgtccagcaatccgctgttccagattccgtcctgggatttcaggggagcctgcctggggctggatattcgccgcgttgttgaaacggggatcacgccgctgattaataccggtattgcccatcgtgaagcgggaattgggcaggtgggggcgggaaccgtacgcgctccgctgctttgctttgaaaaagcgctggaagcgctggcggagttgcatcacatcacggcgtaa

SEQ ID NO: 72322 - DNA, 1662 bp, Citrobacter koseri
atgatttacgcctttattaaaaagggaagttttcaggactccgtcagcctgatgattatttcccgaaaactcagtgaacgcccggaagttgatcaggtctcggtgatgatgggcacgccagcgaataagtcgatgctggattcaaccaggttctggcatgacgattttgccgatgccacgccaaacgatatttgcgtggcggtgcgaaccgaaggcgaacagcccggcattctggatttgattcgtgagcaactggagaaagaactgaatgcgatgacgaatgcctcgggcagcgcgcaccagttgattaaagcgcgccgctgggagagcgcatgtcaaaaattaccccaggccaatctgctgttagtttccgttgccggggaatatgccgcatcggttgccagagaggggctgctggcgaataaaaacgtgatgctgttttccgataacgtgccgctggaacaggaagtcgagctgaaaacaatggcgcgcgagcgggggctgattgtgatggggcctgactgtggcacggcgatgattgccggaagtccgctggcgtttgccaacgtactgcctgaaggcgggattggcgtaattggcgcatcggggacggggattcaggaagtgacgtcgcagattgcgctgcatcagcagggaatcagccatgcaataggtctgggcgggcgcgacctgagcgcggaagtgggcggcatcagcgcgctgaccgcgcttgacatgctggctgcggatgacgccacgcgggtgattgcttttgtctccaaaccgccgtcgccgcaggtgcgaacccgcatcattgcggcaatgcaaaatgtggggaaaccggtggtcgcgttgttcctcgggcgtcaaccggaacagcgccgtgaaggtaacgtctggctggcgaactccttgtcggatgccgcccagctggcggtgctgctgatgcgcgtggcgcaacagcgacggattcagccggaagtggcagggaaaggtatttatggcctgtacgccgggggcacgctggcagccgaagccgccatgctgctctccgccgggctgggcgtccccgtcagcgaaagccacgatcagggcgtgatgctggaggctggcggccatcgcattgtcgacctcggtgatgacagttacaccctgggcagacctcatccgatgattgatccaacaacccgcagtattgaaatcgaaaaactgaccgcaatgtcggcggtgggcgtactgctgctggatgtggtgctgggctatggcgcttgtgccgacccggcgggagcggtcgttgaagcgatagagcaagtgcgcgccaaacgcgccgcgccgctggtggtgattgccaccctgaccggtactgatgtcgacccgcaggggcgcagcgggcaggcggaaaaacttcgcgaggccgggattgcggtggtggaaacgctggaagaagccgtcctgctcgccatcagtcttacacgtcatcaggagcgcggcataccgcaagcacatagcgcgtttcttgatggcgtgcaggtcatcaacgccgggttgcgcagcttcgcgctggatctgcaaagcagcggtacgccggttgtgcattatcagtgggcgcccgttgccggtggcaacgcccgtctcgccagtctactcaaacagttacattaa

SEQ ID NO: 72323 - DNA, 1224 bp, Citrobacter koseri
atgtctggatcatatgaagtgactgaggtcacgaataaaagaggaataccggcctggtgggtcaccgttttcctgttctggttagggtggatttttatgtacgctgaccgcacgatactcaatccggtaatgggagagctggaaaaagaatttggcttaagtggtacgcaattaggtattcttaattcagttttctatttttcttatgctttgcttcaggttccggcaggaattctgggcgataagattggcaaaaagaaagtgctggtgccggggtttattctttttggcgtattcaccgccgtcaccggttgggcgaaaagctggtatacgctgctgtttgcccgcgtggtaacgggagcgggagaagggacttactatggcccgcagtatggcttgtcttccgagcaaatccccaaaaaataccgctcgctgggcagcgcaatcatcaatagcgggatggccttcggtattgcgctgggcctgatgacctccagttggctggtgtacgaccaggggtattcgtggcgtatgccattttacgcgatggcgatcccctccgtgctggttgggattgcgatctggttgtttgtgaaagagaagaagcgcacggccgaagccgatggcaaaccggtaaaaaaagggaatttcagcgaccttctgaaaaaccgtaatttaattatcacctatattatggtgttctgtagcctgtttggtttcttcgttattctgacctggcttccctattatctgcaaagtgaacgtggcatcgcgggcagtgaaaccggatttatttcttcgctggtggcgtggatttcaattcctggcgcgctgttattctccagcttgtctgacaaactgggtaagcgtaaaccattaattatgttcctggtgcccgttgccattctcagcatgctgtcaattatctggatgccaaatatgaccggcgtcattatcgctctgtgcgtttatggccttgtcggaaaactggcgctggacccggtactggtcgctctggtggcggatagcgtcgatgaaaataattacagcacggcatttggtttatttaattttatcggcatgagttcatccattctggcacccattattgcaggcgcggcgcgtgatatcaccggaagtctggcttccagtttctatgtttcagccgcgctgctggctgtcggtttattcgccatgttgtttttaaaagaaaaacgcacataa

SEQ ID NO: 72324 - DNA, 906 bp, Citrobacter koseri
atgaaaaagaaaatcgttattgcccttggcggcaatgcgttattacagcgcggagaaattcttagcgcggaaaatcagcagcgtagcattcaggtattcgccagaatggcatccgtactggcccgggattatcaactggtgattgttcacggcaacggcccgcaggtgggtctgctggcgttacagaatgcggcctgtacagactcccccgcctggccgctggatattctggtcgccgaaagccagggaatgatcggttttgctatcgctcaggaactggcgtcatacaccggcggcgcgcccgttacaacgctgatgacccgcgtggcggtcgatccgcgggatgacgcctttgcaacgcccggtaagtatatcggcccggtatatcaaccggcgcagcaggcggagttggaagcacgctacggctggcagatgaaagccgatggcaactatattcgtcgggttgttccctctccaacgccattaaaaattctcgacagtgacgcaatacaaacgttgatagatgccggacatacggtaatttgctgcggtggcggcggcattccggttatcgcacaagacgagggataccagggagtcgaagcggtcattgataaagatttaacggcctcggtgctggcgcagtctctccacgccgatcatctgttgatcctgacggatgcggacgctgtgtatgagaactggggaacgccacaggcgcgcgcgctgcgccatgcaacggtagaagaactggcgccgtttgccgcccccgatggtgcgatgggccccaaagccgcagcggtgatgcagtttgttaaacagaccgggaacactgcgtttatcggcgcgctaaaagatgcgccacagattctggcgggggaaaaaggcacctgcgtgacgcggtaa

SEQ ID NO: 72325 - DNA, 1080 bp, Citrobacter koseri
atgtctaaaatttttgatttcgtaaaaccaggcgtaattactggtgatgacgtacagaaagtgttccaggtagcaaaagaaaacaactttgctttgccagcagttaactgcgtgggcaccgattccatcaacgccgttctggaaaccgctgcgaaagttaaagcgccggtcatcgtccagttctccaacggtggcgcttcctttatcgcgggtaaaggcgtgaaaaccgacgttcctcagggcgcggcaatcctgggcgctatctctggcgcgcatcacgttcaccagatggctgaacactacggtgttccggtaattctgcacaccgaccactgcgcgaagaaactgctgccgtggatcgacggtctgctggacgcgggtgaaaaacacttcgctgcgaccggtaagccgctgttctcttctcacatgatcgacctgtctgaagagtctctggaagagaacatcgaaatctgctccaaatacctggcgcgcatggccaaaatgggcatgactctggaaatcgaactgggttgcaccggtggtgaagaagacggcgtggacaacagccacatggacgcttctgcactgtacacccagccggaagacgttgattacgcatacactgagctgagcaaaatcagcccgcgtttcaccatcgcggcttccttcggtaacgtacacggtgtttacaaaccgggtaacgtggttctgaccccgaccatcctgcgcgactctcaggaatatgtttctaagaaacacaacctgccgcacaacagcctgaacttcgtattccacggtggttccggttctaccgctcaggaaatcaaagactccgtaagctacggcgtaatcaaaatgaacatcgataccgatacccaatgggcgacctgggaaggtgttctgaagtattacaaagataacgaagcgtatcttcagggtcagctgggcaacccgaaaggcgaagatcagccgaacaagaaatactacgatccgcgcgtatggctgcgtgctggccagacttccatgatcacgcgtctggaacaggctttcaaagaactgaacgcgattgacgttctgtaa

SEQ ID NO: 72326 - DNA, 1164 bp, Citrobacter koseri
atgtctgtaattaagatgaccgatctggatcttgctggtaaacgtgtttttatccgtgcggatctgaacgttccagttaaagaagggaaagtaaccagcgacgcgcgtattcgcgcttctctgccgaccatcgaactggccctgaaacagggtgcgaaagtgatggttacttcccacctgggtcgtcctaccgaaggcgagtacaacgaagaattctctctgctgccggttgttaactacctgaaagacaaactgtccaatccggttcgcctggtaaaagattacctggacggcgttgaagtggctgccggtgaactggtggttctggaaaacgttcgctttaacaaaggcgagaagaaagacgacgaagccctgtctaagaaatacgctgcgctgtgcgacgtattcgtgatggacgctttcggtaccgcgcaccgcgctcaggcttctacccacggtatcggtaaatttgccgacgtcgcttgcgcaggtccgctgctggcggcagaactggatgcgctgggtaaagcgctgaaagaaccggctcgcccgatggtggctatcgttggcggttctaaagtgtctaccaaactgaccgttctggactccctgtccaaaatcgctgaccagctgatcgttggcggcggcatcgcaaacaccttcgttgccgctcagggccacaatgtgggcaaatccctgtacgaagctgacctggttgacgaagcgaaacgtctgctgaccacctgtgatatcccggttccaactgacgtacgcgtagcaaccgagttctccgaaaccgctaccgcgaccctgaaatctgttaacgatatcaaagacgacgagcagattctggatctgggcgatacctccgctgagaaactggctgacatcctgaagaatgcgaaaactattctgtggaacggcccggttggcgtgttcgaattcccgaacttccgtaaaggcaccgaaattgttgccaacgcgatcgcagacagcgaagcgttctccatcgcaggcggcggcgacactctggcggcaatcgacctgttcggcattgctgacaaaatctcctacatctccactggcggtggcgcattcctcgaattcgtggaaggcaaagtgctgccagcagtagcaatgctcgaagagcgcgctaagaagtaa

SEQ ID NO: 72327 - DNA, 1020 bp, Citrobacter koseri
atgaccgtacgcgtagcgattaatggctttggtcgcatcgggcgtaacgtggttcgtgctttgtatgaatcaggacgccgggcggaaatcagcgtggtggcaatcaacgaacttgcggatgccgcgggcatggcgcatttgttgaaatatgacaccagccatggacgttttgcatgggatgttcgccaggagcgcgagcagctcatcgtcggcgacgacacgattcgcattttgcacgagcgaacgctggatgcgctgccctggcgcgaactgagtattgatgtcgtgctggattgcacgggcgtgtacggtaatcgtgaacacggcgaggcgcatcttgccgctggcgcgaaaaaagtgctcttttcacatcccggcagccacgatcttgacgccaccgtcgtgtttggcgtgaaccaggagcaattgcgtgcggaacaccgcatcgtatcgaatgcgtcctgtaccacgaattgcatcatccccgtcattaaattgttagatgatgcatacggcattgagtcgggaaccgtcacgacgatccactccgccatgcacgatcagcaggtgatcgacgcgtaccattccgatctgcgacgcacccgcgccgccagccagtcgattattccggttgataccaaactggcggcgggcattacgcgaattttcccgcagttcaacgaccgttttgaggcgattgcggtacgcgtaccgaccataaatgtgacggcgatcgacttaagcgtgacggtgaaaaagccggtaaaagccaatgaagtcaaccagttgctgcaaaaagcagcacatggggcatttcatggtatagttgactatacggaattgccgttggtctcgatagatttcaaccacgacccgcatagcgccatcgttgatggcacccagacacgggtcagtggcgcccacctgatcaagacattggtctggtgcgataatgaatggggctttgctaaccgaatgctcgacacgacgttagcgatggccgcagttggtttcaagtag

SEQ ID NO: 72328 - DNA, 711 bp, Citrobacter koseri
gtgaaaatatcgctccagattaatgggctgatgaccgacgcctggtatgatgacgatgaagtagaaaatgtccataaaccgctgttacggcatctggcaacattaaacgcgaaaacacctgagcgccgcaccgttatttttctgagcgccccgccaggaacaggaaagtcaacgctcaccactttctgggaatatctgtcgcgtaacgatccagaattaccgacgatccagacgctgccgatggatggcttccatcattataatcgctggctggatgagcatgaactgcgcgtcgctaaaggtgcgcctgaaacctttaacgttgaaaaactggcgagtaatttacgtcagctccatgagcagaatgcaacctggcctcaatatgatcgccagctgcatgaccctgtcgaaaatgccattcaggtgacggcgcctgtcgttattattgaaggaaactggctgttgtataacgcgccgtcctggcgcgagctacggcagtattgcgattattcactgtttatccgcgcgcctgccgatgtgctgcgcggccgtttaatcgcacgtaaacaggcaggagggctgagcgaagagcaggcgcagatattttttgaccgtaccgacgggcctaacgtttgtcgggtgctggaaaacagcttacctgcgagtcttacgttagagatgacggcaaagggcgagtatcgtcttgcatag

SEQ ID NO: 72329 - DNA, 510 bp, Citrobacter koseri
atgacgacgttgacagaagatgatgtacttgagcaactggacgctcaggataatttactttcgtttatggcaaccgcaaatgacatcctgttgcaggccatcaaaaattttctgccgtcattattcgtcaataacgatgaagaaatcgtcgaatatgcagtgaagccgttactggctcaaagcggcccgcttgatgacattgatgtggcaatacgtttgatttatgcgttgggaaaaatggataaatggctgtatgccgatgtgattcacttctctcagttttatcagtatttacgtgaacagcgtgaaatcccccgtttttctgatgatatcacctgggattttatgagtaacgtcaatagcataacgacgaatgccacactctacaattcgttgaaatcaatgaagtttgcagatttcgccatctattcagaaatacgttttgtcaccatgatcaaaaccgggctggctttagcggtaacgacgatattaagggaattaacaccgtga

SEQ ID NO: 72330 - DNA, 972 bp, Citrobacter koseri
atgatgtctctggcgtggccgctttttcggattacggaacaggcagcgcttgctgcctggccgcaaaccggatgcggcgataaaaacaaaatcgatggactggcggtgacagccatgcgtcagtcattaaatgaagtcgccatgcggggcaaaattgttatcggcgaaggcgaaatcgaccatgcaccgatgttgtatatcggtgaagaggtcggaaccgggactgggccgagcgtggatatcgccgtcgacccgattgagggaacgcgcatggtggcgatggggcagaataatgcgttgtccgtgatggcgctggcgccgcaggggagcctgctgcatgcgcctgacatgtatatgcgcaaactggtggttaaccgtcaggcgaaaggggcgattaacctcgcgttatcgctggaagagaacctgagtaatattgccgctgcgctgaataagccgctcacgtcgttgcgtatggcgacgctggataaaccgcgccatcaggcggttattcagcaggccgcgcggcttggcgtcaaggtgtttgccttgccggatggcgatgtcgccgccagcgtattaacctgccagcaacatcatccgttcgatgtgatgtacgctattggcggcgcgccggaaggggtgatatcagcctgcgccgtgaaggcgcttgatggtgatatgcaggctgagttgattgacttttgtcaggcgaaaggtgaaacggcggaacaccgattgatcgcgaacgatgagttacgccgctgtaagcaaatgggtgtcgcggtgaaccgggtttatacgctggatgaactcgtgggaagccaggatattctgttttcagcaacgggcgtaacgggaggcgatctgttacatggcgtgcagaaaacggaaaatggcgtcagtacgcaaacattactgatcggcggcatcgatcgaacgtgtaatataatagactctctgcattgctggtga

SEQ ID NO: 72331 - DNA, 1278 bp, Citrobacter koseri
atgaagaccaaagtcgctgctatttatggtaagcaggatgttcgcatccgcgagtttgaattgcctgaaattacagataatgaactgttagtgagtgtaatatcagacagcgtgtgtttatcgacatggaaagccgccacgttaggtagcgagcataaacgtgtgcctgatgatttagagaatcacccggttattactggtcatgagtgtgcaggtattattgttgaagtggggaaaaacctgaccgataaatataaaaagggacaacgttttgtgttgcaaccggcgatggggttgcccagcggatattcagcgggatatagctatgaatattttggcggcaatgcgacgtatatgattattcctgagctggcgattaacctcggctgtgttttaccgtatcacggctcttatttcgcggcggcgtcactggcagaacccatgtgctgtattatcggcgcatacaatgcgaactaccacacgacgccttatgtttatgagcaccgtatgggggtgaaacctggcggtaatattgcgcttctggcgtgtgccgggccgatggggatcggcgccattgattatgccatcaacggtggtatccagccttcgcgagtggtggtggtcgatattgatgaagcccgtctgtcacaagcgaaaaaactgctgccggtcgagctggcggcggcgaaggggattgagcttgtttatgtgaatacctgcggcatggaaaacccgacggcaaaactgcgtgcgctaacggaagatgcgggtttcgatgacgttttcgtttacgccgccgtcccggcggtggtggaaatggccgatacactgctggctgaagacggttgtctgaactttttcgcgggcccaacggataaagattttaaggttccgtttaacttctacaacgtgcattacaacagtacccatgttgtgggaacatccggcggttcgaccgatgacatgaaagaggccattgcgttgagcgccacagggcaactacagccttcatttatggtaacgcacattggcgggctggatgccgtcccggaaacggtgcttaacctgcccaatattccgggcgggaaaaaactcatttataacggtgtgactatgccgctgaccgctatcgccgattttgccgaaaaaggaaaaaccgacccgttattcaaagcgctggcgcgtctggttgaagagacgcacggcatctggaatgaaaacgcggagagatatttgctggcgcagtttggcgtagatattggggaggcggcggcatga

SEQ ID NO: 72332 - DNA, 1383 bp, Citrobacter koseri
atggaacacaagtctgctcgtgcaaaggtccaggcttttgggggctttttgactgcaatggtcattcccaatatcggcgcatttattgcctgggggtttattactgccttatttattccaaccggttggctaccgaatgaacatttcgccaaaatagttggccctatgatcacctatttgctgccagtaatgatcggttctactggcggccatctggtgggcgggaaacgaggcgcggtgatggggggaattggtacgattggcgtcattataggcgcggatattcctatgttcctcggctcaatgatcatggggccacttggtgggctggtgattaaacatatcgaccgactgctggacaagcgtattcccgctggctttgagatggtgattaataacttctctctggggattgccgggatgctcctgtgcctgctggggtttgaggtgattggcccggcagtgctcatcgcgaataattttgtgaaagagtgtattgaatcgctggtgcatgccggttatctgccgctgctgtcgcttattaacgaacccgcgaaaattctctttctgaataatgcgattgatcagggcgtctattacccgttagggatgcaacaggcgtcggagacggggaaatcgattttcttcatggtggcctctaaccctggcccgggattagggctgctgctgggctttaccttctttggccgtggtatgagcaaaaagtccgcgccgggagcgatgatcatccacttcctgggggggattcacgagctgtacttcccgtatgtactgatgaaaccgttaacgctgattgcgatgatcgctggcgggatgacgggaacctgggtgtttaatctgttaggcggtggactggttgcaggcccaagtccgggttcgattttcgcgtaccttgcgctgacgccgaaaggatctttcctggctacgatcgcgggtgtaacggcgggaacgctggtgaccttcatcgtgacttcgatcatcctgaaaatggaaaagagcgttgaaacggagaatgaagaagaccatttcgcagggtctgcgaaagccgtgaaagcaatgaaacaggaaggcgcattttcttataagaatattaaacgtatcgcttttgtctgcgatgccggaatgggttccagcgcgatgggagcaacgacattccgtaagcgtctggagaaagccggtctggtgattgcggtggctcatcatgctatcgaaaatgttcctgatgacgccgatattatcgtgacgcatgccagccttgagggccgcgttaagcgtgtgagtaataagcccacggtgttaattaaaaattacatcggtgacccactgctggatgaattatttaaaaaactcatcgcggattag

SEQ ID NO: 72333 - DNA, 441 bp, Citrobacter koseri
atgcggctgattgattatttccctgaatcgtcaatagcaataaaaaatgcagcgactgactggcgcgaagcaattgatttttccatgtcctctctgctttctcatgattatgttaactcacggtatattcaggccattaaagagtccacattaaccaatggaccttattatattctggcgccaggcgtcgcaatgccgcatgcgcgtcctgaatgtggtgctttaaaaacggggatgtcgttaacactcctccggcaagaagtgaagtttacagaagatgatccgatcaaactattaatcggtttatccgccgcagatgcggactctcacattggcgctattcaggcgttaagtgaattattatgtgaagatgaaattcttactgagttgttaacagcgacatctgaaaaacagctagcggatattattgctcgcgcataa

SEQ ID NO: 72334 - DNA, 1992 bp, Citrobacter koseri
atgtcctcacgtaaagagcttgccaatgctattcgtgcgctgagcatggacgcagtacagaaagccaaatccggtcacccgggtgcccctatgggtatggctgacattgccgaagtcctgtggcgtgatttcctgaaccacaacccgcagaacccttcctgggctgaccgtgaccgcttcgtgctgtctaacggccacggctccatgctgatctacagcctgctgcacctcaccggctatgacctgccgatgtctgagctgcaaaacttccgtcagctgcactccaaaacgccgggccacccggaagtgggttacaccgcaggtgttgaaaccaccaccggcccgctgggtcaggggattgcgaacgcggtcggtatggcgattgcggaaaaaacactggcggcgcagttcaaccgtccaggccacgatatcgtggatcacttcacctatgccttcatgggcgatggctgcatgatggaaggtatctcccatgaagtctgctctctggcaggaacgctgaagctgggcaaactgatcgcgttctacgatgacaacggtatctctatcgatggtcacgttgaaggctggttcactgatgacaccgctaaacgtttcgaagcctacggctggcacgttgtgcgcggtatcgacggtcacgatgctgaagcgattaaacgcgcggttgaagaagcgcgcgctgttactgacaaaccgtccctgctgatgtgcaaaaccatcatcggtttcggttccccgaacaaagcgggtacgcacgactctcacggcgcgccgctgggcgatgctgaaatcgcactgacccgcgaacagctgggctggaaatacgcgccgttcgaaatcccgtctgaaatctacgcgcagtgggatgcgaaagaagccggtcaggcaaaagaagcggcctggaatgagaaattcgccgcctatgcaaaagccttcccgcaggaagccgctgaatttacccgtcgtatgaaaggcgaaatgccgtctgacttcgacgcgaaagcgaatgaatttatcgctaagttgcaggctaatccggcgaaaatcgccagccgtaaagcgtctcagaatgcgattgaagcgttcgggccgctgctgcctgagttcctcggcggttccgctgacctggcgccaagcaacctgaccctgtggtcgggttctaaagccatcaacgaagatgctgcgggtaactacatccattacggcgtgcgcgagttcggtatgaccgccatcgctaacggcatctccctgcacggtggtttcctgccgtacacctctaccttcctgatgttcgtggaatatgcccgtaacgcggtgcgtatggctgcgctgatgaaacagcgtcaggtgatggtctacacccacgactccatcggtctgggcgaagatggcccgactcaccagccggtagagcaggtggcttctctgcgcgtaacgccgaacatgagcacctggcgtccgtgtgaccaggttgaatccgcagtggcgtggaaatacggcgttgagcgtcaggacggcccgaccgcgctgatcctctcccgtcagaatctggcgcagcaggaacgtaccgaagagcagctggcgaacatcgcgcgcggtggttatgtgctgaaagattgcgccggtcagccggaactgatcttcatcgcaaccggttctgaagttgagctggccgttgccgcatgggacaaactgtctgccgaaggcgtgaaagcgcgcgtggtctccatgccgtctaccgacgcgttcgacaagcaggatgccgcttaccgtgaagccgtactgccgaaagcggtttccgctcgcgtggcagtggaagcgggtatcgctgactactggttcaaatacgtgggcctgaatggcgctatcgtcggcatgaccactttcggtgagtctgcgcctgctgagctgctgttcgaagagttcggctttaccgttgataacgttgtcgcgaaagcaaaagaactgctgtaa

SEQ ID NO: 72335 - DNA, 759 bp, Citrobacter koseri
atgaaaattcgcgctttactgcttgctatgagcatggcgacggttctgaccggttgccagaatatggactccaatggactgctcgcttcaggtgcaggcgcttttcaggcttacagcctcagtgatgagcaagtaaaagcgctcagcgaccaggcatgtacggaaatggacagcaaggcgacgatcgccccggctagcagcgaatacgcgaagcgactgaccaaaatcgcctctgcgctcggcgacaatatcaacggccagccggtgaattacaaagtctatgtggcgaaagacgttaacgcgtttgcaatggcgaacggctgtatccgcgtctatagcggcctgatggacatcatgaccgataacgaagtggaggcggtcatcggccacgaaatgggacacgttgcgctcggccatgtgaagaaagggatgcaggttgcgctggggactaacgcggttcgcgccgcagccgcttccgctggcggtattgtcggcagtctgtcgcagtcgcagttgggcgatcttggcgagaaactggtgaactcacagttctcccagcgccaggagtccgaagcggatgattactcctatgatttgttgcgcaaacgcggcatcagtccggctggtctggcaaccagttttgagaaactggcgaaactggaagcgggacgtcaaagctccatgtttgacgatcacccggcctccgccgaacgtgcccagcatattcgcgaccgaatggcggcagacggtattaaataa

SEQ ID NO: 72336 - DNA, 516 bp, Citrobacter koseri
atggggggggggaattaccatttgaacgctattctgtctgccgggagaatatttagccaggaagattgtttccgttcacctgatgttcaacattactctgaaaactcagtactcgtgaacgtgcaagggaggctcgccgccgcctcccttgcaacccaggctctccggcaaggaaaatcgccgctgcgcggttcattcgccttattccgtctgcctttcgggtcggggccgagcctgcgtcccggcaggccgtcccctccgcccgcgtccctgcgggcggacccggtcagccgtcaacgtctcatcgattttcagccggaacaggggcattgctgtaatgccctgattttcagttgcaccggttttgctgttaaaaaaacaaaccgtggaaatggtcaggtgtgggcgggtccggctgaaaattgccgacgtgtttccgtaaggccggaggaacccgcatggatgcgggttcagggcgcgttttgcagggacgctacctcgcgcccgccccggtag

SEQ ID NO: 72337 - DNA, 1269 bp, Citrobacter koseri
gtgaaaaaagaaatatcgttaatcgcattaagtttattcgccgcattgcctgccattgccagccaacaatccgacagccagggttttgttaatgacagccatttaaatctctttttacgtaacgcctggattaaccgcgactatcagggcggcgtacaggacaaagccgaatggggccagggcattgtcgccacctttgaatccggctataccgaaggtctgatcggctttggcgttgacggtattgcgcagtatggcgtgcgtctggacggcggccgtggccgcagtggcgcaggcggtatcgacttcttcaaacaagacagcgacggccgcgcgaaatccgatctggcaaaatttggcgcaaccgccaaaatgcgcatctccaacaccgtcctgagctacggcaaccagcgtccgcagctcccgatcgtctacgccgacgattcccgtctgctgtttgaaagcttcaccggcaccatgttgacctccagagagatcgacggtctggagattaatgctggttacttcaccgacgagcagcgcaaaagcgatgatcgccacaacagcggcctgaaaagcctctctttcggcggcgcgagctaccagtttaacgatcagttcagcggcgctctgtatgcctcgcacgtcgaagatgtgctgaacaaacagtatctggggctgaacttcaaacagcctttcagcaccggacagcagctggtgctggactttaacggctacaactcacgtctggattccggttacgccgatagcctgaatactggccgcagcaacagcatctggagcctggcggcaagttatatctgggatattcatacctttaaagtggcgtatcagcaaagcagcggcagcaccggttatcactacggcagctatcgcgatcagggcggcgtcggcgatggcggcaacaccatctggctggcgaactcttactggtctgattttaacggtgaagacgaacgttcctggcaggcgtcatatggactggattttgccggtctcggtttaccggggctgagctggacaaccgcttatgttcgcggcgataacatcaaaacatcggcaaccagcaacggcaaagagcacgagtggttcaaccaggtgcaataccaggttcaggacggcatggcaaaagacctgaaactgaagctgcgctattccgtattacgcgtgtccagcaacgccagcgactataacgtcagcggcaacgagattcgcgcttacgtggaatatccgtttaacatcttttaa

SEQ ID NO: 72338 - DNA, 921 bp, Citrobacter koseri
atgagcactttaggtcatcagtacgataactccctggtttccaacgcctttggctttctgcgtctgccgctgaatttccagccttatgacagcgacgccgactgggttatcaccggcgtaccgtttgatatggcgacttccggtcgtgcgggcggccgccacggcccggcggcaatccgtcaggtttccactaacctggcctgggagcacaaccgcttcccgtggaacttcgacatgcgcgagcgcctgaacgttgtggactgcggtgacctggtctatgcgtttggcgacgcgcgcgagatgagtgaaaaattgcaggcgcatgcggagaaactgctgtcagccggtaaacgtatgctctccttcggcggcgaccacttcgtgaccctgccgctgctgcgcgctcatgcaaagcactttggcaaaatggcgctggtgcattttgacgcgcataccgacacctacgcgaacggctgcgagtttgaccacggcaccatgttctacactgcgccgaaagaggggttgattgacccgaaccactccgtgcagattggtattcgtactgaatttgataaagacaacggtttcaccgtgctggatgcctgccaggtgaacgatcgcggcgtggatgacatcatcgcgcaggttaatcagatcgttggcgatatgccggtctacctgacctttgatatcgactgtctggaccctgcgttcgcaccgggcacagggacaccggtgatcggcggcctgacttccgatcgcgccattaaactggtgcgcggtctgaaagatctgaacatcgtcgggatggatgtggtggaagtggctccggcttatgaccagtccgaaatcaccgcgctggctgcggcgaccctggcgctggaaatgctctacattcaggcggcgaaaaaaggcgaataa

SEQ ID NO: 72339 - DNA, 1977 bp, Citrobacter koseri
atgtctgacgacatgtctatgggttcgccttcgtcagcaggcgaacagggtgtactacgctccatgcaggaggttgcaatgagctcccaggaagccagcaagatgctgcgtacttacaatattgcctggtggggcaataactactacgacgtcaacgaactgggacacatcagcgtgtgcccggaccctgacgtacctcaggcgcgcgtcgatctcgccaaactggtgaaagctcgcgaagcgcaaggccagcgtctgcctgcgttgttctgcttcccgcagatcctgcaacaccgtctgcgctccattaacgcggcgtttaaacgcgcgcgtgaatcctacggttataacggcgactacttcctcgtttatccgatcaaggtcaaccagcaccgtcgggtgattgaatcgctgattcactccggcgaaccgctggggctggaagccggttcgaaggcggagctgatggcggttctggcgcacgccggaatgacccgcagcgtgatcgtctgtaacggctacaaagaccgtgaatacatccgtctggcgctgattggcgaaaagatgggccacaaggtctacctggtcatcgagaagatgtcagaaatcgctatcgtgctggatgaagccgagcgtctgaacgtgatcccgcgcttgggcgtgcgtgcgcgtctggcctcgcagggttccggtaaatggcagtcttccggcggcgaaaaatccaaattcggcctggcggcgacgcaggtgctgcaactggttgaaaccctgcgtgaagccgggcgactggacagcctgcaactgctgcatttccacctcggctcgcagatggcgaatatccgcgacattgccaccggtgtgcgcgaatccgcccgtttctacgttgaattgcataaactgggcgtcaacattcagtgtttcgacgtcggcggcggtctgggcgtggattacgaaggaacccgctcgcagtctgattgctccgttaactacggcctgaacgaatacgccaacaacatcatctgggcgattggcgacgcgtgtgaagaacacggtctgccgcacccaacggtgatcaccgagtctggccgtgcggtaactgcgcaccataccgtgctggtatcgaacatcatcggcgtggagcgtaacgaatataccgtgcccaccgcgcctgccgacgacgcgccgcgcgcgttgcagagcatgtgggaaacctggcaggagatgcacgagccgggcacccgccgctcgctgcgtgaatggctgcacgacagccagatggacctgcacgacattcacattggctactcttccgggacgttcagtttgcaggaacgcgcctgggcggaacagctttacctgagcatgtgccacgaagtacagaaacagctggacccgcagaaccgtgcgcatcgtccgatcatcgatgagttgcaggagcgtatggcggacaaaatgtacgtcaacttctcgctgttccagtcaatgccggatgcgtggggtatcgatcaactgttcccggtgctgccgctggaagggctggatcaggtgcctgagcgtcgcgcggtgctgctggatatcacctgtgattccgatggcgcgatcgatcactacatcgacggtgacggcatcgccaccactatgccgatgccggagtacgatccagagaacccgccgatgctcggtttctttatggtcggcgcctatcaggagatccttggcaacatgcacaacctgttcggcgacaccgaagcggttgacgtgtttgtcttcccggatggcagcgtggaagttgagctgtctgacgaaggggacaccgtggcggatatgctgcaatacgtacagctcgatccgaacacgctgctgacccacttccgcgatcaggtgaagcagaccggtctggacgatgcgctgcaacagcagttcctcgaagagtttgagacggggctgtacgggtacacttacctggaagacgagtag

SEQ ID NO: 72340 - DNA, 1155 bp, Citrobacter koseri
atggcaaaacacctttttacgtccgagtccgtatcagaagggcatcctgacaaaattgctgaccaaatctctgatgccgtgctggatgcgatcctggaacaggatccgaaagcgcgcgtcgcatgcgaaacctacgttaaaaccggtatggttttagttggcggtgagatcacgaccagcgcatgggttgatatcgaagagatcacccgtaacacggtccgtgagattggctatgtgcattccgacatgggctttgacgccaactcttgcgccgtactgagcgctatcggcaaacagtccccggatatcaaccagggcgttgaccgtgccgatccgctggaacagggcgcgggcgaccagggcctgatgttcggttacgcgaccaatgaaactgacgtgctgatgccagcgccgatcacctacgcgcaccgtctggtacagcgtcaggctgaagtgcgtaaaaacggcacgctgccgtggctgcgcccggatgcgaaaagccaggtcactttccagtatgacgacggcaaaattgtcggcatcgacgcggtcgtgctgtctactcagcacgctgaagaaattgaccagaaatcgcttcaggaagcggtgatggaagagatcatcaagccgatcctgccgtcagaatggctgaatgcgtcgacgaaattcttcatcaacccaaccggtcgttttgttatcggcggcccgatgggcgactgcggtctgaccggtcgtaagattatcgtggatacctacggcggtatggcgcgtcacggcggcggcgcattctccggtaaggacccgtctaaggttgaccgttccgcagcctacgccgcgcgttatgttgcgaaaaacatcgttgccgcaggtctggctgaccgttgtgaaattcaggtttcttacgctatcggcgtggctgaaccgacctctatcatggttgaaaccttcggtactgaaaaagtgccttctgaacagctgaccctgctggtacgcgagttcttcgacctgcgtccgtacggcctgattcagatgctggatctgctgcacccgatctacaaagaaaccgctgcatacggtcactttggccgcgaacatttcccgtgggaaaaaaccgacaaagcgcagctgctgcgtgatgccgcaggtctgaagtaa

SEQ ID NO: 72341 - DNA, 1395 bp, Citrobacter koseri
atgcctgacaataaaaaacaggggcgttcaaacaaggccatgacattttttgtctgctttcttgcagccctggcaggattactttttggcctggatatcggcgttatcgccggtgctttacccttcatcactgacgaattccagattaccgcgcacactcaggagtgggtggtcagttcgatgatgttcggcgccgccgtcggtgccgtcggcagcggctggctctccttcaaattaggtcgtaagaaaagcctgatgatcggcgcgatcctgtttgtggccggttcgctgttttccgccgccgcgcctaacgttgaggtgctgatcgtttcccgcgttctgttaggcctggccgttggcgtcgcgtcctacaccgccccgttgtacctgtctgagatcgcgccggagaaaattcgcggcagtatgatctccatgtaccagttgatgatcaccatcggtattcttggcgcctatctgtctgataccgcgttcagctacagcggcgcatggcgctggatgctgggcgtgatcatcattccggccattctgctgctgatcggcgtgttcttcctgccggacagcccgcgctggttcgcagcgaaacgtcgctttattgatgccgaacgcgtactgctgcgcctgcgtgataccagcgcagaagccaaacgcgagctggatgagatccgtgaaagtctgcaagtaaaacagagcggctgggcgctgtttaaagagaacagcaacttccgtcgcgcggtgttcctcggggtgcttttgcaggtgatgcaacagttcaccgggatgaacgtcatcatgtactacgcgccgaaaatctttgaactggcaggttataccaataccaccgagcagatgtggggcaccgttatcgttggtctgacgaacgtgctggccacctttatcgctatcggtctggtagaccgctgggggcgtaaaccaacgctgacgctgggcttcctggtcatggctatcggcatgggcactctcggcaccatgatgcatatcggcattcactcgccgtcagcgcaatacttcgccatcgccatgctgctgatgtttatcatcgggttcgcgatgagcgccggcccgctgatttgggtactgtgctctgaaattcagccgctgaaaggccgcgatttcggtatcacctgctctaccgccaccaactggatcgccaatatgatcgtcggcgcaacgttcctgaccatgctcaacacgctgggcaacgcaaacaccttctgggtctatgccggtctgaacctgttcttcatcatcctgaccatctggctggttcctgaaaccaaacacgtctctctggaacacattgagcgtaacctgatgaaaggccgtaagctgcgcgaaatcggcgctcacaactaa

SEQ ID NO: 72342 - DNA, 498 bp, Citrobacter koseri
atgaaaacctcccgtctccctatcgctgtccagcaagccgttatgcgcagcctgcgggaaaaactcgcccaggccaatctcaaactggaacgtcattacccggaacccaggctggtttatcaacaacgtggaactgccgcgggaacagcatggctacaaacctacgaaatccgtctcaatcctgtgctattgatggaaaacgtcgacgcgttcgtcaatgaagtggtgccgcacgaactggcgcatttgctggtctggaagcattttggccgggttgcgccgcacggcaaagagtggaaatggatgatggaaagcgtactgggcgtccctgccagacgcacgcatcagtttgaactgcaatccgttcgccgcaatacctttacctaccgctgtaaatgccagcagcatcagctcaccgtgcgccgccataatcgcatcgtgcgcggtgaagccacctaccgctgcgttcactgcggcgaaccgcttgttgctgaataa

SEQ ID NO: 72343 - DNA, 708 bp, Citrobacter koseri
atgtaccgtaatttctcttttgccgcagcgttgttggcgatgatgctctcagggcaggtgctggctacaggcatcaacagtttttctcaggccaaaaccgccggggtcaaagtcaatgccgatgttcccggcgatttctactgcgggtgtaaaattaactggcagggtaaaaaaggcgtcgtggatctcgcctcctgcggctataaagtccgaaaaaatgaaaaccgcgccagccgcattgaatgggaacacgtcgtacccgcctggcagttcggccaccagcgtcagtgctggcaggacggcgggcgaaaaaactgtgcgaaagatcctgtctaccgccagatggagagcgacatgcacaatctgcaacccgccgtcggcgaggtgaatggcgatcgcggcaacttcatgtacagccagtggaatggcggcgaaggtcagtacggccagtgcgccatgaaggtcaatttcaaggaaaaaatcgccgaaccgcctgctcgcgcccgtggtgcgatcgcccgtacctacttttatatgcgcgaccagtacaatctgacgctctcccgtcagcaaacgcagcttttcaacgcctggaacaagctgtatccggtcacggactgggagtgcgagcgcgacgaacgcatcgccagggtacaagggaaccacaatccatacgtgcaacgcgcttgccaggcgcaaaagagctaa

SEQ ID NO: 72344 - DNA, 732 bp, Citrobacter koseri
atgcgcattccccgcatttatcaccctgaacccatcacatccggcagccagttctccctgtgtgaagacgccgccaaccatatcggacgcgtgctgcgtatggggccaggccaggcgctccagctgtttgacggcagcaatcaggtgtttgacgccgagataaccaacgccagcaaaaaaagcgtcgatgtaaaagtgctcagcggcaccctcgacgatcgtgaatccccgctgcatattcacctcggccaggtgatgtcgcgcggcgaaaaaatggaattcactatccagaaatcgatcgaactgggggtaagcctcattacgccacttttttctgagcgctgcggcgttaaactggacagcgaacgtctgaacaagaagcgccagcagtggcaaaaaatcgctattgccgcctgcgaacagtgcggtcgtaaccgggtgccggaaattcgcccggcaatggatctggaagcctggtgcgccgaacaggacgaggggctgaaactgaaccttcacccgcgcgccagcgccagtatcaacaccctgccgctccccgtggagcgcgtacgcctgttgattggcccggaaggcggtttgtcggcagatgaaatcgccatgaccgcccgctaccagtttactgatatcctgttaggacctcgcgttctgcgtactgagacaactgcgctcaccgccattaccgcgctacaggtgcgttttggcgatctgggctaa

SEQ ID NO: 72345 - DNA, 948 bp, Citrobacter koseri
atgatcaagctcggcatcgtgatggaccccatcgcaagcatcaacatcaagaaagattccagcttcgctatgctgctggaagcacaacgtcgtggctacgaacttcattacatggagatggccgatctgtatttgatcaacggtgaggctcgcgcacgcacgcgtaccctgagcgtagagcagaactatgacaactggtatacgttcaacgacgagcaggatctgccgctggccgatctggacgtcatcctgatgcgtaaagatccgccgttcgataccgaatttatctacgccacttatattctggagcgcgcggaagagaaaggcgcgctgatcgtcaataagccccagagcctgcgtgactgcaacgaaaaactgttcaccgcctggttctccgacctgacgccggaaacactggtcacgcgcaacaaagcgcagctgaaagccttctggcagaagcacagcgacatcattctcaagccgctggacggcatgggcggcgcgtctatcttccgcgtgaaggaaggcgaccccaacctcggcgtgatcgccgaaacgctgaccgagcatggcacccgctattgcatggcgcagaactatctgcctgccattaaagacggcgacaaacgcgtgctggttgttgacggcgaacccgttccgtactgcctggcgcggattccgcagggcggcgagacccgtggcaacctggcggccggtggtcgcggcgaaccgcgcccgcttaccgacagcgactgggaaatcgcccgccgcattggcccaaccctgaaagcgaaagggctgatttttgtgggtctggatatcatcggcgatcgtctgacggaaattaacgtcaccagcccaacctgtattcgtgaaattgaagcggagttcccggtttcgattaccggaatgctgatggatgccattgaggcgcgtttgcagaagtaa

SEQ ID NO: 72346 - DNA, 591 bp, Citrobacter koseri
ttgaacccggatacagaacctctgacaatgaatttacagcatcactttcttattgccatgcctgctctccaggacccaattttccgccgctccgtggtgtacatttgcgaacacaatgaagatggcgcaatggggattatcattaataagcctctggaaaatctacagattgaagggattctggaaaaactgaagattacgcctgaaccgcgcgatccggcgattcgtctggataaagccgtaatgctcggcggaccgctggcggaagatcggggatttattttacatactccgccctcccgcttttcgtccagtattcgtatttctgacaatacggtgatcaccacgtcccgcgacgtgctggagacgttaggcacaccggagcaaccctctgaggtgctggtggcgctgggttattcatcatgggataaaggtcaactggagcaagagctgatggataatgcctggctcacggcccctgccgatctcaatattctgttcaaaacgccgattgccgaccgctggcgcgacgcagccaaattaatcggaattgatattctgaccatgcctggcgtggcggggcatgcctga

SEQ ID NO: 72347 - DNA, 417 bp, Citrobacter koseri
atgagcggaaccttactcgcatttgatttcggcaccaaaagtatcggcgtagcaataggacagcgcatcaccggcaccgcccgcgcgctgccagcgataaaagcgcaggacggaacgccagactggagcattatcgagcgtttgctgaaagagtggcagccggatgaaattattgtcgggctaccgctcaatatggatggtacagagcagcccctcaccgctcgcgcccgcaagttcgccaaccgcattcatggccgttttggcgtactggttacgctgcatgacgaacgcctcagcaccgtagaagcgcgctctggcctgtttgaacagggcggttatcgcgcactcaacaaaggcaaagtggattccgcctcggccgtcatcatcctcgaaagctatttcgagcagggttactga

SEQ ID NO: 72348 - DNA, 981 bp, Citrobacter koseri
atggatatggaagaaatagtggcccttagtgtaaagcataacgtctcggatctacacctgtgcaacgcatggcctgcgcgctggcgtaaacggggaaaagtggaaatagccccgtttagcagcccgaatgtcgaggttttgctgtcacaatggcttaacgacgcgcagcgccgggcgtggcaggcggatggtcagctcgattttgcggtgtcgctgccgggcgaactgcggttacgcgccagcgcttttcatcacgagcagggcgcatcgctggcgctgcggttgctgcccactacgtgcccgcaactggacgcgctccagacgcctgccgcgctacccgcgctccttggcggcgagaacggactgattctggtgaccggggcgacgggaagcgggaaatccaccacgctggcggcaatggtggaatacctcaaccagcatctcgatggtcatattctgacgctggaagatcctattgagtaccgccataccagccagcgctgcctgattcagcagagggaggttggcgtacactgccgctcctttgccgccgggttacgcgctgcactgcgtgaagacccggatgtgattttattaggcgaactgcgcgacagtgagaccattcgcctggcgctgacggcggcggaaacggggcatctggttctggcgacgctacatacgcgcggcgcggcacaggcggtagagcggctggttgactcctttccggggcaggagaaagatccggtacgcagtcaacttgcgggcagcctgcgcgccgtgttgtcgcagaagctggaaaccgacaggcaggacggacgcgtggcgttattcgaactgctcatcaacacgccagcggttggcaatcttattcgggaggggaaaatccaccagttgcccggcgttattcagaccagccaacaggcggggatgcagacgtttgcccagagtcagcaacagcggcaggcgcagggcaggctttag

SEQ ID NO: 72349 - DNA, 705 bp, Citrobacter koseri
atgaacgatatcgcgcataacctggcacatgtccgggacaaaatctcagccgccgcgacgcgttgcgggcggtcttcagaagaagttacgctgcttgcagtgagtaaaaccaagcctgcgagcgccatcgcagaagccatcgcggtcgggcagcgggcgtttggcgaaaactatgttcaggaaggggtagagaaaattcgccacttcaaagaaagcggcgtcgaagggctgcaatggcactttattggccccttgcagtccaacaaaagtcgtctggtggcagagcattttgactggtgccatacgatcgatcgtctgcgtatcgccgcccgtctgagcgaacagcgcccggcaggtctgccgccgctgaacgtgctgattcaaattaatatcagcgatgagaacagcaagtccgggattccgcttacggaactggacgctctggcggcaagcgtggttgagcttcccggtatcaggctgcgcggactgatggcgatccccgcccctgagtcagattatgtaaggcagtttgaagttgcacgccaaatggctgtagcatttgccgggctgaaaacgcgctatcctggcgttgataccctttctctgggtatgtcggatgatatggacgccgcaattgcggcaggtagcacgatggtgcgcatcggcaccgctatttttggtgcgcgtgattacacaaaaaattaa

SEQ ID NO: 72350 - DNA, 567 bp, Citrobacter koseri
atgaagacgttgaccttcctgctctcaacggtaattgaactgtataccatggtgctattgttgcgcgtatggatgcagtgggctcgctgtgatttttacaaccctttctcacagtttgtggtgaaagcgactcaacccattatcgggccgctgcgtcgtattattccgccaatggggccgattgatagcgcctccatgctgttggcatttattctgagctttatcaaagcgatagtgcttttcatggtcgtgacgttccagccgattatctggatcgccgccatacttatcgtcctgaaaaccatcggcctgctgattttctgggtactgctggtgatggcgatcatgagctgggtgagccagggccgcagcccgattgaatacgttctgcttcaactggcggaccctttgctgcgcccgattcgtcgtctgctcccttcgatgggcggcatcgacttctcgccgatgatcctggttctgctgctgtatgttatcaacatgggcatcgctgaagtcttacaggcgacaggcaatatgctgctgccggggctgtggatggcgctatga

SEQ ID NO: 72351 - DNA, 291 bp, Citrobacter koseri
atgagtgccgttacaccctgcgctgacggtctgattttacggctctatattcagccaaaagccagccgtgacagtattgtgggtttacatggcgacgaagtgaaagtcgccattaccgccccgccggttgatggccaggccaacagccatctggtgaagtttcttggcaaacaattccgcgtggcgaaaagccaggtcgtcattgaaaagggcgaactgggccgccacaaacaggttaaaatcattcatccgcaacagatcccgccagaaatcgcggcgttaactgattag

SEQ ID NO: 72352 - DNA, 594 bp, Citrobacter koseri
atgcaaaaagttgtcctcgctaccggcaatgccggtaaagtgcgtgagcttgcctcactgttgagcgattttgggcttgatgtcatcgcgcaaaccgaactgggcgttgattcagccgaagagaccggtctgacgttcattgaaaatgcgatcctgaaagcgcgtcatgccgcaaaagctaccggtctgcccgccattgccgacgactccggcctggccgttgatgcgctgggcggcgcgccgggtatttactccgcccgttattccggcgaagacgccaccgaccagcgtaatctggaaaaactgctgcataccctgcaggaggtgccggatgagaagcgccaggcgcgtttccactgcgtgctggtctacatgcgccatgcagaagacccgacgccgctggtgtgccacggaagctggccaggaatgattacccgcgaagcggcgggcaatggcggtttcggctatgaccctattttctttgttccgtctgaaggtaaaacggcagctgagttaacccgtgaagaaaaaagcgcgatctcccaccgtgggcaggcgctgaagctgctgctggacgccttacgcaatggttaa

SEQ ID NO: 72353 - DNA, 1137 bp, Citrobacter koseri
atggttaagctgccgccgctgagtctttatattcacatcccgtggtgcgtgcagaaatgcccgtactgcgatttcaactcgcatgcgctgaaaggcgaagtgccgcacgatgattatgttcagcacctgctgagcgatctcgataccaacgtggcatatgcgcagggacgcgaagtaaagaccatttttattggcggcggtacgccgagtctgctctcaggcccggcaatgcaaacgctgctggacggcgtgcgggcgcgcctgccgctggcggcggatgcagaaatcacgatggaggcgaatccggggacggtagaagccgaccgtttcgttgattaccaacgcgccggggtaaaccgtatctccatcggcgtgcagagttttagtgagccgaagctaaaacgcctcgggcgcattcacggcccggaagaggcgaagcgggcagcgaatctggcaagcggtctggggctgcgcagcttcaacctggacctgatgcacggcctgccggatcaaacgctggaagaggcactgggcgacctgcgtcaggccatcgtgctcaatccgccgcatctgtcgtggtatcagttgactatcgaacctaacacgctgttcggctcacgtccgccggtattgccagacgatgacgcgctgtgggatatcttcgagcaaggccaccagttgctgactgcggcaggttatcagcagtacgaaacctccgcgtatgccaggccgggttatcagtgtcagcacaatctgaactactggcgctttggcgattatctcggaattggctgcggcgcgcacggtaaagtgaccttcccggacgggcgcatcctgcggaccactaaaacgcgtcacccgcgcggttatatgcaggggcgctatctggaaagccagcgtgatgtcgaacaggccgacaagccgtttgagttctttatgaaccgttttcggttactggaagcggctccccgggcggagtttacgcagtataccgggcttgccgaagcggtaattcgtgagcagctcgacgaggccatcacccaggggtatctcaccgaatgcgagcagcactggcagattacccaacacggcaagctgtttttaaactcccttctggagctgtttctggcggagtga

SEQ ID NO: 72354 - DNA, 1047 bp, Citrobacter koseri
atggagtttttcaggaaaacggtactcgccgctctggtaatgggttgcagcggcgcggcgctggctttgccgaatgtcactattctggcgaccgggggaaccattgccggtggcggtgactccgcgacaaaatcaaattatacggcgggtaaagttggcgtcgaaagcctggtggacgcggtgcctcagttaaaggatatcgcagttgtaaaaggtgagcaggtcgtcaacatcggttcgcaggatatgaacgatgaagtctggttaacgctggcgaagaaaatcaataccgactgcgataacaccgacggcttcgtgatcacccacggtactgatacgatggaagagacggcttatttcctcgacctgaccgtcaagtgtaataaaccggtagtgctggtcggggcgatgcgtccgtccacgtcaatgagcgccgatggcccgttcaacctctataacgccgtggtcactgcggcggataaagcgtccgcgaatcgcggcgtactggtggtgatgaacgacactgtgctggacggccgtgacgtcaccaagactaataccaccgatgtcgccaccttcaagtctgtgaattacgggccgctgggctacattcacaacggtaaaatcgattatcagcgtacgccagcgcgcaagcacaccacttccacgccgtttgacgtttctaagctgactgagctgccgaaagtcgggattatttataactacgcgaatgcgtccgatctgccggcgaaagcgctggtggatgcgggttacgaagggatagtgagcgcgggcgtgggtaacggcaacctgtacaaaacggttttcgatacgctggcgactgctgcgcataaaggcacggttgtcgtgcgttcttctcgtgtaccgactggcgccaccacgcaggatgctgaagtcgatgacgcgaaatacgggtttgtcgcttccggttcgttgaacccgcaaaaagcgcgcgtgctgttgcaactggcgctgacgcaaaccaaagatccgcaacagatccagacgatgtttaatcagtattaa

SEQ ID NO: 72355 - DNA, 720 bp, Citrobacter koseri
atgatgcgcaaaacgctgctggcggcagttctttcgttgacggcgatggccgcacacgcagattatcaatgcagcgtcactccgcgtgacgatgtgattcttagcccgcaaacggttcaggtaaaaggcgaaaacggcaacctggtgatcgcgccggacggcaatgtgatgtttaacggcaaacagtacacccttagcgccgcgcagcgcgaacaggcgaaagattaccaggcggaattgcgcagcgcgctgccgtggatcgatgagggcgccagaagccgcgtcgagaaaggccgcgtggcgctggataaaatcatcgcgcaggaagtgggcgaaagcagcaatatgcgtggtcgattgaccaaacttgatgcgcaactgaaagagcagatgaaccgcatcattgagcatcgtactgacggcctgaccttccactacaaggcgattgatcaggtgcgcgccgacggccagcagctggtgaatcaggcgatgggcggcattttgcaggacagcattaacgaaatgggcgcgaaagcggtgcttaaaggcggcggtaatccgttgcagggcgtgctgggtagcctcggcggtctgcaaacgtcgattcagaatgaatggaagaatcaggaaaaagacttccagcagttcggcaaagatgtgtgcagtcgcgttgtgacgctggaagacagccgcaaagcgctggtgagcagcctgaaataa

SEQ ID NO: 72356 - DNA, 327 bp, Citrobacter koseri
atggcaaagaaccgtagtcgtcgtctgcgtaaaaaaatgcatatcgacgaattccaggaattagggttttcggttgcatggcgtttcccggaaggcacttctgaagagcaggttgataaaattgtcgatgactttatcaatgacgttattgagccaaataaactggcgtttgacggcagcggttatctgtcctgggaagggctgatctgcatgcaggaaatcggcaaatgcaccgaagaacatcaggcgattgtgcgtaagtggctggaagaacacaaacttgaagacgtgcgcaccagcgaacttttcgacgtttggtgggactaa

SEQ ID NO: 72357 - DNA, 720 bp, Citrobacter koseri
atgaagaacgacgtcatttcaccggaatttgatgaaaacggccgcccgttgcgccgaattcgtagctttgttcgtcgccaggggcgactgacgaaagggcaggaacacgcgctggaaaactactggccggtgatgggcgttgaattcagcgaagaaccggtggatttcgccacgctgtttggccgcgacgcgccggttacgcttgagattggttttggtatgggcgcctcgctggtggcgatggcgaaagcccgcccggaacaaaatttcctcggtattgaagtgcattcgcctggtgttggcgcatgtctggcgtctgcgcacgaagaaggcgtggggaacctgcgtgtgatgtgtcatgacgcggttgaagtgctgcataaaatgattcctgacaattctttatcgatggttcagctctttttccctgacccgtggcataaagcgcgtcataataaacgccgtatcgttcaggttccgtttgccgaactggtgaaaagcaaactgaagctgggcggtgtgttccatatggcgaccgactgggaagcctatgcggagcatatgctggaagtgatgtcctccatcgacgggtacaaaaacctgtcagagagtaacgattatgtaccgcgcccggaatcgcgcccggtaaccaaatttgaacaacgtggtcatcgtcttggccacggcgtatgggacttaatgttcgagagggtgaaataa

SEQ ID NO: 72358 - DNA, 1152 bp, Citrobacter koseri
atgcaagtaaaggaagagagtgatcacaggaaagttccggtttacacctcgttgcctctgtgctgcaatcttgcccccagcaattttaaagcgatgaccatgcaagcgtctcaattttcggctcaggttttgggctggtacgataaatacgggcggaaaaccctgccctggcaaattgacaagacgccctacaaagtatggctctcggaagtaatgttgcaacagacgcaggttgcgacagttatcccctatttcgaacgttttatgtcgcactttccaacagtgacggatttagccaacgcgccgctggatgaggttctgcatttgtggacgggcctcggctactacgcccgcgcgcgcaatctgcataaggcggcgcaacaggtggcgacgcggcacggcggccggttcccggaaacgttcgacgaggtcgccgccctgcctggcgtaggccgctccaccgccggcgcggttctctcgctctctttggataaacattttccgattctcgacggcaacgttaaacgcgtgctggcacgctgctatgctgtcagcggctggccggggaaaaaagaggttgagaaacggctgtgggatctgagcgaacaggttacgcctgccaacggcgtggcgcgttttaaccaggcgatgatggatttaggcgctatggtgtgtacgcgctccaggccgaaatgttcgctgtgcccgctccagaatggctgcgttgccaccgcgaacgagagctggtcgctgtaccccggtaagaagccaaaacagacgctgccggagcgtacaggctattttttgctgttgcagcataatgacgacgtgtttctggcgcagcgtccgccgagcggcttatggggcggattatactgttttcctcagtttgaggatgaagatggcttgcgtcagtggctggcgcaacggcatattcaggccgataatctcagtcaacttaatgcttttcgccacacgtttagccatttccacttagatattgtgcctatgtggcttcccgtgtcttcattcaccgtgtgcatggatgaaggcaacgcgctctggtataacttagcgcaaccgccgtcggtcggactggcggcccccgtggagcgtttgttacagcagttacgtaccggcgcgccggtttga

SEQ ID NO: 72359 - DNA, 276 bp, Citrobacter koseri
atgagcagaaccattttttgtactttcctgcaacgtgaagcggaaggccaggattttcagctgtacccgggcgaactggggaaacgtatctacaacgagatctctaaagaagcgtgggcgcaatggcagcataagcaaaccatgctgatcaacgaaaagaaactcaacatgatgaacgtcgagcaccgcaaactgctggagcaggagatgatcaacttcctgtttgaagggaaagacgtgcatattgaaggctatacgccggaagagaaaaaataa

SEQ ID NO: 72360 - DNA, 1086 bp, Citrobacter koseri
atgatgaaaaaatttttcgcgcttgctcttgttgcgccgttgctcatctcctgttccagttcgaccaaaaaaggcgatacctataacgaagcctgggtcaaggataccaacggttttgatattctgatggggcagtttgcccataacattgagaatctgtgggggttcaaggaagtgttgatcgcgggtccgaaggactacgtgaagtacactgaccagtatcagacccgcagccatatcaactttgacgacggtaccatcaccgtcgaaaccattgccggaacagagcccgccgcgcacctgcgtcgcgcgatcatcaagacgctgttaatgggcgacgatcccggttcggtcgacctctactcggacgtcgatgatattcagatctccagagagccgttcctgtatggtcaggtggtcgataataccgggcaacccattcgctgggagggacgcgcaaccaacttcgctgactatctgctgaaaacgcgtcttaagagtcgcagtaacggtctgcgcatcatctacagcgtgacgatcaatctggtgccgaaccacctggataaacgtgcgcataaatatgttggcatggttcgccaggccgcacgcaaatacggcgtcgatgagtcgctgattctggcgattatgcaaaccgagtcctctttcaacccgtatgcggtcagccgttccgacgcgctggggctgatgcaggtagtacagcacaccgccgggaaggacgtattccgttcacaggggaaatcgggcacgccaggccgcagtttcctgttcgatcctgccagcaacattgataccggcaccgcttatctggcgatgctcaacaatgtctatttaggcggcattgataatccaacatcgcgtcgttacgcggtgatcaccgcttataacggcggtgcaggcagcgtgttgcgcgttttctctaacgataaggttcaggcggcaaacattatcaacagtatgtccccgggcgatgtataccagacattaaccacgcggcatccttctgcggaatcgcgtcgctatctgtataaggtcaatgccacccagaaatcctaccgtcggaagtag

SEQ ID NO: 72361 - DNA, 1257 bp, Citrobacter koseri
atgaatcttaagctgcagctgaaagtcctctcctttctgcagttctgcctgtggggaagctggcttaccaccctcggctcatatatgtttgtcacccttaaattcgacggtgcatccatcggtgctgtgtatagctcgctggggattgccgccgtctttatgcccacgctgttagggattgtggccgacaaatggttgagtgcgaaatgggtatacgccatttgccacgtcgttggcgctgcaacattgttcatggctgccgaagtgaccacgccaggcgccatgttctttgtgatcttgcttaactcgctggcctatatgccaacgttagggttgatcaacaccatctcctactaccgcctgcaatccgcagggatggacatcgtcaccgacttcccgcctattcgtatctggggcaccatcggctttattatggcgatgtggggcgtaagcttctctggctttgaactgagccatatgcagctgtacatcggcgcggcgctttccgtcattctggtactgtttacgcttacgctgccgcacattccggttgccagacagcagaagaaccagagctggacttcaatgctggggctggatgctttcgcgctgttcaaaaacaaacgcatggcgattttctttatcttctccatgatgctgggcgccgagctgcaaattaccaatatgttcggtaacaccttcctgcacagctttgataaagatccgctgttcgccagcagttttatcgtgcagcatgcctcggtcatgatgtcgatttcgcagatttccgagacgctgttcatcctgaccattccgttcttcttaagccgttacggtattaagaacgtcatgctgatcagtatcgtggcctggatgctacgctttggcctgttcgcttatggcgacccaacgccgttcggtaccgtgctgctggttctgtcgatgattgtttacggctgcgccttcgacttcttcaacatctccggttcagtgtttgtggaaaaagaggtacgccctgaaatccgcgccagtgcgcagggcatgttcctgatgatgactaacggcttcggttgtatccttggcggcgtcgtgagtggtaaagtggtggaacactacaccctgaacggcattaccgactggcagaccgtgtggctgattttcgcaggctactctctggttctggcctttgcgttcgtggcgctgtttaaatacaaacacgttcgcgttccggcaggcgcgcagactatcgcgcattaa

SEQ ID NO: 72362 - DNA, 2223 bp, Citrobacter koseri
gtgaccagtttgacccaacatttcgtggggcagggtaatgttaccttgcccgggacttctattctcccgaaacgggtttttgcgcttatgaaatcaatgaatattgccgccagtggtgaactggtctcccgcctgtctacccaccgccatgtggtggcgctggacggcactgactttactgatgtcgcggcagtcgtcattaccgttgcggatagtcgcagcggcatcctggcattgcttaaacgcaccggttttcagttgccggtgtttattctctctgacgatcatgttgatgcgcctgccggtgttgaggcggtgataagcggcaacgcgcaggactggctggaactggagtcggccgcctgccgttatgaagagaatctgctgccgccgttttatgacacgctgacccagtatgtcgatatgggtaacagcacctttgcctgcccgggccatcagcacggtgagtttttcagaaagcacccggccggtcggcatttttatgacttcttcggcgaaaacctctttcgggcggatatgtgcaacgccgacgtaaagctgggggatctgctcattcatgagggatcggccaagcatgcgcagaagtttgcggcgaaagtctttcatgcggataaaacgtatttcgtgctgaatggcacctcggcggcgaataaagttgtgaccaacgcgctgctgacgcgcggcgatctggtgctgttcgatcgtaacaaccataaatcaaaccaccacggggcgttgattcaggcgggcgccacgccggtctatctcgaagccgcgcgcaacccgtttggttttatcggcggcattgatgagcactgttttgacgaggcatacctgcgtgagcagatccgtgaggtcgccccgcagaaagccgatcggccgcgcccgtttcgtctggccgtcattcaactggggacgtatgacggcacgatctacaacgcccgtcaggtcatcgacaaaatcggcagtctgtgtgattacatcctgtttgactccgcctgggtcgggtatgagcaatttattccgatgatggcggacggttcgccgctgctgctggcgctgaacgaaaacgatccggggatttttgttacgcagtcggtacacaagcagcaggctggtttctcgcaaacctcgcagattcacaaaaaggacaatcacattcgcggtcaggcgcgtttttgcccgcacaagcgcctgaataacgcctttatgctgcatgcttccaccagtccgttctacccgctgtttgccgcgctggatgtcaatgccaaaatccatgaaggggagagcggtcgccgcctgtgggcagagtgcgtggcgctgggcattgaggcgcgcaaggcgatactcgcccgctgcaaactgcttcagccattcattccgccgcttgtggacggtaaaccgtggcaggatcatccaacggcactgattgccagcgatcgacgcttcttcagctttgaacccggggcgaaatggcatggctttgcaggctatgcggaggatcagtattttgtcgatccgtgcaaactgctgctgaccacgccgggcattgatgctgaaaccgggcgctataccgactttggtattccggccactattctggcgcactatctgcgtgagaacggcatcgtaccggaaaaatgcgatctcaactcgattttgttcctgctgacgcctgccgaaagcgaagccaaaatggcgcaactggtggcgatgctggcccagttcgaacaacatatcgaagacgacacgccgctggcggatgtgctgccgaccatctttaacaaatatccggtacgttaccgcgactacaccctgcgccagttatgccaggagatgcacgatctgtacgtcagttttgatgtgaaagatctgcaaaaagcgatgttccgcaaagagagcctgcctgcggtggcgatgaatccgcaggatgccaatagcgcttttattcgcggcgatgttgagttagttcgtattcgtgacgctgaagggcgtatcgcggcagaaggcgcgctgccatatcctccgggcgtgctgtgcgtcgtgccgggcgaagtgtggggtggggcggtacagcgctacttcctggcgctggaagagggcgtcaatttgctacccggcttctcgcctgagttgcagggagtttacagcgaaaccgatgccgatgggattaaacggctgtatggctatgtgctgaaataa

SEQ ID NO: 72363 - DNA, 708 bp, Citrobacter koseri
gtggtaatcgggccttttattaacgccagcgccgttttagctggaggcgtgcttggcgcgcttctcagccagcgtttaccggaacggattcgtgtctcaatgacctctattttcgggctggcatcgctggggatcggtattttactggtcataaaatgcgctaaccttccggtgatggttctggcgacaatcatcggcgcgcttatcggcgagttttgttacctggaaaaaggcatcaacacggcggtgacgaaagcgcagcaactgattaagaaaccggggaagaaagccgtccacgacacctttattcagaactatgtcgccattattgttcttttttgcgccagcggaaccggcattttcggcgcgatgcatgaaggcatgaccggcgacccgagcattctcatcgcaaaatcgtttctcgatttcttcacggccatgatcttcgcctgctcgctgggagtcgccgtcgccgttatttccgcccctatgttggttatccagctattgctcgccacctgcgcagccttaattttaccgctcaccaccccggcgatgatggcagattttagtgccgtaggcggattactgctgctggcgaccggtctacgtatttgcggaatcaagatgtttgcggtggtcaatatgctccccgccctgctcctggcgatgccgctttccgccgcgtggaccgcgttttttgcctga

SEQ ID NO: 72364 - DNA, 339 bp, Citrobacter koseri
atggcattaaccgataaacaagtccgcagtgcaaaaccctctgataaaccctacaagctcgttaacacgctcgatttgtatcttcccggttcccttatctggtatctcaaatatcgttttgagggaaaagaatcaagagtgccactcggttcttatcccgaaacctcacccgcccttgcccgcgaaaaacgcaatgccactaaacggatactaaaatcaggtttaaatccttcacaacagtgtcggtctgaaaaaatcattgttgatgaatctctgacgtttcagtatatcgccaccctgtggcataccgattgcctgagacttgtagtggctcagtaa

SEQ ID NO: 72365 - DNA, 156 bp, Citrobacter koseri
atgacccaacgtaaacaaaccaaacgccgtttttctcccgaatttaagctcgaagcgattgaacaggttgttaaatatcaacagtctgctgttgaggtcgctcatactcttgaaccagaccccagccaattacgtaaatggatacgtcagtattag

SEQ ID NO: 72366 - DNA, 372 bp, Citrobacter koseri
atgctgactcttcgttccagtaccgaaaaattctgggataaagcctgccaagaattaccatcgcccgttgaacgtaacctgccgttatttgatgatattttcgtgatggcgctgatatcgtttaatggcccgacaacgggattctcacaggagcatattcaggatgaactgaccgacctgagcagccagacgctgaatattgactataacacggttgtactggtgacagatgcccgcgcacaaaagcgcacctcaatactcggtatctacgtcctgatatcgcaactccagactcgatttgcttgcgtcggtgtgaactgccgtttcagcaagttcggggaggcagatgtttcttccccgacgtttcggtag

SEQ ID NO: 72367 - DNA, 222 bp, Citrobacter koseri
atgatgaacattgatcagggcatactcatgcctgttgcactggatcaactgtgggcatttgatttaaatcctcgtattacctgtaatccgaattacgatgaaattaaagagtcgattcgccatcgtgggctggaacatccaccgcagatcacccagcgtccgggagagctgttttatattatcgccaacggtggaaatatccgtctttcagagtatcaataa

SEQ ID NO: 72368 - DNA, 762 bp, Citrobacter koseri
atgaaaatctgttcaatgatatgtttatgcgccgcaatatttttattgagtgcctgtatccactccccaattgatgcaaataaaaaagccctacccagaacggagagtggcatcagtaaaaatactcccaaccagttaacagataaagatatcttcggcaacgagaccacgcttgccgtttcagaagaagatatccaggccgcactggatgatgagaaattcagcgtcccgctgaactctgccgtcattctggtccagtctggcaatcgtgcaccagaaatgatcatgcagcaagaaatgaatcgctattaccggatatcaacattttcaggtatccccgacaggcaaaaagctatttcctgtaataagatgaaaaacgaagaaggagaagccgtcaacagcgaaaatatgaattatatgcaggccctacgttatattgcggcaaaaggacaacaaaaagcgatcattgtttactgggatacgctacaactggggaaatataatactgcgacaaaaaccactgtctggtcggatttccgaaacgaaacgttgtctgattcagtctcgttgcgctacctggtgcgtttcgccctcgtggatgtggcgacgggagaatgggcaacctggtctcctgttaactacgaagataatattctccagccactcaccggaagaacaccgatcacagaacagcagatcgctcagttaaagcaaaaaacctttgccacagtgattaaagacctggcaaaccgctatcagtaa

SEQ ID NO: 72369 - DNA, 411 bp, Citrobacter koseri
atggtcagtcaggatattaagaatggcagaaatctttatctgcttctgaacgggcagaacggtatacggactgaattatttgcccttaaaaccggttccatcaaagctttccaggaaaagatgttcagtgacggccagggcagtagcggtatgacgcctgacgttattgaatcgctgaaaaaatccggttacatcaacgattatctaaaaagaaagtcggactatatcagcaaattattgtcaattttgctgtttatttgttctggcgagcctgaaattgacagtgagtgtcaacctgttacgtacccgacttgctcaaaactggtgaaaactaaaaagggattcagactttttccggcgaatggccccggtactggactgtcggtgagaatacggagcggcattcgatga

SEQ ID NO: 72370 - DNA, 246 bp, Citrobacter koseri
atgggtaaacaacgtagtcagttcaccagagaaatgtggcggtatatacaaaaacgccaggtgctgggtacctggcgatatagcaaagggatttactctgttcatccggcactgctgaatgccctgacagaaacctccatcactgactcgctgccgatggatgtgtttttgcagcttccggaatggtgtatttacgtcagaacaccggggatgattatggacggggaaccgttgtatggattctga

SEQ ID NO: 72371 - DNA, 174 bp, Citrobacter koseri
atgaataattttatgtttaaccctgtcgggatcgctgacgctttttgtaagcgttatccggaagctattagcggaattgaaaaagtccggttaatgaaaggccgggaaattcccgactggccatactggtgttttttttccggaaagtcactggacaatgttgtttatgggtaa

SEQ ID NO: 72372 - DNA, 651 bp, Citrobacter koseri
atgggctatctgatgagaacgaacaattcgttgtatgtaaaagcataccttcaacaggaactacgtaaccaatctatggccctgtcactggagaaagtcgtgggtgctttcagtgaacgattcagtgacaatgttatggatacactaacgtcactgagtaatggcgcagggcgactggcaggaagaggagtttgcttgtttctgggagataatgaaacctgtaatgggctacgttattatgatcaaagaatggcaatatgtatcatcgagttaataaaacgtactgatgccattcttgatatgttgtatttgtgtattgtttacgttcttcaaagatataatgataaaatgcagctcagaatactggcgaaaataatctggtatatggccgactgtaagaattattcatcttcattgtgccaaaattttgaacttgatgatgggaaaatcgaagaggttttacggcgacttcaggatctcgacgaaaaagaggagattcttgagaatctgatcggagaatccatatatcctgttacagccaggttacagaagatggccgtgaagggggctgttcatatggctacagatatggttacacaaggaattctggcgtacactgctggacctatattgccggttcggcaagcctga

SEQ ID NO: 72373 - DNA, 480 bp, Citrobacter koseri
atggcaaatcttgtttatctgacattaaacgggcagttgcaagggctgatttcggcggggtgttcgtcactggcatccatcgggaataaggcgcaactggcacatctggatcagattatggtgaccagtctcaaacatggactgagccgggtgcagaacgtcaatcatcagacgctggatatcagtaaacccgtggataaatccacccctctgctgagtaaagcgattaatgaaaatgaatgtctgacctgtgattttgaatattatcgtactaaccgatttgggattaacgaattgtattatcgggtaaaactgatcaatgcaaggatagcgagtatacgcagtagtgttcctcattccattaccgatagcggtgggcaaccggaagaatcggtatcgttcacttatgagagtatcactcaggaacattgcgtagccggaaccagtgcatacagtctgtggagcgagcgggtattttaa

SEQ ID NO: 72374 - DNA, 1347 bp, Citrobacter koseri
atgagaacggatattcagacgattatcactggccaggacccgcgcggcctgtcggagttcagcgccatgcgtgaggagatcaataaggccagccatccggcgcagccagagatgaactggacgctggtggagtcgctggcgctgaccatctttaaagcgaatggtgttgatttgcacaccgctagctattacacgctggcccgcacgcgtacgcaggggctggtgggattttgcgaaggcgtggaactgctggcagcgctgataagccgcgaatgggataaattctggccgcagagtggggcggggcgaaccgaaatgctggactggtttaacgccaggaccggcaatattctgcgccagcaattggctttttctgaagccgacctgccgttgctgtaccgggctgagcgtgccttgcaggtgatctgcgacaagctacagcaggtggagctgaagcgtgttccgagggtggaaaacctgctctattttgtgcagaacacgcgcaaacggtgtgagccgccgccagaaaggccagcggcgtatacagcagtaaaaaccacagtccgaacgctggtctatatgccggaaagcacggcaaccccgactcttccagagcctcctctgccggaattgccggaggtgaaggtggcggttcatgggggggcagtaacgccactgtccccggcgtcagtgaaaccgggaagcactgtgaaaggttttatcgccgggattctctgtagtgcagtcgtcgcagctgtcatctggtggtggcaggtctatcccctgcaacagcaggtagcggcagcgcgtgatacggcgcagggggcggcaacggtctggctggcatcgccacagctgagcgattatccgcaacggctacagcaactgacaggagcttcgccgttgcagccgctggaaaccggtcagcgaatggtccggacggcagacagccgttggccggaaagcctgcaacagcagcaggccacaatgaagtggagtatcgtcctgaaagacaggtcggcaaacagtccgcagatgctgggctggcagcaggcgcgcaccgatttacgggagtttgctgagcttttagtacagcgtgagcaggcgaaagagggattcacgctctcctatatcaaaaccattatttatcaggccgagcgcacgctgaaccaggagataccgctggaatatctgctgacgcagtaccagcaggcgcagtctgccgggaaaaataccgggatgctggaaaaacaaattaatgaacggctggatggggttctgagtcgctggctactgctgacgcaggagcggtcgaaggaagcgccggacggtcaatcagggaaataa

SEQ ID NO: 72375 - DNA, 3540 bp, Citrobacter koseri
gtgttcagaataccgactccccgtattcccccacttttcagcgggctggcgtccatgctcagacccgcgatgcccaggttcaaagtgtccgtagcctggctgctggcactggtgtggattgtgctgctggtctggatctggtggaagggccctgcatggcggttttacgagacatactggctgaaaccgctggcgaatcgctggctggcgacagctatctgggtgctgctggcgcttatctggctgaccgtcagagtggtgaaacgcctgcaattgattgagaaacagcagaagcagcagcgtcaggaagagcaggatccgctttctgtggccgttaacttccagcagcgttgcctcgaccactggctattgcggttgcaacgacatctggacagccgacactacctgtggcaactgccgtggtatctggtcacgggacctgcgggcagcggtaaaacaacacttctgcgcgaagggtttccggctgatgtgatctatacgccggacgccagccggggaaccgaccagcaggtatatatcacgccgtatgtgggcagacaggcagtggttttcgataccgatggcatgctggcggatccagatgacggcaatctgctacaccgtcgcctgcgcgaacactggctgggatggctgctgcaaaaacgcacgcgccagccccttaacggcctgatcctgacgctggatctgccggatttgctgaccgcagacaaacgccgtcacgagcaactgatacagacgttgcgcggccagttgcaggagacacgccagtcgctgcatgctcgtctgccggtctatatcgtgctgaccaagctggatctgcttatcggatttgccgcgtggttccgtgccctggaccggaacgggcgcgatagtgtcctgggtgtcacctttaccggcaacgcccatgaaagcgatgcctggcgcagcgagctggacgtattctggcagacatgggggcagcagatgaaccgggcgctggctgaccagatgcttgcccagtccagcccggtggcgcgcagcgcggcattcagtttctgccgccagatgctgggggccggggagaatattgcccgtctgctggatgcgttgctggatggtgagcaccaggatatctacctgcgcggcgtgtatctgacctcttcgctgcaacgcggccagatggatgacatctttactcagtccgccgcccgccagtacgggctggagcatgtctctctgtcggcctggccgctggtggacaccacgccgtacttcacccgcatattgtttccggaggtgctgctggccgagccgaatcttgccggggagaatcgcctgtggttggtcagttcccgccgtcggatgagtctctttgctggatgcggtgcggtggtgatggggctgcttatctggggctggcatcacgggtataacgaaaactaccatgcaggacagacggtgctggcgcaggctaaatcttttatggacgtgccgccgccgcagggaacggatgaaagcggttacctgcaactgccgctgctgaatccggtgcgtgatgccacgctggcctacggtgactggggcgacagaagctggctggccgatatggggctctatcaggggacgcgggtgggcccctacgttgagcagacttacttgcatctgctggaacaacgttaccttccggccctgctgaacggtctggtgaaacagatgaacaacgcgccgccggaaagcgaggaaaagctcgccgtattgcgcgtcatccgtatgctggaagataaaagcgggcgtaatgatgccgtggtgaaacagtttatggcgaaacgctggagtgaacagtttcatggtcagcgtgatgttcaggcgcagttgatgtcccatctcgactatgcgctggcgcataccgactggtatgctcagcgtctgcagggcgacgccgatgccatcagcctgtggacgccttacgataaaaccgtcgccgctgcgcagaaagaactgagcaggctgccggtttatcagcgggtgtaccagagtctgaaaacacgggcgctgggcgtactgcccgccgatctcagcctgcgcgatcagacggggccagcatttgatcagacgtttattgcaactgacaataataagctgatcattccgcagtttctcacccgctatggcctgcagagctattttgtgaagcagcgtgatgagctggtgaagctgacggcaatggattcctgggtgctggctctgacgcacaatgtaacctacagcgatgctgaccggacggaaatccagcgccagcttaccgagcagtatatcagtgattacaccgccacctggcggacgggtatggataacctgaatatccgaggctatgactcgctggccgcgctgaccggcgcgctggagcagattatcagcggcgatcagccccttcagcggatactgacggcgctgcgtgacaatacccgacctcccatcctgtctgaaaaactgagtgacaacgaacgtgcgcaggcgaagaccgagccggactggcatttgctgaaccgtctggggcatgaattcgccccggaaaacagcacgctggaagagcagaaggataagggcagcacgttgcaggtggtctatcagcaactgacagaattgcaccgttacctgctggcggtacagaacgcgccggtaccgggaaaatcggccctgaaggcagtacaactccggctggatcagaacagcagcgatccgattttcgccacccggcagatggcgaaaacgctgcctgcgccgcttaatcgatgggtggacaaactggcggatcaggcgtggcatgtggtgatgattgaggcggttcgctatatggagctggactggcgcgatagcgtggtgaaaacctttaacacccagcttgcggataaatacccgtttgatccccggtcgaaagaggatgcctcgctggatgcgtttgaacgcttctttaaaccgggcggcgtgctggacgcattttaccagcagaacctgaaactgtttgtggagaacagccaggggcttaatggggaggacaatgtggtgatccgtgaggatgtccttggccagttagataccgcacagaaaatccgcgatattttcttcagcccgcagaacggactgggggcgcagtttgcggtggaaacggtagcgctgtcaggcaacaagcgtcgcagtgtgctgaaccttgatggacaactggtggattacgctcagggacgcaactacacggcgcatctggtgtggccgaacaacatgcgtgaaggcaatgagagcaagctgacgctggtgggcgcggggggaaactcctcgccgcgaagtattgccttcagcggtccgtgggcgcagttccgcctgtttggcgcagggcaactgaccagcgtacagaacggcacctttaccgcccgcttcagtgtggacggcggcactatgacctaccgtatccacaccgatacggaagacaacccgtttgctggcggactgttcagccagttccggttgccggatacgctgtattga

SEQ ID NO: 72376 - DNA, 1413 bp, Citrobacter koseri
atggatatacacaaccaggacgtctggctgtcgcatctgcaggaaggtctgtcggaagagaaactggccagcaagctcagcgatgaaaatccaaagtgggaatatatcgacggcgaaattgtcaggctggggtcgctgagccatgcgcagcttgatgttgcggaactccagcggcaagggctggagcttctggcctcggagagcaaggattttcgtctggtgtcgcacctgctgcgcacgctgcaacatgcgggtgatcatctgcttgcgctcaggatgctgacacagtacgtcacgcattactggctccttgcctggccgcagaatgcggcgaataaaaagcgctttgccgatcagatactgaaacgttttgaaccgggtattgctgtttttgttgctgcatcaactccggggcagcgcgatgttctgctgggagaactggcgaagctggcgcagtgctggcagaccaccggaatgccggaactggcctccgccaccgatgacctgtttgctcagtatcagcgggcgtttcgtgactgctcacctgcgacagcctctccggcacagcatgtggatacgaccagcgccagtatccagactgacgttccggccatgcccgtaacggcagcgcccgcgccggtggtgagtatcgataatcacgatgataaagcctggcgcgacacgctgctgaaggtggcagctattctctgcgaacgccagcctgcatcgccacagggataccgcctgcgccgtcatgccctgtggcaaaacattacctcctccccgcaggcggagagcgacgggcgtactccgctggcggcggtctctgccgatatggtcgccgactaccaggcacgtcttgcccttgcggatatgacgctctggcagcaggtggagaagagcctgctgctggctccgtactggttgggtggtcactatctttctgcacaggttgcgcggcaactgggtcacgatgatgtggcgcaggcggtgcgcgatgaggtacgtcgttttgtaacccggcttccgcacctggatacgttgcgttttaacgatcgttcgccctttatcaatgaggccaccctccagtggctggcggatgagccgcagaagcctgccgccgctacggttgtcacggatgatatgacacagcaggtctggcaatactatcaggagcaggggcttcaggctgcgctggcgctgcttgaaacgcagcccggtgacacgccacgcgcgcgattctattgccagtacctgacggcgcaactgctggaagcatccggcatggcaaagattgcccggcaccattaccggatactgcttaaaaccggactgcatacgatgctgtccgactgggaaccggcattgctggaagagctggaaacgaaactcgcgacggaaacggcgagctaa

SEQ ID NO: 72377 - DNA, 678 bp, Citrobacter koseri
atgagacgcttcgcccgtttactgctgcctctgtggctgacggtttcaccgttgtacgccagtgaaatggcggatgcgcaggcaacagtggatgcgatgaacctctgccggaaagagcctgcggcgctggaacgtctggactgctatgaccgcattctgtcaccggaatccgacaccggttttgccggagcgctagtgaaagcgcgttatggcggcgaggcgcgtaggcgggcctttgaacaggaaaagcaacgcacggacaactccaccgggctgctgctcacccgtacggagggcgaacgtccgatggtcattatcaccacgcccgctatcggcagcctgccgccgcgcccggtgctggttttcagttgtgtggacaatatcacccggatgcaggttgcgctcaccgattcccggcaggaaagcgatattccggtcacgctgaaaacagaaggcggggcgttccgttcccgctggtttgtgcgtgagaacggctttctgctggaagccagccgggggctggcggggattgatgagattaaacagctttttggcgcaaaaacgctggctctcgataccgggaccgacagcgccgccggaacgctgacctttaacattgacggactggcgcagaccatcgcgccgctgcgtgaagcctgccactgggcgggggaataa

SEQ ID NO: 72378 - DNA, 2685 bp, Citrobacter koseri
atgattcagattgaactctccacgctggtaaaacggctgaacccgttctcccgccaggcgctggaaatggccgccacggcctgtatgagccagcagtccactgaaattacggtcagccatgtattgatacagatgctggctattccgcgcagcgacctgcgcgtcattattgataaagcagagattagcgtggaagagctggggcaggcgctgacggtggagcattacgccacgatgcgccataccgacagttacccggttttttcgccgttgctggttgagtggctgcgcgacggctggctgttggcctcggcggaaatgcagtccagcgagctgcgcggcggtattctgctgctggcgttgctgcatgcggcatcgcgatatgtgccgcctgctgcggcccggttgctgaccggtattaaccgcgatcggttacgccaggatttttccgactggacgcgggagtcagcggagtccgtcatgctgaacgaggataagtcagcctccatgtctgtgcgttcagaagagagtctgcttgcccgttatgcaaaaaacatgaccgaagacgcccgcaacggcaggctcgatccggtgctgtgccgggataatgaaatcgatctgatgatcgatatcctctgccgtcgccgtaagaacaatccggtggtggtgggggaggcgggcgtcggcaagagcgcgctgatcgaggggctggcgctgcgtatcgttgccggtcaggtgccggacaagctgaaaaataccgatatcatgaccctggatctcggtgcgttgcaggcgggtgcttccgttaagggcgagtttgagaagcgttttaaagggttgatggcggaagtcattcagtcgccaacatccatcatcctgtttatcgatgaggcgcatacgctgatcggcgcaggtaatcagcagggcgggctggatatctccaacctgctgaaaccggcgctggcgcgtggcgagctgaaaaccatcgccgccaccacctggagcgagtacaaaaagtatttcgaaaaagatgcagccctgtcgcgtcgcttccagttggtgaaggtgagcgagcccaatgctgccgaagccaccattattctgcgcggtctgtcggccgtgtatgaacaggcacacggcgtgctgattgacgacgacgcgctacaggcggcggcgacactgagcgagcgctacctctccgggcgtcagttgcctgacaaggctattgacgtgctggataccgcctgcgcccgtgtggcaatcaacctttcctcgccgccaaagcagatttcggcgctgaccacacaatgccagcagtgtgacgcggaaatccaccagcttgatcgggaaatgcggattggcctgcgcacggacggcggacgacgggacgaggtttacgcgcagtatgaagcggcgcaggcagagcttcaggcgctggatgccgcgtggcatcagcagcagacgttggtacaggagattatcgccctgcgtcaggcattgctgacggaagctgaggggcagcaggatgaggacgatgcggcaaacgacgatctgctgccgcaggctgataccgtaccggaagagacaaccgcagcggcggaacggctggcttctctgagcactgaactggatgccctgcaccgtacgcagttgctggtatccccccatgtggataagaaacagattgccgccgttatcgctgaatggactggcgtaccgctcaaccgcctgtcgcagaatgagatgtcggttatcaccgacctgtcacagtggctgggggagacgattaaaggtcaggatctggcaattaagcacctgcataaacacctgctgacggcgcgggccgatctgcgtcgtccggggcgtccgctcggcgcatttttgctggcggggccgagcggggtgggtaaaaccgaaaccgtgctgcaactggcagagctgctctacggtggtcgtcagtatctcaccaccatcaacatgagcgaattccaggagaaacacaccgtttcgcgcctgattggttcaccgccgggctatgtcggctacggcgagggcggcgtgctgaccgaagcgattcgccagaaaccgtattcggttgtgctgctcgatgaagtggaaaaagcgcatcctgacgtgctcaacctgttctaccaggcgttcgacaagggcgaaatggccgacggcgaagggcggctgattgactgcaaaaacatcgttttcttcctgacctccaacctcggttatcaggtgattgtggaacaggcagacaacccggagtcgatgcacgatgcgttgtatccggtgctggtggatttctttaaaccggccttgctggcgcgaatggaggtggtgccatacctgccgctctcaagggatacactgaccaccattatcgccggaaaactcgcccgtctggataacgtgctgcgtgtccgtttcggcgcggaggtggtgattacaccgggcgtgaccgatgaaattatgcagcgcgttacccgtgccgaaaacggggcgcgaatgctggagtcggttatcgacggtgacatgctgccgccgctctcgctgctgctgttacagaaaatggcggcgaacaccgccattgtccgtatctcgcttgatgtgcaggacggcgcgtttactgccgatattgacgacgctgtgacagaagaagccggtgcggtatga

SEQ ID NO: 72379 - DNA, 747 bp, Citrobacter koseri
atgagcgaattcgtgcttccgtcagaaccggactccggtcgtcagtaccgtctggcactgcgcggtaacagccttaacccgatgatcgacgccgccacaccgttgctggggatggtgatgcgcctgtcgggtatgaacagccagagtatgccggaacacctgtttgcgcaggtggtgacggatgtgcaggcggtggagcaactgttgcaggagcagggctatgagccgggcgtgattgtgtcatttcgttatgtcttgtgtacgtttatcgatgaagcggcactgggcaacggctggtcaaacaaaaacgaatggatcaaacaatcattgctggtccatttccataatgaagcctggggcggtgagaaggtgttcatcctgctggagcgcctgatgcgtgagccaaggcgttatcaggatctgctggagtttttatacctctgcttctcgctgggctttcgcggacgctacaaggtggcgcagcagggacaggatgagtttgaacagatataccgtcgcctgcatcacgtactgcatccactgcgtggcgacgcgtcgtttccgctactccaccagaataaggaagcgcagggtggacgttaccggctgataaaacgcctgactgtcagacatcttctgctgtgtggcatcgtcgtgctggcgctggtgtatctgttttatctgctgcgcctcgacggccagacgcaggacattctccatcagttaaaccggctgcttgccaggtaa

SEQ ID NO: 72380 - DNA, 1344 bp, Citrobacter koseri
atggccacaatgaaaaaccgggtgctctggcaggaagggatgtttgcgttgccgcagcactttcagcagcaacagcgtcataacgacgcgatgctgcgcgaacggctggacgcgctgggggactttgcctggggatttacggagctgtcgctgaataccgaacttctggcacagggcaaagtgatgattgaccgggcggcaggctgtctgccggacggtacggtgttccgtatccccgagcaggatctgctgccgctgccgtttcagccgggtgaactgaccacgccggagagccacaatatttatctggcgctacccgtcgctacccataacatcagcgaagtacagggcattcgcagcgtggggcagagttcggagcgctacagcgtggtgcgaaccgatgtccgcgacgtacacagcaatgacggcgatatgcagtcgctgacgctggggcaactggtgccgagaattgtcagcggcgcggaagatctcagcgcgatgatggtactgccattgtgccgtatccgcagttttcaatctggcggtgcactggtgctggatgaggaatttatcccgacctgccagacgctgcgtgtcagccctgtactgaaccgctttgtcggtgacgtacaggggctgatcgccacccgcgccgccgatctggctaaacgtattggttcgccggagcagagcgggattgcggatgtggccgagtttatgatgctacagatgctcaaccgctggcaaatgcacttctcgcaccgggcgcgcctgcataccctgcatccggaaattttttatctggatctggtcagcctgctgggcgagctgatgacgttcaccgaaaacagccgtctcccctgtaccgtcgagacttatgaccatcgcgatttaacgctgtcctttaaaacggtgatcccggagcttcgtcgggcgcttaatattgtgctgcaaccccgtgcgcagaacctgccgcttatctttaccgagggggtttacctggcgacggtcaacgatccgggcctgctacagtctggtgtctttgtgttggcggttcgcgcccggatgccgcacgcccagctaatcctccagtttacccagcagtcgaaaatcgccgctaccgacaaaatccgcaatatggtcagcgtgcaggtgccgggtattccgctgcgtgcgcttccggcggccccccgccagctgccgtaccatgacggctatgtctactttgagctggaaaaaggcagttccgcttggcaggacgtggtgaaagccggagcgctggcgatgcatatttccgggactttcccggaactcgatatgcaactgtgggcgataagaggataa

SEQ ID NO: 72381 - DNA, 513 bp, Citrobacter koseri
atgagacgcgtttttgtcatgctgatgctggcgttaagtggatgcaccatgaccaaaaagatcggccaggtgatcgccgatcccggtattcaggtcggcgatctgaaacagcagtcttccacggtgaccctcacgctgttgaccgagccggacagcaatctgaacggtgagggagatcctgctccggttgatatgcaactggtgtatctgaccgatgactcaaaatttcaagcggcagattacgatctgctggcgtccacgccgctgccggaagcgctggggaaaaactatctcgatcaccaggatttcaccctgctgccggacacgctcaaaacgctgcccgacgttaatctggatgcaaaaacgcagtttattggcatcgtcgcctatttctccgacgatcaggccagcgaatggaagcaaatcgtgccggtggaagggaccgggcatcactaccgtctgctggtgcatgtacgccagaacagtattgaaatgaagaccgaggacaaataa

SEQ ID NO: 72382 - DNA, 1278 bp, Citrobacter koseri
atggctgaggaaaaatcgcagtctcccgcgttatcactgaccttacaggtgatgaacggtaatgaactggaaagcggtcgtgcggcgaaatgcctgttttctggcgacggtggcgagataggccatgccgaagagtgccactggtcggtgcaggatcgtgtcggctcggttgccgggcgtgcctgtgccattgtgctgcacgacggtgctttctgcctgcgcagcctgatgccgggactgatgattaaccttgcgccggtatcgacggataccggtctggtacgcctgcgacagggggatgaaatcagcctcggcgcgctggcgctgaaagtctttctgcacgagggcaaacgtatcagctatgacgagcagatggcgacgccggaaagtattgtgacacagcgtgatggcctggtggaggcgttgatctccactgacggccagccggagtatccggggatgcagcagcgtcatcagttgacgtccacgatggtgaacagtttttcctccgatcctttgcaggtactacaaagtgaaagtctgacagtctcatccctggctaacgggcaacgaaccgtaccgctttccgatctgcgggcgaacggcgggatcgacacggcgtttatgaatctgccgccggtttatgccgatccgcatgatgaagacgaattcactccggcgcaaacggcgcagaaacatctggcggtgacgccgctgctgcgcggactgggcagttcgctccgcgtgcacaattcgcaggatgctgacgctttcctggaagagagcggacgcgccctgcaggccgcgattcaggggctgctggatttgcagcacagccagaacagtctgtcggacaaacacctgcgcccgctggaggataacccgctgcgcctgaatctggactatgccgccgcgctggaggtgatgttcgccgaaggtaaaagtccggtgcatctggcggcacctgccgccattcgcgaaagcctgcgaaatgtccgccaccacgaagaagccaaccgggctgcgattgccgaagcgctgcgggtgatgcttgaggccttctcgccgcagagtctgctacgccgttttgtccagtaccgccgcagccatgagctgcgccgcgagctggatgatgccggagcatggggcatgtaccgccattattacgctgaactggcgtcggacaggcagcagggtttcgccatgctgtttaacgaagtctatgcccaggtgtacgaccgggtattacgtgagaagcagcgggaaccggaagcatga

SEQ ID NO: 72383 - DNA, 1035 bp, Citrobacter koseri
atggaagagtaccggccagcacgccctgatgtgacgtttccggcagatgtgcgcgacatcaatttctatgtgttgctggaatcattgtaccgtcgctacggtgagccgggcagtgaaccttctctgcgcaacgagccggaagatgaggtggtgctgtttaaatccgatgccagcatcgcttttccggggagcgatttaacgtcactcatgcgcagcgacaaggggcagtttatgctgacctcaaaatttctcggtttttccggcagccagtcgccgctgccgggctattacctggatcggatggcacaggaatcagcacagaacgaggaaggtctgaaagcgttccttgatctgttcagtcaccgctggacgcaatttgcttatcacgcctggcgtaagtaccgctactacatctgttttcgcaacggcgggacggatgtcttttcacggcgcatgtattcccttgtgggactgggtaaccagagcgtgcgcgaccggctcgctatcaaccacagcaagatgttggcctatgccggggttctggcgacgccgggtcgttcgccggacgtggtatgcaatttggtttcccactgttttgaactgccggatgtcactattgagagctggcaactgcgtaaggtggcgatcgtgccgtcagagcagaacagggtgggggtgcgtaatctgaaaatacgaactgccgggcatgtcgtcggacgttccgtcctgggcgtcaattttaccctcggtgctcgggtaccggatcgcagcggcaaatttttgctgcggattaacggtctggagatggcgcgttatctgtcgtttttaccggacggtgatcatcatcaggcgctgaaaatgtttatttcgttcctgctgcgcgatcagctggcctgggacttacgcctggatctggcgccggaacaggcgcagggaatgcggctgggtgacaggtcctgttcctgtatcgggcgtactgcgtttatcgggcagccgaaaacaccgccttccgtcactctccacatcagggaataa

SEQ ID NO: 72384 - DNA, 1833 bp, Citrobacter koseri
atggcttttgaagaacgttactaccgggaagaactggattatctgcgtcaactgggcaaactgctggcagaggataaaccttatctggcccgttttttgtctgagaaagaaggcgacccggacgtggagcgtctgctggaggcctttgctttcctgtctggtggcctcaggcagaaactggacgacgagttcccggaattcacccatgggatcatccggatgttgtggcccaactatctgcgcccggttccggccatgacggtcatcgaatataagccggaaaacaatctgaaagcgccggttcaggtttcccgtgatgagctggtggcgacccgtcagaataatcatggcacgtctgtacataaaggggcattaacaaacggagaaggtgcttttgcccctgcctgccatttcactctggcacgggatacatggttgcagccgctgcaacttcgcaatgtgcgtaacaccagcactctcaaaaaaggcactattgatattgattttttcgtggatgatggtgtttctccccgaaccttggattttaataaactcacgttctggctggggaatgacgatgactatacccgtcatcagctctatctatggttcagtgaacacctgatggatgctgaactggttgcgggggagtgttgtataccgttaccggagttgtggttggatgccgccgggtttgagcgtgaggatgcgttgttgccgtggcctaaaaatgttcacaatggatatcgggtgcttcaggagtatttttgctacccggaaagcttctttttcatccatctgcgggatgtggcaccgttaccggaagattttccggcaggcgcgttcacattacgttttcattttaatcagccgttgccggttgatataaagctgcgtcagagttcattgcggctttactgtacacctgccgtcaacctatttgttcaccatgctgaacccgtcagaccggacggcagtacgccacagtatccattaaaagccagtcatcagcaccctgacgcctatgacattttcagggttaaatctgtttccggtcatatcacagagtcagagaatatatctggaaaaggaaaccaaacccgcttctggccggagtttgagagttttaaccaccagattgagtacagccgtcagcgtgaggtggtgtactggcaccaccggacaagaacgtccctgtttcatcgcggccttgagcattccatcgcctttgttcactccgatggccggctgcctgagccgtctatgctggaaggtgaggtggttaccgcttcactggtctgcaccaacaggatgctccccacagaactgcatactggtgatatctgtatcgcggtgggtaaaaatccggcggtcgcttctttcagcaacgtcacgcgtccgacgcgtccgctgtatccggtcacagacggcgatatgcactggtcgctgatttccagcatgaatctgaactatctctccctgctggatcgtgatgcgctggtgcagatcctgcgtaccttcgatctgccagggatccatcatccgcagcaggcccggttgtcgcagcaaaagctggatgccattgagaagatggaaactcaaccggtggatcgattgtttaagggcgtcccggtaagaggactggctaccacgctgtggatcaacccgaccccgtttgtctgtgagggcgagatctatttgctgggggtagtgctgtcgcaattttttgctctgtacgccagcatcaattcgtttcactgcctgaaaattatcaacacggaaagtcaggaggtctgggaatggaagagtaccggccagcacgccctgatgtga

SEQ ID NO: 72385 - DNA, 426 bp, Citrobacter koseri
atgacggaacgggatactggaatgcagggcagtttgtttgagcgggtgaggaatgcggccgggtcgtcatgttactcaccgtcgccaggacggttgttacagtccatcagacataacctggaaaacgttctgaatacccgttccggcagttgttatggctcaccagagctgggtattccggacctgaatgatgatgcactgatctccagcgattttcgccaggaaattggccgggggatccgtgactgcattctgcgttatgaaccccggctcgctgatgtggcggtggatgcggacatgcaggatgttcatgccccgcaggaattacgttttcatattgtggcgcaggtgaatttcaacgatgccagggatgttctggcgtttgacattctgctggataaccgccagcgctaccgggtggagtga

SEQ ID NO: 72386 - DNA, 1476 bp, Citrobacter koseri
atgtctctacaggaagaagtcgctcccgtcagtgctgctccggtaaccgctacgtcgttgctggataacattatggcgcagagccgttttcagcccgaatctgaaagttatgatattgcccgccagggtgtgacggcgtttattgccgcgctgttgcagaatgaagcggagtcagtcgatattttggcggttaacgccatgattgcagatattgatgatcgcacaggtcgtcagatggatttgattcttcatgagccggtgattcaggaactggaagcgctactgcgttcccttaagttactggtggagcgtaccgatccacgcgaaaatatcaagatctacctgctgcatgccaccaaagaagagctgctggataattttgagtttgccccggaaatcactcagtccggtttctataagcatgtttactccagcggttacggtcagtttggtggcgagccggttgcggcagttatcggtaactatgcgtttaaaaacacggcggcggatctcaagctgctgaaatacgtcagtgcagtcagtgcgatggcgcatgcaccattcctgtcctccgtcgcgccggagttcctggggctggaatcctggactgagctgccgggcatcaaggatatcggggcgattttcgaaggcccggcttataccaaatggcgttcgctgcgtgaatccgaagattcgcgctatcttggcctgacttctcctcgattcctgctgcgtcagccatatgcaccgggtgataatccggtgaaaagttttaactaccgggaaaatgtcagccacagtcatgatgattacctctggggtaacacggcatttctgctggccgctaatatggttgagagtttcaggcaataccgctggtgcccgaacatcatcggtccgcaaaacggtggggcggtaaaagatctgccagtccatctatatgaagcgatggggcagttgcaggctaaaatccctaccgaggtactaatcactgaccgtcgtgaatttgagctggcggaagagggatttattaccctgacaatgcgtaagggcagtgataacgcggcctttttctctgcaaattcagtacagaagccaaaagtctttcccaataccccggagggtaaagaggcagagactaactataagctgggtacccagctaccttacctcttcatcatcagccgtctggcacactacatcaaagttttgcagcgcgaacagattggttcgtggaaagagcgtggcgatctggagcgtgagttgaatacctggatccgccagtatgtggccgatcaggaaaatccgcctgctgaggtgcgcagccgtaaaccgctgcgtcaggccaaaattgaagtgctggatgtggagggggaaccgggttggtaccaggtgtcgctctccgtgcgtccgcatttcaaatatatgggtgccagttttgaactgtctctcgtaggtcgtctggacagagattaa

SEQ ID NO: 72387 - DNA, 498 bp, Citrobacter koseri
atgagtaatagtaaagacggcagtatagctcctaaagagcgtattaatattcgctatgtaccaaaatcaggtaaccagacggcggaaattgagcttccacttaatttgctggtgaccggtgacttgctgggaaaaccagacgacacgccgctggatgaacgacagccggtttctgttgacagaaataccttaaatgcggtgcttgcccagtccggtattgaacgacatgtttccgtaccatcggtgctcagcggtagggctgatgcacgaatggatatcagtctgaaagtgaattcgatggtcgatctctcgccggacagtattgccagtcaggtgccggaactgaaaaaaatgctggagttacgtgaagcactggttgccctgaaggggccgatgggcaatatccccgctttccgcgctcagctacaggcgttgctggataacgaggaaactcgcgaacagctaattcaggaactggggcttgccagccagaaataa

SEQ ID NO: 72388 - DNA, 519 bp, Citrobacter koseri
atgccaactccatgttacatctcaattaaaggacaaacccagggactgatcaccgatcgtgcgtttaccgctgaatctgtcggtaacatttacgtccagggtcacgaagacgaaatgctggtacaggaattcagccataacgttaccgtcccgaccgatccacaatcaggtcaaccaagcggccagcgttctcataagccgtttatcttcaccgttgcgctgaacaaagcggttccactgctgtacaacgcactggcttccggtgaaatgctgccgacgacagaactacactggtatcgcacttctgtggaaggtaaacaggagcacttcttcaccacccgtctgaccgactccaccattgtcgatatcgactgcactatgccgcactgccaggacgacaccaaacgtgagttcacgcaactggttaaagtttctctgacttaccgcaaaattgagtgggaacacgtttctgccggtacttcaggcgctgatgactggcgtgcgccgctggaagcttaa

SEQ ID NO: 72389 - DNA, 966 bp, Citrobacter koseri
gtgtctcatttattttatcctgaaggtaatgatttacctggctatgagtggtcacgcctactgggtcaaactcagggaacggattttaatttcgccgcactggctgatgctcttgattgtcagcgtgatttttatggtgcaggtattatatacaatgacggttatcgctcatttttagttcgcccctcaaaacgttcccccactccgggcctgaatcaaataacccatgtcattgtgactcaaaccacgcaattatctcgtgaagggatggagaaaagtgtcaaagaagccgtaaaagatccatcaattggaatagaaattgcgtcaacggcactatcctgcggagcctgtatactcacggctgttgcatgtgctgcgtctatgaccgccgtaccgcttactggcggtatgagtacacctctggcagtattcgcgactgccggaacgattgctacagcagtacagtgtgctaatggcctatggcgtttgtatgatataggacttaacgatgcccaaaatgttgactggattgatcagcagggatggtacacggccacctccactgcacttgatttaatttcactggtctcgcttgccggtccactaaaagaagtgatcatgacatacaaggtgatgaaatcgacctcttcaatgaaagtgatcgactggttaaaacgttaccccagaatggagcgagttcgtctgactgaagctatcataaaacaacttaacccagggatatctaacaaaacgatgaaagcgatgatccgcgcaggaaaatatcccagacgatatcctacagaaggacttcacagagagttaataaaacaactcatcagcgcgatgaccagcacaatggcggtttctggaagtgcggtcagtggtgttatacattcaccggaaagtatcagcacctccggtgaatatgtttttgggttattacagtctgtggacactattaattaa

SEQ ID NO: 72390 - DNA, 609 bp, Citrobacter koseri
atgaatataacgagagtattattgggtgcacagttcctgcgattaattcatgaaggaaaacaaactgactgcttgatcaaaaatggaggggcggctttactcaaacaatctaccccggaccaggaaaatgcactcaatcttcaatggttcagactttcaagccccaaccctatttcaattggggttatcgttatgttattagtagcctccatcgcatgggaatggacgcctataatatatttcttcaaccttcctgttgatacaagcacgatattatgtctatctattatgcctattgctggtgtatactccgcttttataccctatggattaggacgaggttataccagtggattaaccctcatacgccatttttatttttttaatatattattaacatcaatcacctttatcctaacactcgtacaaccagtagagttttatgaatttatgaggaaattgagtttcttctcattacaattactgatcctttatttgtctcgatacactataaatagcaaatcattttatagaataatttcatttcttcgcactttacgtctgattctggaagctaaaaaagaaagagaaatgctgcaaaaaaaatag

SEQ ID NO: 72391 - DNA, 2001 bp, Citrobacter koseri
atgtcattaaaaggactgcgctttacgttaaatgttgatggtcaggcagagacagcgctggccgtggtagattttactctttaccagcaatactctggtccatttgtgatggaggtaaatgtttccagtactcaattcactctagtggcttcggattttctggaaaaaaatgtcgttctgactatctggcaaggtaatactccacaacgctatatcaacggcattgtcactgcaatggtccagggaaataacaacggatggcagacaaattatcatctgaccatttcccctccactttggcgctgtggtttgcgcaagaactttcgtattttccagcaacaggacatccaaagcatctctgatattctactgagagaaaatggtgtaacagaatggaagtcccacttttatgaaaaccacccgccacgtgaattctgcgtacagtacgatgagtcagatctcgcttttctgacacgattgtggtctgaagagggaatcttcttttttgaaaaactgtccccagacgctaatgggccgcagcagacgctgactctatgcgacaatgttgctggattgcacaccatacccactccaatcctatttaacccaaacgcaacaacggaagtcacccctaaatccattagtttgttccgctatgaagctactgtcacacactcttcagtgcagagtcaggactacacctttaaagttcctggctggccgggactctatactcataaagctggcaatcttaacggccagcggtcacagtacgaaatttttgattatccgggccgttttaaagatgaacaacacggtcagaatttcacccgctacaaaatagatggctggcgcagcagtgccgaaacggccacttgtgccagtaattcccccaaactatggcctggtacacgttttaccctgtcaggacacccaacagccgaccttaaccgagagtggcaggtggtgagtagtacgctgacggggatacaacctcaggcacagcacggtagtcaaggacagggaacctcattcaccaacgattttactgtaataccagcggatcgaacctggcgttcacaaccatcacctaagcccaaagttgatggaccacaaagcgctatcgtaaccggccccaacggagaagaaattttctgcgacgagcatggtcgggttcgtgtgaaatttcactgggacagaaacagccccaaaagcagtgaagacagctcctgctggatacgagtatcgcaggcatgggcgggttcaggatttggcaatcttgctattcctcgtgtgggccaggaagtgatagtggatttcctcaacggcgatccggatcagccaatcatcatgggacgcacctatcaccaggacaatcgttctcctggcgaccttccaggcacaaaaacgcaaatgaccattcgctctaaaacttacaaaggcgaggggttcaatgaactgcgttttgaagatgccactgcaaaagagcaaatctatatgcatgcccagaaggacatgcaaacagaggtgctgaatgacaaaactaccacagtaaaccacgaccataacgaaacggtgaagaacaaccagacgatcactgtgggtgtcgggcagaccattaacgttggtagcaagaaagaagatggacatgaccaaaaagtcacagtcgccaatgatcagaccatcaccgtacaaaataatcagaagctggaagtcacaaaggatcgagagaaaaacgtcggaggcaaccagacggtcaccatcacgggtaaagatacggaaacggtgacagaagatcagaatgtaaccgtcaagaaaagctacacactcaatgtcactgacgatacaaaaatcatttcgggtaaatccattgaactcatctgcggcccctgctccatcaaaatggagcaaagcgggaccatcaccatttccggtctgaagtttaactttaccgccaatggtccggtggaaatcaagggcgaagatgtggacatcaactga

SEQ ID NO: 72392 - DNA, 1191 bp, Citrobacter koseri
atggaatttcgtaatctcacgccattctcagtgatggagtacgcgatggacgataaacaggatgaacggcatcgggtggttgccatgaaaaccggttttcgtctgctacaggacgccgatggtcagtggctggcgcaactgatggagaacccgccgctgccgttgtgtatggaggacgaattctcaggggaaatgaaccgctccccggtacagcgcgaaagcgacctcgcccccctgaaacccgcctgcgatattatcatcaacggaacagctcacacaccaggcgacactgccatgccggaaatgaccgcaggcgtgttgatgcgcaccccttccggtgacgtggtactgaataagaaactgcggataaccggtcagcgtttttaccggcgtcaggcgttaaccgggcaatggtacgaaactgagcctgaaccgtttaccaccctgcctctggattatcgttacgcttttggcggcgagtgccgggtggaagcagacagtgataatgcgaaacatatccccgatgcgttccgtctgactgacgcgcagcgcagtgagcatcctgataaagataatccacctctggcgcatacagtctgtccggtcaatccactcggtctgggctatacgcaaccctggtatctccagacctgcaaaatacagcagctcgaagccccccgaattatcgccgtggacagcccgttcaccctacagcattttacagacacccttgacggcaacgcggactggtttgctccggcatatcagccagccggttttggctgtatcacccgaacctggctgccgcgcctgccgctggcaggaacctatgaccaggaatggctggaaacacagcatcctgatctgccggatgactttgacttcggttactggaactgcgccccacatgaccagcaaatcctgtatcccgaaccggggccggagtttgtactgagtggttttcgcccggatggtgatatccatttcaccctgccagcacatcagggacgcattctgttgagagtcccgaccgggcagcgcgtacccctgccgatgtggctggacacgctggaaattgatactgatgccctgaccgtggcactgacctggcgcttcctgctgccgggcagcacaccagtaagggtcatggaagcacgttacagaaccaggagtgcccaggatggcagataa

SEQ ID NO: 72393 - DNA, 4365 bp, Citrobacter koseri
atggcagataattttaccgctcgccagaacgggcaatggaaagtcgtcagtaccaaacccgatgtctgtaaaaccccccgcggtgattccacgccccccgtcccctatcctgtgacagcaaatatgggtgccgcagtgatggtcgtgtcgtcggtgaaacttaacggttgcccggcagtggtgctggatcagagtaaaattccgcagaccatcggcgatacaccaggtgcagcaaaaggtgtcagcagcggcacagtcggtgatgtgtgtgaacctctggatcacagtcagacggtgcgctttggcggtaaacccatgttgcgacacaatgatgagttctggatgaacagccggaacaccgtcggtctgattgtaggtatgcctcctgtcgcaggagtgtcggctgatgacgctgacccagatgatgagcctgaaaccgaagaagaagagaaagaaggtggtggctggcttgatgcattgcagaccgggttagatgttgccggatttatacccggattcggtttttttgctgacctggccaatgcgggcatcagcgcggctcggggaaattatgctgaagccgccatgtcgctggcggcctccataccggggatcggtgatgcagccgccgccgggaaaatgctgctgaaagggaagaaagcggcaaaagcagcaaaactggccgccgagaaagccgcaaagaaaaaggcagaaatggaagccgcaaaacgggcacgtgcgctgagaaaagcccagaagaaagccgcagccaaaaagaaaggcggcaaaattaaagggaaaaacaagaaaaacggtggcaaaggaaaaggtgcggaaggaaaaaaatgtactaaacccggtgaacccattgatgccggaaccggcgattttcttcaggaactgagcgttctcaacctccctggcaccctgcccctgaccctctcccgtttctaccgttcacaagcaaaaagtggcggtatctttggcccgaaatggacggatgactggtctgtctctctgacagtacatgatgataatttgcacttcaccgaccatgaaggcgtggttctctattaccccatcccgcaggacggtatttttcatgataccgtcaactcccgccaggcacattaccgactggaaggcgacatgcgtgaagaacttacccttttcgaccgccgctcgcagcagacgcagatattttccccggcaggccacggcatttatctgctctctgccgttcatgaccactacaacaaccggattgattttattcgcacagatggcgtgctgacggaaatccggcacagcgacggttacacgcttgcactcgattggcagcaacagcggctaatgagcattgacctgaccaccccacaaaaacaacgcctcgttacctgccattatgacaacaacggcttcctggtggaatgcaacacctttcagtttacccatttgcggtatgaatatactgccgaagggtttataacccgctggcaggatacggacaaaacctgcgtggatatctgttatgacatgcggggccgggttatcagtacactatcaacggaaggttattacgacgaccgctttatctataatgatgaagaacactgtaccacctacattgacgccgaaggcggggaaacccactactggtataacgaagatggcctggtcactcgtagcctcgacccgctgggccgggaagaaaccaccgtctgggagaacacgcagcttcagtcccggactgatgcactggggcgtaccacggaataccagtacaacgacgaaggcgatatccgccaggtttccctgccgggcggctacagtctgtattacgactataacgaacacggtcagctcacccggctaaccgcaccgggcaatcaggtctggcagtgggcttatgacgagaaaggcaatatcgtcagcctgaccgacccgcagggacgtcagcagcagttcagctacaatgaacagggcaatttactccagcagattatgccaggcggtgccacctggcagtggaactacgataccctgcatcagctcagggagaccaccacaccagacggaggggtgacgcagacggagctggatattctgggccgactgctgagcgttaaagacccgctgggcttcaccacacagttccgccacagtaaaaaccatgccgggccagaaggcagcgtggaagagattaaccgcccggacggcgtacgggagctgatgcgccagaacagcgaaaagctgccggaaagtttcaccgatggcgaaggaaaaaccacccgctatgagtacggcgcatttgacctgctgactgcaatcgtccgcccggatggcgaacgactggaatgccgctacgacaaactcacccgcctgactgaaatcaccaacgccgaaggggggcattaccgcctggcgtatgacaaagccgggcagcttatcgccgaaaccgactttaccgggcgcacactgacctacgcatacgatgctgtcgggcgctgcatccgtaccaccttccctgacgatacacacctcaaccggcgctataacgtgaccgaccagataacggatgaggtggtgacacagggtgacagcgaacggacactgagtaccaccacttttcgctatgattccctctgccgactggtggaagcaaaaaatgatgatgccaccgtcacgtatgaatacgatgacgccagccggataactgccgaaacccttaacggcagacgaacagagttcttatgggaatatgagcgcgaccatataacgcagcgtttcagttcaggcattagagagtatttcacatttggggtgatgggagaattggcgcagtggcagataaccgaccatgccccgctgacatttgaacatgacctgtgcggacaggagatatcccggcagagtaaagccgggttcagcctccgacagggctacacccccaccggaatattgacagaacagcagaccggtgacccaacagaactgaatccacattacagacgaaacaatactctgcaccgtcaatggctgtacgacaaagcctacaacctgacaatgattgccgattcccaccgggggacgatggttaacagcctgacggagaatgaccaggtcagccatgccacctggaccggcagcagcaatatccccatgcgggaagaacgcttctcctacgacaaaagcctcaacatctcccgttgccagacctggatgaatgaggtgatgaagagtgaggcacaccagcgccagctgcatggcagggtgacatcacgggagtacaaagagtggcgacattcaacttcccgtattaacccggactgtgggatgccggaagaaggcaaatttgtcaaagtcatccgggatgagcagaccacctggaaatacgatattaatggtcgtctggtggagaaactggtggatcaaggcggctaccgccctcttcactggcgctaccgctgggattcacggagtcagttgaccgggctggagacaccggaaggcgagcgctgggaatataaatatgacccgttcggcaggcgaatcagcaagcgctgtaccaaccgggacaaacccggtatgtattttcactggaacgtcgaccggttgaccgaagaaatcccggttaacgctgatggcacaccggatgacgaaaacgcgattcggtggatatacgagccggggagctttacgccgctggcgcgttatgagaaagggcaactgcactatgccatcacagatacggttggccgcattcaggagctgctgaccgaagacggcacgattgtctggcggggtaaacagcaattctggggccgggaagaaagtgcgaacgacgataaccactcatgcagactgcgctttccggggcagtatgaggatgcggagtcagggctgtactataaccggttcaggtactatgattgcgagacagggcagtacatttgtgcagacccgatagagctgagggggggaataaacctctatagttacgctccgaatcctctctcatggatagatccgctgggattaagttgtaagactgtcaaagctaaaagtcgaaatgatgctttgagacaagctcagcagcatgctcaagtaccacgaatttcgcggggtggtgaaaatattggtctggatgatttaaatttaaccagtcgtggaaataattggggtaaaatgaaagccaatggagggcaatcattaggtcggcgtaatcccaatgggaaaaatcaatggtttgaacaccccgacggtcatcctgatgctggacaagctggtattcctgagcatcattctggtggtcatatacatgcgatagatcctaaaggtaatgaggtgatttttacatggtaa

SEQ ID NO: 72394 - DNA, 615 bp, Citrobacter koseri
atggtaaataatatgcctgaaagattaattaaattccccatttccgaatggatggttcaatcaggtcgtttcaaaactgatttaccatcggtagcttattgtatttgctaccaatacaatatagatagtaatggatatggtccttatggttttttaacggaaagatcggataggttattgtcaattttatttactaatcttatgttttttagtaaagagggcaaaacgcttgatgcttgctcaaccctaagtaagaatggggtttatttttatggtaacaataatgatcgaatgaataaacagttagtggagtatcgcaaggtgcttctgaaaaataagctaagaactaacaaaggattattagaagaaacctgtcctgaaaaacctatattacttaatctctataatgattatggtggaattgaagtaagtgtaataaattctttaatagaagaaggttatcactttctatttgattgtttttttactccagtagccgggaaaagtataattgtttttgattgtaatatatgggatagagccattgaatattgcaaaaacaatggaattgattttcaagaggttgactcagttgataatttgaaagaatggtaa

SEQ ID NO: 72395 - DNA, 147 bp, Citrobacter koseri
gtgacggtgaagatttcagaggggtgcattgtgctgatggctgagtgcaacgaggtgcaggagctgcgcgagcagctttatcaggctaaacagacggttaagggaatgcagaaagggatgtttagtatgctgaacgaggctaaataa

SEQ ID NO: 72396 - DNA, 1101 bp, Citrobacter koseri
gtgacatatttttctgatattgatctttatcaattagtttatgatgagaatatctccgcattatctgattttctttatagtcatgatatttctataaatgaaaaatacttaggtgattctttattacacattgctgcatctaaaggaaaaattcgtgtttgtaaatatttagttgataaaggaatcaatgttaattctatcgatgaccattatcttacacctttggttgaatcagcaagagagggacatctagatgttctgtgttttttactcgaagtcggagcttggagcgatggcgatcctagggggattacaacgccactaatagaggcttccttaggtggacatccagagatagtcaaaatattacttaaatataaagttaatattaacaggctgcaaacaaaacttaattgcacagctctcgatatttcaattgcatatgggcatgaacatattgcgtcaatactggtctgtaatggtgccagaaaattgttagaggttattgaattaaaaaatataaatggtagtggtatcttatcacatatctatgataatgcaggtgttattattacagatgaatatataagaggtaatgtatcaataaaaacatctctaatagggaaaaggaagcaatatataaacaataaaatattatttacatttggaagttttgttaaaaaaccatgcagagaatttcttatctgcctcccatatggctggccgataaacgttcaaatatttagtggggactatagagaagctttcccattaaagtttttatttttactatctgaattatataagaatggtatggatgttaaagaaggctctattttagaaaaacaggatatcatctggagtcaactgaaatggccagaaaatattgatgctttagtcgcggtagattattcgtttgatcatcaagaaaaagaacaaaaccttgaaggtgagactgtcgatttgctattgtttattccaattaaataccccaagtcagggcgaccaaaagaagataaactcaatcaatggattactaaacggcgtattgctaaatggaatagtgtatcgtttaaaaatgagtggttgtccccagtatga

SEQ ID NO: 72397 - DNA, 450 bp, Citrobacter koseri
atgactgatatcatttttgatgaagctctctaccctatagcctggcgtctgaattcagaagattgtcgtttatctcctgatgagaaaagaaagattgtgcttcttaatggggacgagtctgagaagctttgggatctagtttttccatttgatatgttaatgagtattaaaccatcgcaatgtcgtatcattgaaaaaatggaattagattttgatgaggcagaagaatctgcatttttttttcgcgagaagttaagagggttctccgatattttattcttttgggggcggagagcagcggctattgtcatttcttcagatatttttataaaagcatgggatgattttttctatcctagtgatgaagcgagcattatttatattccgaatacaaaaaatataattttttcttatgaagaaatatttttctatgctgaaatattaaaataa

SEQ ID NO: 72398 - DNA, 447 bp, Citrobacter koseri
atgagtgtatctgaatataaacgagcattgctctatagaaaagctcaggctaatgtatgcaaaagtgattattttaataaaatacaagcatttaccaatggtgttgttgaggatggtaagtttcttaccctggaagaaactgatggtattataaattttctcaaagagaaggaaataagttcaaaaactaaattgaaaattgataactgtcaacaagttgttgaatttatcaaagagaaagttgcaggtctttcttcttatttattaattgatgaagaatggaagttttgcgaaatatataaaataagcaatgagttttttagtgattataatttttataaattacattcagacgagataagaataatatattgcaatctctcttttcagattcaaatagactatgactacaatgaaatagagtgtaaatatattctgtataaataa

SEQ ID NO: 72399 - DNA, 462 bp, Citrobacter koseri
atgttccaaaagataacgcttcttttaactctgatgtcgtcgggcattgttgcttgtattgcagcggaaccagataaaatacagtcaggcagcattgtcatgaatagttttgaggttggtgagattcctgacctggggcaccccgtttgcaccctgagcctggctaataataagaaagtggatttctataactatgttgaaggagatatctgtcccccggatggaagaaattgtacgtacactgctatcatgaaattaaatggggaaatagctatattgaaacaaatatcgtcaggtgaaaataactcagtatatagaaatagtgatttctatatttccataaaacagactccgatgacagaaccaaacaatgatgagggaagcgacgttaaagctactatcgtcctcaaaacaaaacaaaacaaaacaaaacaaaacacagtgaaaagattcttaatatga

SEQ ID NO: 72400 - DNA, 861 bp, Citrobacter koseri
atggaaatatcaacacacacgctttctgacggtatcgttctgacacatcgctcacctgcgagcagtacaaaaaatccagtgattattttgtgccacggcttctgtggcatcagggacattctgttacctgagttcgctgaagcctttacccgtgcagggttttccacgatcacatttgactatcgtgggtttggcgacagcgacggtgaacgtggccgtctggttccctcaatgcaaattgccgatatcctttccgttattaactgggcaagggaacaacccggtcttgatggcgaaagaatcggtctctggggaacatcatttggtggatgccacgtctttggtgccgcagcccgggattcggggatcaagtgtattgtcagtcagcttgcctttgcagatggcgaggttatcgtcaccggtcatatgaatgaagcagagaaagaggcgtttattgcaaccctcgacaaaatgtcagagaagcaaaagaacaccggaaaagagatgtttgtcggagttacccgcgtattaaacgatgcagagtcaaaggccttttttgaggaaaaccgggcacagtatccgaagatggacatcaaaataccattccttacggtgaaggaaacgctccagtacaaacccgcactgaatgccgcacaggtgagctgccccacgctgattgttattgccggtaaagataccgttaatcctcccgaacagggacgggcattgtttgatgctgtcggtgcaaaagagaaaaaactgtatgaagagaatgaagcccgtcattacgacatttatagcggagaacacttcagacaggtaatctgcattcagactgaatggttcagaaactatctgtag

SEQ ID NO: 72401 - DNA, 720 bp, Citrobacter koseri
atgattgcaattatgttacgtatttccatcctgctaacctccatgttttcattcgtggttaatgccagtatatcgatccaatgtagttatcctgattcgatagctgcgttgaaagtgcatgaactgattacatcattagaaacgaacccaaacgaaataagaaatttttgtattcaacgtaatgatgatggcagatatgttgaactacgactcatcgatatatccagtggaatatctttcggtaaacatgcatatcctgcatgcgatatgaatactgaaacatttacaccatggaacccgagtctggctgaaattacgcaaatgtatgattgggacactgtattgatgtccctcgtggtacgcgcatttacttacgatgccgaggacaatacggaattaaagcatataggtcaaacgattttagaatcacgacaaacttcaacagttgctataatctctccccagaatcagaacctgaaagaaacgtggtgggaattgacaagtatcggaactgttgagggggatggggacggactgatttcaatagaaaaaattgagggggacgatcttgagtggtatttaaatgaccagcctattgttagtgcaggggggaaaaacacaaccgaaggcggcggtggtgaattaaaatatggctacatatctaaacctggtgtcgatggcgcgtcttcgacatataaactgacattagattgcccttaa

SEQ ID NO: 72402 - DNA, 534 bp, Citrobacter koseri
atgaaagtcagagggatgtttggtgcgttctatatcatcgcgggtatgatcaccataatggatttatccgctgcggtggctgcaacaaccgcgtcagagagtataaaaattgtccgcagatggcctgcatcgacctgtaagtttacgaatgaggtacagacggtgttgtttgatgatatcttcgcgaatgcctttaagcgtgaaccgatacagggtctgaagtctttttctgttggtataaattgcggcacgaacgtcagtaaagtgaatattgtgccatcaggggacccggatgatgtcgatatcagtgcattcaagaatattggaggtgccagtaatgtggcattacgtctaatggacaccaacagtaatattctgttacctgatggtacctcccgtgtttcactcattcctgagcccgtaggcgaggaaactagctacacttttatagccggatatgtggcgataaaacccgaaagtgtaggcgctggtacattcacggcctgggtgaacctgacatttgattatgactga

SEQ ID NO: 72403 - DNA, 2592 bp, Citrobacter koseri
atgtatttactcagaacgatagcaatatttattccggtatcgttttttcttttcctgaaacaaactgctgccgaaatgattttcccaaaggagttgctgaatatcagtaatggttccattgcggatatatcgaacttcagcgcggacgggacacaattgcctggaacatatgaggttgatatttatttgaatggctcatttatcaaccgaaaaacagttgaatttaattctttacctgctaattccatgtctgaggcaggcgtgaaagataaaacaggacttttcccctgcctgacatcaggggacttaggcattatcggagtcagaactgaactttttccagatatgaatggacagcaaaatagtaattgtatattgctggctaaacagatctctggtgcattttataaatttaacttcgcagggatgcgactcgatatcagtatcccgcaattgtatgtgcgaaacacttccagaggttacatagatccggttttctgggatgacggtattaacgctgctctgctgaactacaatttcagcggcagcaaccgttttacccgttcggaaaatgacaaaaactactttctgagtctcaacagtggactgaatgttggtgcgtggcgactgagagattttcatacgtggacctattacgaaagtcggtatggtcgccgtcagcaatggcagcgtataaattcctatgtggaaagaccactggtttcgattaaaagtgcgttgttaatcggggaaggtacaacatcaggcgatatttttgattctcttcgcttcagaggggggcaaatgacaatagacgacaatatgtatcctgactcgatgagagggtttgcccctgttgttcgggggatggctgacgataacgctgacgttaccatcagccagaatggttatgtcatttataaagccacggttccacccggaccgtttgagattaatgatctgaatccgatggcggccagtggggatctcagtatcactgtcagtgaggcaaatggaaaagtgaatgtattcaccgttccgtacacctctatgcccattttgcttcgcaaaggtcggatgaagtatggtctgacgctggcacgttttcgtggcatgagtagtcggtatggtgatccattgtttatgcaaggaacactggtgtggggcggcccgggaggtacaacgttttatggtggtgcacagtattcaccggattacctggccgttcagtccggtgcaggtattgatatgggacggccgggggcgctttccgtcgatataacacatgccaacagcactctcgcaaatggaaaggattatcgcggtcagtcagtgcgttttttatattcacgtatatttaatgatacaggcacccgacttcgtctgacgggatatcggtactcgacaaaaggtttccatactctggaagaaacagcactcaggaagatgagaggacgtctgtatgaccatgacgaactggatcggtatggtcggccggtaacggatacccactctgattattacgacctgaccaacagcaaacgtgcccgttttgaagccagtatatcccagcctgtatggcgctatggctcagtgtggttgtctggtgtcaggcagacttactggaagagtaaccagagccgtgattctgttcagattggatacagcggtacggttggttctgttaattattcaataaactacgggtatacccgccagaagaatgctgctgtgccttcctggactgaccgtacgatagggctgtctctttcgcttccactgggaagattactttcgcctgactccgggaataacaacacatatgcttcgttttacgggagtcgtgatgggaaaggccggaacagccagatggcagggctgagtggcacgctgctcgaagaaaacaacctcaactggagcgtatcacagaacctgagtggtcaacggaatggttctggtaacgccagcctggcctataggggggcatacggtaataccggtataggatacagctacggaaatgattttcagcagtttagttatagcatgtccggtggtgcaatcctgcatcgcaacgggctgacgatcggacaaccatccggtgaaacagctgtgcttatttcctcccgtggtgtgcagggcgtcagtattcagaacgaaccgggtgtcagaacagactggagaggctataccatcaagccctacactacatcctaccgcgaaaaccgtgtttctgttgacagtaaatcactggacgatcacacggatattgttgatgccggtacagccagaataatcccgacaaagggggcagtggttcgtgttgattttaatgtccgccgtggctatcgcatattatttacgctgacacgtaatggcaaaccacttccttttggttctgttgtcacagggggcagcacaagtggtttggtcggcgatgacgggcaggtttatctgtctggaatgcctgaaagtggtgaagttcaggtgagctggagtaaagatgtgaatcagtcatgtgtggtcagctatcatttgactgaaaagttactcgcctcacccgttgcccgcgttgacggaatatgtcgatga

SEQ ID NO: 72404 - DNA, 702 bp, Citrobacter koseri
atgttcctgttggtaccgaatgtatttataacggctatcctgttgttcgcaggtatgattatgccagcattatcatacgctggtgggatagtgttgaatcagacccgaattatttaccctctgaatcagaaacagtccaatattacggttcgcaacacctcagagctggaacgatatatgattcagtcatgggtggaagatgcttccggtgggaaaaaccgtgacttcatcctgacgcctccactttttgtcagcaacccaggggatgaaaataccctgagactgatgtttctgggaggaacgttgcccactgacagagagtcactttatcgcctgacagtaaaagccataccagccgttaataaagatgaagtgaaagaacggaatgtactgatgctggccacagcaatacgaataaaattgtttgtgcgcccggatggactactgccgcccgttgaaaaagcgccttctgagctgaattttagtcgcaatggttcagagattacagtcagtaatccgacaccgtattacataacaatggtgaagataacagtaaacggaaaagtagtctcaaagaacgtcatggttcctcctatggggcatgaaacatttccctcacccacacatacctcggtactgacctataaggtcataaatgatcacggtggaatgtccaatgaattgactggcgaaataaaataa

SEQ ID NO: 72405 - DNA, 528 bp, Citrobacter koseri
ttgaaaataaatacatttgcgatttttatcccggcgatatttatggtttcttctgcacatgccgttgaaggggaaaccagctcggttgtgttcaccggcaatatcgttgaagcaacctgtgaactgtcttccggctcccgtagtaaggctgtcgaacttggagatgtagccacgacggcatttattgctggggcaggcagtaccactgcacctaaagatttcaccatcgatctggaaaattgtggggaaagcgcggggtcggctagcgtaacattctccggcgatgttctggctgatggcgaagatgagactctgaacacatctggttttgccactactggtgtggggattcagatcctcgagaacggcactccactgaaactgaatggttcccaggcatccagcgcaaaacctcttgatgagggtaacaatgtcctgccattctccgcccgttatatttcaacgttggcaataacccaggccggtgaagcaaatgcggttgcaaactttactctgaattacgaataa

SEQ ID NO: 72406 - DNA, 624 bp, Citrobacter koseri
atgagtaagttacgcactgcaattatcgtggatgatcatcccctcgcgcgtctggctatccgtggagtgctggagaaacagcgcattactgtaattaacgaatatgaagacggggcgactgcgctggaagcgttaacaaaaacggctgcggatattgttgtcgtggatgtcgagatccccggagtgaatggcgtcgaactggtagaaaagctcagagcacggcagttcaccggcgtgctgattgtcgtgtccgcgaaaaacgatcgttactacagcaaacgttgcgctcaggtgggcgctaacgctttcatcagtaaaaaacaggatatggaaaacattctggccgccattaatgcagcgcaaaatggttatagttattttccttttttccttgaagccccctcagttgcgttaaccgatgcacaacgcctggaatccctctcggcacaggagatgaaggtgatgggctatatgcttaatggtcttgataattcacaaattggcgatgcaatgcatatcagcagcaaaacggtcagcacctataaaacacggttaatggaaaagttaggctgcaaatcattaattgaactgctctcatttgcccaccaaaataagctgacctga

SEQ ID NO: 72407 - DNA, 3183 bp, Citrobacter koseri
atgatgaataaatggctcatattcgtgctcattgttttatcgattaccgggcgtggcgttcatgcccaggatgagctacccgttgagctggagttgtcgggctacaattacattacgccggttcctgtttatctgagtgaggatgacaagcgctggctgaagcagaaaaaaacacttaaggttgcggtttatcaaccagagcaatcgcccctcgtgcagaccacgctcacaggacgttaccgtgggatgaatgccgattatcttgcgctgattcagcattcgctcaacacccacatcagcgtgacggcctggaaaaatcaggaatcggcaattcatgcgctgaaagcgggcgaagtcgatatggtattgaccggtctggagagtcgccctttcaccgaagaaggcattctgtcctcgcagccgctggtacattcctggccaaatttagtgacgtcgttagccaatgtcatggttcccttgcagagtgcgcaaagcacccgggtcgctactgtgaatcactatcctgatgaggggtttattcagcagtcatttcctaacgcagagatcattaattaccccacctatcaggaagcactcagctccgtcgcgcatgggcaaaacgcctggtttgttggcgactcactgacaaccagcacctggctatcgcaggaatttagcctcgcgttgacgacggtgaaatactggcctgaaccacagaaaaaaagcgcctttttatttttgccaacgcaggaacgtctgctgacaattgtgaataacacgctcagcgccatcgatgaaaacgtgcatgggcaaatagcccagtcaatgatcgataaaggcaatctgtcctttctgttagagccgcttaacctgaccaaccgagagaaacagtggctaaaaagtcataacacactgcgtgtcatcattaacccgtggtttgcgccttacactatggtcgacagtaaccaggaaacgcggggcgtggtgggggatatcctgaatctgatcggtctgcaaaccggtatgcagtttgaaaccattgtcgtcaaatcgaacgaagaaatggtttctgaaatgaagaaaaacaactggcatattgtgcaggccgcaacctacgatttaagccgtgaaaacgcgatctcctttacccatccctttattaccacccaattcgtcaccgttgtcagaaaagagaatacgcaggagaccacgctacgggcggggatgagtgtggcgatcggcgccgaccacgcgttactggcaaagcttaaagcccaacaccccggcatccaatggaaagaggtggaaaactccagcgtagccttgaatctcgtggcgacgggaaaggtggacgcggccatttcaaatcagctgacggcccgctatatgagcgagcattattatcccgatcagctcgcctggctcccgattcccggtgaagcgccggcggcaatcagttttgccgttccccgttccgaaccggaacttcggcagatcctggacaaagccctggatgatatcccgcaaaaagagattttccagatcgtcagtaaatggatacgcctgccggacgtcaaaattgatacctgggagttgtataacagaccgttctatctggtggcgatactggcgacgttgctggtggtgagcagcttgctgtgggccgtttacctgtcgcggaaagtccgccaaaggaaacgttctcaacgcttactggaggcggaacgaaacaaggcacagcaagccaatgaagagaagcgggaatttctttcccatatgagccacgagatccgaacgccggtcagtgcaattatgggatttctggaactcttgcagctctcccccgctcgcttcagccctgaggataaagcatcggtggatcaggctgcccaggcctcgcgatcattgttaaaactgattggcgagatcctcgatctggaaaaaattgaatcaggactcttagacaccgttccgcagtgggtaaatgttgatgctctgataaaagaaaaaatgactctgtttagcgcactggcggcccaaaaagggatcgacctgcgttatgactcgcggctggacccgcaagaggcgatgcatctggacccccagttgctggggcaggtactcaccaacctcattggcaacgcggttaaatttacgcagcaagggtatgtcaggatttcggcgacaaagtccaacgcgatgctggcgctctcggtaagtgactccggtccgggtattagcactgaagaacagaaccgtttattcaccgcctttagtcaggggaaagcgggtaagcatcatcgcggttcgggcctgggattagcgatcagccgggcattgatgacgcaaatggggggaaccatcgcgctgcaaagcgaaataaaccgtggaaccaccctgacgctgaacctgcccgtgcaaacctcgcgtgatatcacgccggtatctattgacgcgcccccgccccctcccgttattcaggggacgctgcgggtattaatcgttgacgatcatccctccagtcgactgctcctgaaacgccagcttgcaacgtcaggtattgttgcggatgaagccgaaaacggcgaagaggccttacgacaccttcagcaacagcattatgatttgcttattaccgacctcaatatgcccgcaatggacggcattgaacttacccgtcaggtacggaaatttaatcgcgacctcaccatctgggggttgaccgcctcagcgcaagaacatgaacgcgaacgctgtcttgcggcaggcatgaatgcctgtattttcaagccgattacgttatcgcaaatctcgcacttcctttcaggaatgtgtgagacagccaatacgatgtttgatatcgaaatgctgggtatgctggcgcaaggcaaccgggcgctcatgcttacagcgttaaaagatgcacagcaggagaaccgccgtgatttagtctccgcccgacaagcggcgcatactgaagattatctgaccgtgaagcgccatattcatcgcattaacgggactgcccaactgctgggcgttaaggcattgatgaaggtagcgcagtcgctggaagataaactacctgacgccatttccgccgcagaccttgccacagaccttgatcgcatcgacgccttacttgatgaattagatcaggctatcgcaacattcattccataa

SEQ ID NO: 72408 - DNA, 573 bp, Citrobacter koseri
atggatttgtcaaactccgttttttctgatgattatttttttatcgtcggtatcagtacgctgttaacatcggagttgattgatgaaaattactacatagtagatgttgagacaacaaacctcctgcaggttaaagagcatttttttgcagacaggaagattattgcgtttataagcaatgatcttgactactatgcattaaaacatctacggagtattacgtttgttgataagcgaagccgacttaatgaaattctgtcctgcctgtttgtcaatgattcccgatatatttatcgggtgaagtacacgctttcaatgcgagaaagcgaagtgctctcatgtatgcaaaaagggcttgatgcgaatgagattggtaaacaattaggtatgacggttaagacattttatgcccaccggcgcagtttggtttttaaacttcaggtcggcaatcgtatatctttgtaccgaactatcgcacgagtagaaagttataagcaggacacctgcgaacacagtatttcgttaatcagacaatgtcattcgtcagataagtatttcactggagggaattag

SEQ ID NO: 72409 - DNA, 519 bp, Citrobacter koseri
atgaaaaagattgcactgatttccgcgattttatcgctctctgtatttcaggcggcaaatgctgctgacggcgtaattagttttactggcagcatcaccggtacggcctgtgtggtggatacctctgcgattgcgcagcctgtcaacctggggactgtcgcgacaaccgcattctcaggcggtagcggagcaacggcggcagcgaagcgttttaatattgtgctgaaatcctgcccggccagcatttccaacgccagtattcgttttgatggcatcaccgacacgattaacccttctattttagcgctgagcaatgggcagacagcgtcgaatgttggtgtcgcgatttatgagcaggacaactcaacgctgatccccgtgggttccgcatcctccagcgtagcgctggaagaagatgttgataacacactgacttactttgccaaatatatggcaaccggcgctgttggcgcgggtacggcaaactcttcaaccgcgtttaccgttatttaccagtaa

SEQ ID NO: 72410 - DNA, 678 bp, Citrobacter koseri
atgtttcagaaaatctataaaaagattgccgttggtcttttgtttatctccgcaacggcaataagcggtgtggaaataggcggcacccggcttatttataacggcagtggcaatcaggcggcaatcagcgttaacaatccagataacaagccgtatttaattcagtcatgggtgagcaaaagtgaaaatggcgacgacagtgacaatgcattcatcaccacgccgcctttattcaaattaaattcgcaggcgcagaattcagtacgcgttatgttatcaggcgacatgctccctacggacagagaaagtgtttactggttgaatattaaagcaatcccttcgtcatcaccggatgctaaaaatgaattattgattgcggtcaaaagtaaaatgaagctgttttatcgtccggcaggattaaaaggcgacccttcgcttgcgtatcagcagctaacgttttcaagcgtgggtggaaagttaagtgtgcataacccctcgtcgtatagcgtgtcgctatacgacatcaaggtgaatgggaaacaactagcaaaacctccaatggttttaccatttcaaacggtatcgctacctcagtcggcggtaacgggtggtgaagtatcgtggcgtgcgattaatgacttcggaggcattacgactgaacataaatttaaaatgtag

SEQ ID NO: 72411 - DNA, 2502 bp, Citrobacter koseri
atgtttcatgtcaatgcagtttcgggttttgctaaattaactcggttatccacacttatttatctgtgtacgcatactcctgctgtactggctagcgattatttctctccagattttattgaaacccgtggaaatatcccgcgtgatattgatatttctcgttttaatgaagctgacgggcaggtgcctggcgtctatcacgttgatgtctatgtaaatggaaattatctggcatcacaggatatttcatttattgacagtaagagtgggttaataccggtgttgactcgtgcagatctggtgcaatggggcgttaagcgcaatgcacaacctgaatggatgcacatggcagataccgcgaacgttgaacacctcagcaaactgcttcccggcagccagcttattttccagtttgacgggatgcgcctggatctctccgtaccgcaggagtatctacagcgcgatccccgggggtcggtatcgcctgagcggtgggatgacggactgaatatgctgttcctgaactacaacttctcaggcgctaacacgcatggcagcgacaagtcgagtaacgacagctatttgaacctgcgtagcggtattaacgttgggccctggcgattgcgtcattacgccacttataacaacaacgatggcgctggtcactggaacacccttggcacatcgctggagcgtgacattaaggctctgaaaagtcagttcagcataggcgatggttatacgcaggccggtgtgttcgacagcgtgaattttcgcggcgcgcagctttattcagatgacagcatgatgccggaaagcgtccgtggttttgctcccgtggtacgcggtattgcacagaccaacgcgcaggtcaccattcgtcagggtggcaacgttatctggcaatcttatgtgccgccaggcccgttcgcgattgacgatctgtacccgaccaccgccagcggcgatctggaagtggcggtacgtgaggcggatgggtcggtgcatcagtttattcagccattttccgcggtgccggtgatgcaacgcgaaggtcagttcaaatatgcgctggcagcagggaaatatcgcgcggcaaacaacaaagataaagagccggaatttctacagggcacgctgagctacggtttaccctgggatagcacgatatatggcggcacgctggcatccgcagattactgggccggagcactggggatcggaaaagggttcggtgaattcggctcgctctcttttgacgccactttcgcccgtacgcaactgcccggcaagacagaagaaggcgtgtcgttacgcgcgcaatacgccaaagactttgcttcgacaggcacctcattcagtttgatgggctatcgctattcctcatcaggttttcgtgatttccaggaagcgaacggggacgtgaatacctttcgaatggggagcgacacaatacgtgaaggcaacaactggcgctatgaacggaacaaacgcagcaaggcgcaggtgacgctgagccagcgacttgacgactggggaaatataaacctctccgcctggcaacaggattactggggcggcgacaccgagcgcagcgttaacgtgggttacaacaccagcataaacaatatcaactacggcctgaactacagctattcacgcggcccctggcacaatgaaaacgatcatatcgtctctctgacgatgcagattccgctctcacgtttcctgccagacagctggatgacggtatccgggaacagcaacaaaaaaggcgatacgacttcgcaggtggggttatccggttcagagctggaagataaaaacctgagctggaatgtgcagcagggctacaacagcaaaggctcggatgcgatgggaagcgcttccgtcaattacaaaggccgtcatggcgagtatcagcttggttacaactactctcgcgataaccgccagatgtcggttggggcgatgggcggcattgtggttcacccttacggcgtctcggccacgcagcctcttggcgaaactatggcactggtgaaagcggacaacgcggcggatgtgaaagtggcgaataacagcgggatttacaccgacagcagaggttttgccgtggtgccgtatgtcacgccgtatcggcagaacagtctgtcattggataccgcatcgctgaacccgcataccgatgtgctgaatgacacctacaccgttgtaccgaccaaaggcgcgctggcgctggctgattaccctaccgtcaccggttataaggtcatgcttcagttcaccgggaaagagattccgtttggcgcgacgacccgtattaaaaatcacgacaacattccagaaggaatggttgacgatcgcaaacgcgtctggctcaacggcgtaccggaaaaaggaagcgtgatcgttaactgggccgagggaagttgtcaggcaacgtatcagataacgcagatcgctgacaaaccgcaaacagtcatcgtgcaatgccactga

SEQ ID NO: 72412 - DNA, 1014 bp, Citrobacter koseri
atgtatcgaattttaatcagcttaatttttacctcgctggggttattttcacacaccgccctggcgtggaactgcactacggttacgtcaacaacaacgatctcaccgcagaatgtaactatctcgcgggatctccctgtaggctcaataataggaacacaggttattacaccgacaattaatgcctttaactgttgggactccgctgagggcgttatatccaggcagatttttggtatcagagccattggcacattcgattcgtcactcaacgggcgtcagatatataaaacgaacattagcggcgtggggtattccctgtccgccgcaacgacaaaatgtgccgcaggcatcgtgaccgttacgggaagcaataccatacggggagacataaataccgctaagctctgtgaaaatatggcggggatggtgaacagcaatttggatggcgtggttatcgtgacgttttataagacggcagccgaaaccgggtctggaaccataacggcaagaaccgtgggatcgctggttatgttaaataacgcgctgctgtggcattcacccgaatcttccgtcaatatcaatgcgttcacggttaccacgccagcctgtaatctacaaacgacgtttatccccgtgaatatgcaggacgtggataaacaagcctttaatggcaaaggcaccacgccgggagacgcacacacaaagtctttcgatctgccgatggtttgtaacgccggaacaaaggtcagcgttaagatggaaggcgatatttttgatgcgagcaaaggcgtgctgaaaaccattggcggaaataatgccgccacgggcgtgggaatccaattactttataacaatcagccgatggcgctgggttcagatgtcgccgttggcacctcatcctccggcggcggattcacggtgccgctgaaagcgcgttattaccagaccggagacaccatcacgaccggtgcagcgaatggcgttttgtcatttaccatgacataccaataa

SEQ ID NO: 72413 - DNA, 426 bp, Citrobacter koseri
atgaagattggtgaactggcaaaagtaacggggcttacgccctcccgtattcggttttacgaagcagaagggctgatcagtcctcctcagcgtcagagcaacgggtatcgtaattattcggcggaggtggcgaatctgctgaagattattgataacgctcagcgtgccggtttttcacttgagcagatccgctgctttttaccgcaggagcagaaaaagtgggatcacgaggggctgatacaatccctggagaagcgtatcgcggagatcgaactcatgcagaagcagcttgaagagagcaagagcgagttgctgagtctgatcgccagtattgcaaaccggcctgacgggatttcctgtgaggacaacatgcagcggctgatagggcaattgcgtaatcctgcgaccgccacggaaaaccggtaa

SEQ ID NO: 72414 - DNA, 831 bp, Citrobacter koseri
atgggttacgtaacaaccagcgatggcgttgatattttctataaggactggggaccgaaagagggaaaagtgatcttcttccaccacggctggccgctctccagcgacgactgggatgctcaaatgctgtttttcgtggacaaggggttcagggtcgtcgcgcacgacaggcgtggtcatggacgttccagccaggtgtgggacggtcatgacatggatcattatgccgatgacgttgccgcagtcgttaagcatttaggcgtccagggcgcaatgcacgtcgggcattcaaccggcggtggcgaggtcgtgcgctatatcgtgcgtcacggcgaagataacgtctccagggccgtgctgatcagcgcagttccgccattgatggtaaaaaccgacagcaatccgcagggtacgccccggtcggtgtttgacgacttccaggcgcagctggccgccagtcgggcgcagttctattacgatatccctgcgggtcctttctatggctacaaccgtccgggttccagtccgtctgaagcggtcatctggaactggtggcgtcagggaatgatggggggagccaaagcgcactacgacggtatcgtcgcgttctcgcagacggatttcacggaagatctcaagcgcatcactatcccggttctggttatccacggcgatgacgatcaggtcgttccctaccatgattccggcgtactttcagccgggctgctcaaaaacggtacgctgaatacgtacaagggagccccgcacggcatccccaccacgcatgcagatcgggtcaacgccgacctgctggcctttgtgaatagctga

SEQ ID NO: 72415 - DNA, 978 bp, Citrobacter koseri
atgctggatcaccgcccgaactcacaggatgatcgcctgcggcaggacaccgcatcgttgcgtcacgaaattaccgcaaaagtcagaacatataccgaacatcaggagcgggtcgtctgcccgttccccggtctgagcgtagctgaactccacggcccaatgccgccgctttcttatatttaccagcccagcgtgtcgctgatcctccagggagaaaagcgcgtcacgttaggcgatacggcctatgtgtacaacgaatcccgttttcttctgacggcggtcaatctgccaaccgtcgccgaagtgatgcaggccagcaccgagcgtccttttatatcgctgttgctggaactggatttatctgttgcgcgcgaagtattggttgatatggaacagcacggcaatgacgtgggattcgcaggcgaaggactttcgctcagccatgccgaccgctttttgtttgacgctatactgcgctacatcacgctcgcagaacgcccgcaggataaggggtatatcggcaacctgattcagcgggaaattctgtatcgcattttaatcagcccggcaggtatgacgctgcgggaaaccgtactgacgggatcgagcagccagaggatatcttccgcaatcaactggttacgcacgcactattcccaaccgttaaaaatggaggatctggccgggattgcaggaatgggcgtttcgacgctgcatcaccactttcgtcgcatgaccaacatgagcccgttgcagtatcagaagcaattacggctccatgaagccagacgcctgttgttgtcagataatgtggatgcctcgacagcggccatcagagtgggttatgaaagcgtcagtcagtttcacagggagtacaaacgcctgttcggcatcacgccaatcggcgataaagtgcagtcgctgaaaggcgcagaacgcgtccgggaagcgggaacgttgaccgggataccgcgctga

SEQ ID NO: 72416 - DNA, 1056 bp, Citrobacter koseri
atgaaaaccatcggttatgctgcattaaacgcgactacgccactggccccttttacgtttgaacgacgcgcattgcgtgccaatgatgtggcgatcgagatcctgtggtcaggcgtctgtcacagcgatctgcatcaaacccgtgacgactggaaagagtggggcgcgacgatttacccctgtattcccggacacgaaattattggccgggtgattgatgtcggcagtaaagtgacgcgttatcaggtcgggcaacaggtggcggtcggaacccttgtcgatagctgtcaggagtgcgatcagtgccgcaggcacgaagagcaaatgtgccgtgagtttccgacggtgacctataacgggcgtgaccgcatctcaggagacgtcacttacggcggttactcgaaacatatcgtggttcgcgaggagtttgtcctgaatctgccggaaggccttgatccggccagagcggcgccgttgctttgcgcgggcatcaccgtttactcgccgctgcggacctggaacgttggccccggctcgcgcgttggggtgattggcatcggtggcctggggcaccttgcggttcgtctggcggccgctttgggcgcagaggtgacggttatcacccgcagtgagtcaaaagcgaaagaggcgcatgagctgggcgccgaacacgttctgctctcgacctccgcagaggcgatgaataacgcggcgtcctcttttgatgtgattattgacaccatcccgacgcgccatgatgtttcgccctacgttcagctacttgatgtggaaggggcgctggttattgtcggtaatctggggaatatggaagggttcagcaccttgccgctgattctggggcgtcgtcgcatcacgggttcaccgtctggcggaattgcacaaacgcaggagatgctggatttctgcgcccgtaaaggtgtgtacccggagtgtgagatcatcgatatccagcagattaatcaggcttttgagcgtatggagcggggtgatgtgaaataccgctttgtgattgatatggcttcactgtcgaactga

SEQ ID NO: 72417 - DNA, 1863 bp, Citrobacter koseri
atgagcaaaggaacgacccgtcaggatgccccattcgggacattattgggctacgcccccggtggcgtagcaatctactcttcagattacagctccctcgacccacgggaatacagcgatgatgccgcgtttcgcagctacatcggcaacgagtatatgggccataaatggcagtgcgttgagttcgcccgccgctttctctttctcaattatggggttgtgttcacggatgtcggcatggcgtgggagatcttctcgctgcgtttcctgcgcgaagtggtgaacgacaacatcctgccgttacaggcgttccccaatggttcgccccgcgcgccggttgctggcgcgctgcttatctggcaaaacggcggcgagtttaaagataccggccatgtggcgatcattacccagttgctggacaacaagatccgtatcgccgaacagaatgtgatccacacgccgctgcctccagggcaacagtggactcgcgagctggatatggtggtggaaaacggctgctataccctgcgcgatacctttgacgacaccacgatcctcggctggatgattcagaccgaggacacgcagtacagcctgcctcaaccagacatcgccaacgattcactgaagattcgcggcgcgcggctggaagagaaagggcagtttgacggcaaatggctggatgagcgggacccgctgcaaaaagcctatgtgctggcgaacgggcatgtgattaatcaggacccgcatcagtatttcaccattacggaaagcgccgagcaggagctgattaaagccaccaacgagctgcatctgatgtacctgcatgccactgacaaggtgctgaaagacgataacctgctggcgctgttcgacattccgaaaatcctctggccgcgtttgcgcctctcctggcagcgtcgtcgccaccatatgatcaccggtcgtatggatttctgtatggatgaacgcggcctgaaggtgtacgagtacaacgccgattccgcatcatgccataccgaagcggggctgatcctcgaacgctgggccgaaaagggctacaccgggaaggggcataatccggcggaagggttgatcaacgaactggcgggcgcatggaaacacagcctcgcgcgtcctttcgtccacatcatgcaggataaggacattgaggagaactatcacgcccagtttatgcagcaggcgctgcgccaggccgggtttgaaagcaaaattctccggggactggatgcgctgcgttgggacgatgccggtcagctgattgacggcgatggccgcctggtgaactgcgtctggaaaacctgggcgtgggaaaccgcaattgaacaggtgcgtgaagtcagcgagacggaatatgccgccgtgccgattcgtaccggccatcctgaaaatgaagtgcggttgattgatgtgctattgcgaccggaagtgctggtgtttgaaccgctgtggacggtgatccccggcaataaggctattttgcctatcctgtggtcgctcttcccgcatcaccgctatttgctggataccgatttcacggttaatgacgaactggcgcgcaccggttatgcggtgaaaccgatcgccgggcgctgtggcagcaatatcgatctggtgagccatcaggaagagttactcgataaaaccagtgggaaatttgccgcgcagaaaaacatttaccagcagttgtggtgcctgccaaacgtggccgggaagtatattcaggtctgcactttcaccgttggcggcaactatggcggtacgtgtctgcgtggcgatgattcgctggttatcaaaaaagagagcgatatcgagccgttaattgtggagaaaggggaatag

SEQ ID NO: 72418 - DNA, 2301 bp, Citrobacter koseri
atgaaaaatggtgttccaggagtaagcggttatcagggcccggcgggcggctggggagccgtgaaggcagtctctgcgtcggtgttttcccaaaaggccgtcacgcgcgatattatcgcgatgttcaaaatgaatcaggtcaaaggctttgactgccctggctgcgcatggcctgaccctggccatcgggcgccgatggaactttgtgagaatggcgtcaaagcggtctcttgggaaaccaccagcaagaaagcctcaccagcgtttttccgtcgtcatccggtgtccaccttatggcagtacagtgattacgagctggaaaatattggccgcctgacgcacccgatgaaatatgatgccgtaaccgatacctggcaagccgtggaatgggacatcgcgtttcaggaaatcggcgaacgcctgcgcagctacgattccccggaacaggtagagttttatacctccggtagaacctcgaatgaagcggcgttcctgtatcagctgtttgcccgcgaatacggcagcaacaacttcccggactgttccaatatgtgccacggcccgaccagcgcagggctgacgcgcgctattggtctggggaaaggcaccgttgaactggcggattttgaccactgcgatctggtgatttgcatcgggcataatccgggaaccaaccatcctcgtatgctgaccacgctgcgcgatgtggcaaagcgcggcgccaaaattatcgctatcaatccgctggcggagcgaggacttgaacgctttagcttcccgcaaagccctaaagagatgctcaccggccaggcgaccgaactcagcagcagctactaccaggtgaaaatgggcggcgatgcgtcgctgctcaaaggcatgatgaaggcgctgattgaaatggatgaggcgcgggtgctgctaaaccagcagccttgcctcgatcatgagtttattgctgcgcataccgccggttatcaggcgctgtatgatgacctgcgccagtgcaactgggcggaactggaggcagattcaggtctgacgcgcagccagatggaagatttagcgcacagctacaataaatcgcgcgccaccatcatttgctacggcctggggatcacccagcataaaaacggcaccgggaatgtgcagcagctggttaacctgctgttgctgaaaggcaatatcggaaagccgggcgcgggtatctgcccgttgcgtgggcattccaatgtgcagggcgaccgttcggttgggattaacgaagcggcgtcggacgccttcctgcaacgccttgaagcgcgttttgccattaccgttcctcgtcaacatggccgcgccagcgtggagagcattcgggcgatagagcggggcgaggctaaggcgttaatctgcatgggcggcaatctggccgtggcgatgccgcagccgcagcggacgtttgcggcgatgcaaaagctggatatgcaggtgcatgtggcaaccaaactgaaccgctcgcacctgctgctggcgaagcataactatctgctgcccgcgttgggcagaacggagcgcgaccttcaggcgacggggattcagtccgtcaccgtcgaggattcgatgtcgatggtgcacgcctcctgcggttctctgaaaccggcttcgccgtggctgaaatcggaacctgcgattgtggcgggaatggcacgcgccacgcttgcgcgctcgccggtgaactgggaagagatggtgggaaactatgctctgatccgcgacgctattgaagccgttattccggcgtttcatgactacaatgcccgcattgccgcgccgggcggatttcgcatggacacgcctgcctcgcgccgtgagtggcataccgggaatggcaaagccaactttgtcgttagccagcagcgcgccgttgagcgtcagcagcaacccgctgatgcgctggtgctggcaacgctgcgcagccacgatcagtacaacaccaccatttatggcctgaatgaccgttatcgcggtattaccggccgccgtgacgtcgtgtttttaaatgcggcggaagccagggcgcgcgggctggcgcagggcgatgtggtgaccattcaggcgctggacgatcatggccgcccttgtgaggatcgcgcgatgcgcgggctgacggtcgtgatctacaacatggcggcaggatcgattggcgcctatctgccggaagcgaatgtgctgttgtctctggatgcggtcgatagcgaaagcctgacgccagcctataagagcgtgccggtggttatcaataaagcatcgttcccgctatga

SEQ ID NO: 72419 - DNA, 870 bp, Citrobacter koseri
atgtcagagaatacttatcaacccgcgaaagtatggacgtgggataaatccgcaggcggcggcgcattcgccaatatcaaccgtcccgtttctggcccgactcacgacaagacgttgcccgtcggcaagcatccgctacagctctactccctgggaacgccaaacggccagaaagtgaccatcatgctggaggagttgctggcgcagggcgtgacgggcgcagagtatgacgcctggctgattcgcattggcgacggcgatcagttctccagcggttttgtcgatgtgaacccaaactcaaaaatcccggcgctgcgcgaccactcgcaaaacccgccgctgcgtgtctttgagtccggcgcaatcctgctctacctggcggaaaaatttggttatttcctgccgcaggatctcgctaaacgtaccgaaaccctgaactggttattctggctccagggggcggcgccgttcctcggcggcggctttggtcacttctacaactacgcgccggtgaaaatagagtacgcgatcaaccgttttacgatggaagccaagcgtctgctggacgtgctggataagcagctggcgcgtcatccgtatgtggcgggcgatgagtacactattgccgatatggctgtctggccgtggtttggcagtgtcgtgctcggcaacgtgtatgacgccgcagaatttctggatgcgggaagctataagcacgtacagcgctgggcgaaagagattgcggaacgtccggcggtcaaacgcgggcgcattgtgaaccgcaccaacgggccgctcaacgagcagcttcatgagcgtcacgacgccagcgacttcgacacacaaaccgaagataagcgtcagagctaa

SEQ ID NO: 72420 - DNA, 684 bp, Citrobacter koseri
atgaaaatccttgccgcaggcagcctgcgtgccgtctggcaaccgctaatggcctgttttcaggcagagacgatccgctgtgatttcggcccggcgggattgctgcgtgaacggattgaagccggtgagccgtgcgactttttcgcctcggctaatgtggcgcatccgcaggcgctgctggcgagcgggcgggcgctgtcggtttcgtcctttgcgctgaatcgcctctgcctgaccgtgcgtgctgacgctatgcgggagggcgacgactggcggtcgctgctgatgcgcgaggatctgcgaattggcacatcaacgccgggctgcgatccttccggtgattacacgcaacagcttttttcgcgaatgggagccgtcggcgaggcgatccgctcgcgtgctgtggcgctggtcggcggccgcgattctttgccgcttcccgccggagcgctggcggcgcaatggttaatcgaccacgattacacggatgtttttattggttatgccagctatgcccccagactgcggcaaatcagtaccctgtgcgtggttgatattcctgaaccgtataatccgatcgctgagtatgcgtttgcctgtctgacggcgcgcggaaaaccgcttgccgaatttctgctttccactccggcaggactgattctcgtgcaacatgggtttaattaa

SEQ ID NO: 72421 - DNA, 1053 bp, Citrobacter koseri
atgtttaaatccttacgccagctctccctgctggcgttgcttttttccctgccgtttatggctcaggccgagcgtacgtttaccgatcagattggtcgccaggttaccgtcccggatacggtggatcgcgtggtggtactccagcatcagacgctgaatttgctggtgcagatgaatgctaccgacaaaattgttggcgtgatggcgaactggaaacaacagcttggcgacggttatgcccgcctggcgccggagctgacaacgaaagccgcgttgggtgatttaacccacgttgatgcggaaaaactggtcgcgctgcatccgcaggtggtgtttgtcactaactatgcgccgcaggaaatgatcgacaaaatcagcagcctgggcatttcggtggtggcgatttctctgcgccatgatgcgtcgggcgaacaggctaaaatgaacccgacaatgacggatgaagagcaggcttacgatcaagggctgcgtgaagggatcacgctgattggcgatatcgtcaataaacctgacgaagcaaaagcgctgattgccgcaatggataaggggcgcaagatggtgagcgatcgcctgaaagacatcccggaagatcaactcgttcgcgcctatatggcgaacccggaactgaccacctacggctccggtaaatatactggcctgatgatggcgcacgcgggggcgttgaacgtggcggcatcgaccatcaaaggctttaagcaggtcgcaatggaacaggttatcgcctggaatccgcaggtgatttttgttcaggatcgctatccgaaagtggtggatgagatcctgcaaagcccgcagtggcaggtgattgatgcggtgaaaaatcatcgcgtctatctgatgccggactacgcgaaggcctggggctatccgatgccggaagcgatgggcattggcgagctgtggatggcgaaaaaactctatccgcagaaattccaggatattgatatgcgcaaggtcgccaatgactggtatcagcgtttttatcgcactgactatcagggcgttgactga

SEQ ID NO: 72422 - DNA, 249 bp, Citrobacter koseri
atgtgtattggagtcccggggcaggttctgtccgttggtgaagatattcaccagcttgcgcaggttgaagtgtgcggcatcaagcgtgatgtgaatattgccctgatttgcgaagacagccctgcaacgctggtggggcagtgggtgctggtgcatgtgggatttgccatgagcatcattgatgaagaagaagccaaagccacattagacgcgctacgccgaatggagtatgacgttaccagcgcctga

SEQ ID NO: 72423 - DNA, 342 bp, Citrobacter koseri
atgcatgagctgtccctgtgccagagcgcggttgagattattcagcagcaggcggaacagcatggcgtgacgcgagttaccggcgtatggctggaaattggcgcactctcatgcgttgaagagagcgccgtgcgcttcagctttgatatcgtttgccagggtacgctcgcgcaggggtgtgcgttgcacatcgactataaacccgctcaggcgtggtgctgggattgcagccaggcggttgaaatcacgcagcatgacgcgcagtgcccacactgtcagggcgatcgcctgcgggtggataccggcgactcgctgaaagtgaaaagtattgaagtggaataa

SEQ ID NO: 72424 - DNA, 492 bp, Citrobacter koseri
atgtctgaggaaatttcagggttcccgtcctccccgagaatgcaggttcaggcggcgtttgaagagattgcccgacgttcaatgcacgatctctcgtttttgcacccgaatatgccggtgtatgtctctgacttcaccctgtttgaagggcagtggacgggcagcgtgatcgcgccgtggatgctgagcgcgctgattttccccggccccgaccagctctggccggtacgcaaagtcagtgaaaaactcggattgcgtctgccgtatggcgcaatgacctttaccgttggcgaactggacggggtttcgcaatacctctcctgctcgctgatgtcgccgctcaaccacggtatgtcggcgcaggaggggatgcgtctggcggacgactgcgcgcggatgctgctgtcgctgccggtcagcgatcccgatgcgccgcagctggcagggcgacgtgcgctgctgtttggacgccggagcggcgagcatgcatga

SEQ ID NO: 72425 - DNA, 495 bp, Citrobacter koseri
atgcggattttagtgttaggggtcggcaatattttgctgaccgatgaagccatcggggtgcgtatcgttgaagcgttagaacagcggtacatcctgccggatttcgtggagatccttgatggcggcacggcgggaatggagcttcttggcgatatggcggacagagatcacctgatcatcgcggacgccattgtgtcgagaaagaatacgccgggaacccttatgatcctgcgtgatgatgaggtgcctgcgctgttcaccaacaaaatctcaccgcatcagcttggcctggccgacgttctgtcggccctgcgcttcactggcgagtttccgaaaaagctgacgctgatcggcgtgatcccggaatcgctggagccgcatatcggcctgacgccaacggttgaagcgatgattgaacctgctatggcgcaggttcttgccgcgctgcgcgagtcaggcgttgaggctattccacgggaggctgcgcatgtctga

SEQ ID NO: 72426 - DNA, 1704 bp, Citrobacter koseri
atgagccagagaattactattgatccggtaacccgtattgagggtcatttacgcatcgactgcgaaatcgagaacggtgtggtgtcaaaagcatgggcatccggcaccatgtggcgcggcatggaagagatcgtgaagaatcgcgatccgcgcgatgcctggatgattgtgcagcgtatctgtggcgtatgtaccacgacccacgcgatctcttccgttcgtgcggcggagagcgcgctgaagattgacgttccggtcaatgcgcagtacatccgtaacatcattctggcggcgcatactacccatgaccatattgtgcacttctaccagctttctgcgctggactgggtggatatcacctctgcgctgaaagccgatccggcgaaagcgtcggcgctgttgaacggcgtgtcgagctggcacctgaatagcgcggaagagttcacgaaggtgcagaacaagatcaaagacctcgttgccagcggccagttagggattttcgctaacggctactggggacacccggcgatgaaactgccgccggaagtgaacctgattgcggtcgcgcactatctgcaagcgctggaatgccagcgtgacgccaaccgcgtggtggcgctgctgggcggtaaaacgccgcacatccagaacctggcggtgggcggggtggcgaacccgatcaacctcgacggtctcggcgtgctgaaccttgaacgcctgatgtacatcaagtccttcatcgacaagctgagcgactttgttgagcaggtttacaaggtggatacggcggtaatcgcggcgttctatccagaatggctggagcgcggaaaaggcgcggttaactacctgagcgcgccggaatttccgactgacggtaaaaacggcagcttcctgttccctggcggctatatccagaatgcggatctgtcgacgtatcgcccgatcgcctcgcattccgatgaatacctgattaaagggattcaggagagcgcgaagcacgcctggtacaaagacgaagcgccacaggaaccgtgggaagggactaccgtcccggaatacaccggttggtctgatgacggtaaatactcgtgggttaagtccccgaccttctacggcaaaaccgttgaagtggggccgctggccaatatgctggttaaactggcggcgggacgcgagtccacgaaggctaaactgaatgaaatcatcgcgatctaccagaaactgaccggcaaaacgctggaagtagcgcaactgcactccacgctggggcgtattattggccgcaccgttcactgctgcgaattgcagggtattctgcaaaaccagtacagcgcgctgatcgccaatatcgggaaaggcgaccacaccacgttcgtcaaaccggatatcccggcgacgggtgagtttaaaggggtgggcttccttgaggcgccgcgcggtatgctctctcactggatggtcattaaagacggcattatcagcaactaccaggcggtggttccgtccacctggaactccggtccgcgtaactttaacgatgaagtggggccgtacgagcagtcgctggtggggacgccgatcgccgatccagaaaaaccgctggaagtggtgcgtaccattcactccttcgacccttgcatggcgtgcgcggtgcacgtagtggacgctgacgggaacgaagtcgtctcagttaaggttctgtaa

SEQ ID NO: 72427 - DNA, 1179 bp, Citrobacter koseri
atgagtcatgatcctaaaccgctgggcgggaaaataatcagtaaaccgatcatcatcttcgggccgcttgtcgtcctgtgcatgcttctcattgtgaaacgtctggtcttcgggctgggatcggtctccgatctgaacggcggcttcccctggggcgtgtggatcgcttttgacctgctgatcggcaccggcttcgcgtgcggcggttgggcgctggcgtgggcggtgtatgtcttcaaccgggggcaataccatccgctggtgcgcccggcgctgctggcaagcctgttcggttactctttgggcgggctgtcgatcaccattgacgttggtcgttactggaacctgccgtatttctacatcccagggcacttcaatgtgaactcggtgctgtttgaaacggcggtctgtatgaccatctacatcggcgtgatggcgctggagtttgcccccgcgctgtttgaacgcctgggctggaaagtctcgcttaagcgtctgaacaaagtgatgttctttgttatcgccctcggggcgttgctgccgaccatgcaccagtcgtcaatgggatcgttgatgattgccgccggtattaaagtacatccgctgtggcagagctatgaaatgctgccgttgttctcattgttcaccgctttcatcatgggcttttccatcgttatttttgaaggctctctggtgcagagcggcttaaaaggcaacggcccggatgagaaaagtttgtttatcaagctgaccggtactatcagcgttttcatcgcgctgttcctcgtgtgccgttttggtgaactgatttaccgcgacaagctctcttatgcgtttgccggtgactactactccttgctgttctgggttgaagtcctgctgatggtcttcccgctggtggtgctccgtctgccgaaactgcgcggcgactcgcggatgttgtatctgtccgccctcagtatgctgctgggctgcgcaacgtggcgtatgtcctactcgctggtggcgttcaatcccggcggcggctaccactactttcccacctgggaagaactgctgatttctattggttttgtggctattgagatttgtgcatacatcttactcattcgtctactgccgatacttcctccattaaaacaaaacgatcacaatcgtcatgaggcgagcaaagcatga

SEQ ID NO: 72428 - DNA, 987 bp, Citrobacter koseri
gtgaacagacgtaactttattaaagcagcctctggcggggcattgctgctgggcgcgtcgccgtccatcagccatgcggctgcggaaaaccgtccgcctatcccgggttccctggggatgctgtatgactcgacgctgtgcgtgggctgtcaggcgtgtgtgaccaaatgccaggatatcaacttcccggcgcgtaacccggaaggggcgcaaacctggtcgaataacgacaagctgtctccttacaccaataacatcattcaggtgtggcatagcggaagtggcgtcaataaagatcagacagagaacggctacgcgtacattaagaaacagtgtatgcactgcgttgaccctaactgcgtctccgtttgcccggtatccgcgctgaagaaagacccgaaaaccggcatcgttcattacaacaaagacgtctgtaccggctgtcgctactgcatggtcgcctgcccgtacaacgtgccgaaatacgactacaacaacccgtttggcgcgctgcacaagtgtgaactgtgcaaccagaagggcgttgaacgcctggacaaaggcggtctgccggggtgcgttgaggtatgtccggcgggcgcggtgatttttggtacgcgagaagagctaatggcggaggcgcaaaaacgcctggcgctgaagcctggcagcgaataccactatccgcgccagacgttgcagactggcgatacgtatctgcataccgtaccgaagtattacccgcatctgtacggtgaaaaagagggcggcggcacgcaggtgctggtgctgaccggcgttccttaccagaatctggatctccctcaactggccgatctgtcaactggcgcgcgttctgaacacattcaacacaccctgtataaaggcatgatgctgccactggctgtgctggcgggcttaaccgtgatggttcgtcgtaatacgaaaaacgagcatcacgacggaggagacgatcatgagtcatga

SEQ ID NO: 72429 - DNA, 1119 bp, Citrobacter koseri
atgactggagataatactctcatcacttctcacggcgttaatcgtcgtgatttcatgaagctttgtgcagcactggccgcaaccatggggctcagtagcaaagccgccgcagaaatggccgaatcggtttcccgtccgcagcgtccgcccgtcgtctggatcggcgctcaggaatgtacgggatgtaccgaatcgctccttcgcgcgacccacccaacggtagaaaacctcgttctggaaacgatctctctggagtaccacgaggtcctctccgccgccttcggccatcaggttgaagagaacaagcataacgctctggagaagtataaagggcagtatgtgttggttgtcgatggttccatcccattaaaagataacggtatttactgcatggttgccggtgagccgattgtggatcacatccgcaaggcggcggaaggcgcggcggcgattatcgcgatcggctcctgttccgcgtggggcggcgtcgctgccgctggcgtgaacccgaccggcgccgtcgggttgcaggaagtcctgccgggcaaaaccgttatcaatatcccgggctgcccgccgaacccgcataacttcctggcaacggttgcccacatcatcacttacggtaaaccgccgaagctggatgccaaaaaccgtccaaccttcgcctatggtcgtctgattcacgaacactgcgaacgtcgcccgcattttgacgccggtcgcttcgccaaagagttcggcgatgaaggccaccgtgaaggctggtgcctctaccatctgggctgtaaagggcctgaaacctacggcaactgttcgacgttgcagttctgcgatgtcggcggcgtatggccggtggcgattggacacccctgctacggctgtaacgaggaaggcgttggctttcataaaggcatccaccaactcgcccatgtggaaaatcaaaccccgcgttccgagaagccggatgtcaacctgaaagagggtggccacatttccgcaggcgccgttgggctgcttggcggcgtggttgggctggttgccggtgtcagcgtgatggcggtacgtgaactggggcgtcagcagaagaaagataacgctgactcacggggagaataa

SEQ ID NO: 72430 - DNA, 288 bp, Citrobacter koseri
atggacaatcattttggtaagggcctgatggccggattaaacgcaacgtgtgccgatagcgcgcgtaacgtggcgggtttttgttctgattataagcgcggattcgtattaggattttcgcatcgcatgtttgaaaaaacaggcgatcgacaattaagcgcctgggaagcggggattctgacgcgccgttatggcctggacaaagatatggtgatggacttctttcgggagaatcaatcgaatacgactatccggttctttatggcgggttatcgtctcgaaaattga

SEQ ID NO: 72431 - DNA, 1641 bp, Citrobacter koseri
atgcgtttgctgcaaaacttcactattcgtattgtcatgctgacaatattggggctcttctgtcttctttggtcgggcgttggtttattcagcgtccatgcattatctaaagtggcggaagggaatgatatcgatcgtcatattgtgcgtcagatgacggtgctaagtcaggggaacgatcagtattttcgttttgtcacgcgtttaagccgtgcgatggacgttaaaatcggcggcggtacgcccgattttgtaccagtacagcaggcgctggacaatatgagcaaaaagctggaagagatgaaaacgctctctccagggccgatggacccggagatcgccgctgcggtattggcaaactggcaggcgttgcttgataagggcgtcgcgccgcagatgcaactggcgcagcagggtacgctcaccgaatttgcagaacaggcgaataatgtcacccccgccctgagccgcgccttcggcgccagcgcagaacgttttaacagcgcggccggcacgatgctggacagcacccgcgtgatggtggacggcaaaacgtcaattatccgcaccctgattatcaccgccgttattctgggaattgtgattctcttctttaccgaccgttacctggtcacgatgttagtgaaaccgctggcgcgcattcgccaacagttccgccagattgcgcaaggcgatctgagccagccgattgaagagtttggccgtaactgtgtcggtcgtctggtgccgttactgagcgcgatgcaggatagtctgcgggaagcggtcagctcgattcgttcaggcagtgacaatatctggcgcggtgcgacagagatctccagcggcaataacgatctctcttcccgtacggaagagcaggcggcggcgctggaagagaccgctgcaagcatggaacagctcaccgcgacggtgaaattgaatgcggataatgcgcgccaggccagtcagcttgctgatgccgcttccgcgacggccggaaaaggcggcacgctggtttctgaagtggtcgagacgatggacggtatttcagccagctccagacagatcgccgaaattacgaatgtcatcaacagtattgccttccagaccaatattctggcgctgaacgccgccgttgaagccgccagagccggtgaacaggggcgtgggtttgcggtcgtcgccggtgaagtgcgtaatctggccagtcgtagcgccggggccgccaaagagattgaaacgctgatcgctgaatccgtgcgtcgtgtcgagcagggtgcgcagctggtgcaggagacgggcgcgacaatggaggccattctgcgcggagtaactgaagtcaccaccatcatgaagcagatcgccgccgcttccgaggaacaaagcaaagggatctctcaggttggtgtggcgataacccagatggacagcgtgacccaacaaaacgccgcgctggtggagcaagtttctgcggcagcggcggcgctggaacggcaaacggaagagctgcaacgctctgtgcaacagttccgcctttctcataatgacgcgcaaatcagcccggcgaaaacggtctctccagccagtccgcgcggggcgtctgccgcgaagtcaggcgatgaatgggtcgccttctga

SEQ ID NO: 72432 - DNA, 888 bp, Citrobacter koseri
atgccgcgtctgactgccaaagactttccgcaggagttgctcgattactatgactactatgcacatggaaaaatctctaaacgcgagtttcttaacctcgcggcaaagtatgccgtcggcggcgtgaccgcgcttgcgctgtttaatctcatgaagccgaattacgcgctggcggtgcaggtggaatttaccgacccggacattttgccggaatacattacgtatccgtcaccgaacgggcatggtgaggtgcgcggctatctggtgaaaccggcgaaggcgacggggaaaacgcctgcggtcgtggtcgtacacgagaacagggggctgaatccctatattgaggatgtcgcacgacgcgtggcgaaagcgggttatattgcgctggcgcctgatggattaagctcggtaggcggataccccggtaatgacgataagggccgggaattacagcagcaggttgatcccacaaaattaatgaatgatttctttgccgcgattgagtttatgcagcgtcatccggcggccagcggaaaagtggctattacgggattctgctatggcggcggcgtatcaaatgcggcggcggtggcctatccagaactggcgtgcgccgttcctttttatggtcgtcaggctccggcgtcagatgtacctaaaattaatgcgcctttattattacattacgccgagttagatacctcaattaatgaaggctggcctgcctacgaaacggcgctgaaggcgaataataaagtctatgaagcgtatatctatcctggggtgaatcatggttttcataatgattcgactccccgctatgataaggccgcagcggatctggcctgggcgcgcactctggcctggtttgagaaatatttacaatga

SEQ ID NO: 72433 - DNA, 1041 bp, Citrobacter koseri
atggcctggttagccaaccccgaacgttatgagcagatgctttatcgctactgcggtaaaagcggtttgcgtttacccgcgctatcgctgggtttgtggcacagtttcggccacgttcaggcgctggattcacagcgtgcgctgctgcgtaaagcctttgattcaggcatcacccattttgatttagccaataactacggcccgccgccgggaagcgcagaagagaactttggccgtttgctgcgggaagattttgcgccgtatcgcgatgagctgatcatttccaccaaagcgggttatgacatgtggcctgggccatacggctccggcgggtcgcgtaagtacctgctcgccagcctcgatcagagcctgaagcggatggggctggactatgtcgatatcttctattcccaccgtgtcgatgaaaacacgccgatggaagagaccgcatccgcgctggcgcaggcggtacaaagcggtaaggcgctttacgtcggcatctcctcctattcgcctgagcgaactcaacgaatggcagaactgctgcgcgaatggaaaatcccgctgctgattcatcagccgtcctacaatctgctcaaccgctgggtggataaaagcggcctgctggatacgctggcggccaacggcatgggttgcattgcgttcacaccgctggctcagggattgttaaccggaaaatacttaaacggtatcccggaaggttcacgtatgcagcgtgaagggaaaaaagttcgcggtctgacggagaatatgctgacggaagcgaatctgaacagcctgcgtttactcaatgagatggcgcaacgtcgcggccagtcaatggcgcagatggcgcttagctggctgttgaaagataatcgcgtgacgtcggtgctgatcggcgccagtcgaccagagcaactggaagaaaatgtgcaggcgttgtcgaacctgacattcagcgctgacgagttagcgcaaatcgataaacatgtcgcggacggcgagctgaacctctggcaagcctcatcggataaataa

SEQ ID NO: 72434 - DNA, 504 bp, Citrobacter koseri
atgaacagcattttttattctattatcactctgctattactcactggcggcgtgcttttcttgatgcacgaatttaataaacagcgctctgctgaggcgtctaatccagtaaatcaagcggaacccttgtccaaagaggagggcgaagatcatttttcgtcgctcatgaatactattacaccggtatggtactggcgagtcaatcacgaatatattgattttcttcacgcaacgataaagcggatgacgatggcggagctaaatggaacgccggggttatttgatgcgcagcgccgttgcagcgatctcaactctgcggtctataaatattatgacaacattaaaaagcgttgtctgaacggggaaaaggttccgcattccgatctggatgtgcttaacttgcggcaatgtttccgggaatttagcctggaggcgtatccctccctggttgctctggtgtggcctgaatatcagcggccgctaatcaaaccggaagaggtttaa

SEQ ID NO: 72435 - DNA, 405 bp, Citrobacter koseri
atgcttcccgagcatcttgtgccgactcgttttcatttatctgcctcgccaggcgatgctgagaccgtagaaaatagtgaaaatttgactcagggaaagaaaacgctgagcgattacgagccagatattttaattagcgccacaccgactggtcaatctaaaaacatgttacttgaagaacgtgaccgtcatttaaaagaccggctttatcgcgtagctaaaattgagacgtttgctcgtcttattaatagcctacaggcggaaggcgatgttgatgctcaggcattaagtaaaattctggcagatgccacaacaaaaataaacgatcacggcaatgaaatttggcttaatctcataaccagagagaaaaactctcccgttttttattctctggaagagaaataa

SEQ ID NO: 72436 - DNA, 423 bp, Citrobacter koseri
atgaaagacgttgaagataataatgtttatttagctttagataataataaaagcgatgaatttatcttaaagcaaaatcttaaagcgcttatcgccaataaaaacgcgaccctcgaacaggtggcgcaggagatcgtgtcgattcccgccgcgttagtacggctgaaatggcaaaatcgccgtgaaatctatgcgctccaggtcaaagaagagatctacggttcggttatcaatacgattattgagcaacatcccgagatgcgggacaaaatcatggcgcgcctggagagcacatatcagcacttactggcgcgagaaacggcgaccctgcgcctgacgcgtaagctatccgatggcgattaccgaacgaccaatatcaccaccgtcgcgctgaatgaaaaacgttttcccacgacgaagtaa

SEQ ID NO: 72437 - DNA, 426 bp, Citrobacter koseri
atggcaatgcgtcttaatgaaaatctggacgataacggtgaaatgcatgaaatcaacgtgacgccgtttatcgacgtcatgctggttctgctgattatctttatggtggccgcgccgctggcaacggtggacgtgaaggtgaatcttcctgcgtccaccagcaccccgcagccgcgcccggaaaaaccggtttatctgtccgtgaaggccgacaacagcatgtttatcggcaacgatcaggtaacggatgaaaccatgatcggcgagctgaacgcgttaaccgaagggaagaaagacacgacgatcttcttccgtgcggataaaaccgttgattatgaaacaatgatgaaagtgatggatacgctgcaccaggcgggttacctgaaaattggtctcgtgggtgaagaggtcgcgaaagcgaagtaa

SEQ ID NO: 72438 - DNA, 735 bp, Citrobacter koseri
gtgggtaataatttgatgcagacggatctctccgtctggggtatgtatcagcacgccgacattgtggttaagtgcgtgatgattggtctgattctggcgtcagtagtcacctgggctatcttcttcagtaagagtcttgagttctttacgcagaagcgtcggctcaagcgtgaacaacagcagctggctgaagcgcgttctttagaccaggccagcaatattgcctcctcattcgcggcaaaaagtttaagctcacagttgctctatgaagcgcagaacgagctggaactgtcggaaggcagtgaagacaacgaaggtattaaagagcgtaccgggttccgcctggagcgtcgcgtagcggcggttggccgtcatatgggacgcggcaatggctacctggcgaccatcggcgccatctctccgtttgtcggtctgtttggtacggtatggggcatcatgaacagcttcatcggcatcgcgcaaacccagaccaccaacctcgcggttgtcgcgccgggtatcgcggaagcgttgctggctacggcgatcggcctggtcgcggcaattcctgcggtcgtgatttacaacattttcgcacgtcagatcggcagctacaaagcgacgctgggcgacgtggcagcacagattctgttgctgcaaagccgcgatctggatctgaacgcgagcgcttccgctcagccggtacgtaccgcgcagaaattacgtgtaggataa

SEQ ID NO: 72439 - DNA, 1266 bp, Citrobacter koseri
atgccgattcttcaggatgcgtcactcatcattcatgatagtttagacatccagacgtataaaaatgggtactccaacatggcagaaaaacatcttgaaaccaaactggtgagcgcaggacgcagcaaaaaatacacgctgggatcggtgaacagcgtcattcagcgcgcctcctcgctggtatttgacaccgtagaagccaaaaagcacgccacccgcaaccgcgccaatggcgagcttttctatggccgtcgcggaacgctaacccatttttcgctacaggaagccatgtgcgaactggaaggcggcgccggatgcgcgctcttcccctgcggcgcggcggctgtcgccaacacgattctggcctttgtggaacagggcgatcacgtcctgatgaccaacaccgcttacgaacccagtcaggatttttgcaccaaagttctcgccagactcggcgtgacgaccggctggtttgatccgctggtcggcgcggatatcgttaagcatattcagcccaatacgaaagtggtgtttctcgaatcccctggctccatcacgatggaagtgcatgacatcccggcgattgtcggcgcggtaagacgcgttgcgccagacgccgtcattatgattgataacacctgggcggcgggcgtgctgtttaaagcgctggatttcgggatcgatatttccatccaggcaggaacgaaatacctgattggtcactcggatgcgatggtcggcaccgccgtgtctaatgcgcgttgttgggagcaattacgcgaaaacgcctatctgatggggcaaatgctggacgcggataccgcttatatgaccagccgtgggctacgtacgctgggcgtgcgcttacgccagcatcatgaaagcagcctgaaagtcgccgagtggctggcgaatcaccctcaggtcgcccgcgttaatcatcccgcccttcctggcagcaaaggccacgaattctggaagcgcgatttcacaggcagcagcgggttgttctcgtttgtgctgaataaaaggctgagcaatgaggcgctttccgcttatctggataatttcagcttgttcagcatggcttactcctggggcggctttgaatccttaattctgcctaaccagccggaacatatcgccgccattcgtcccgaaggcgacgttgatttcaccggcacgctgatccgtttgcacatcggtttagagaatgttgacgatctgattgcagatttagccgcaggattcacgcgtattgtgtaa

SEQ ID NO: 72440 - DNA, 660 bp, Citrobacter koseri
atggctgtcattcaagatattatcgctgcgctctggcaacacgattttgccgcgctggcggacccacacgttgttagcgttgtctactttgtgatgtttgccacactatttttagaaaacggcctgctcccggcctcttttttacccggagacagcctgctcttactggcaggcgcgctggttgcacaaggtgtcatggactttgtccccacgatccttattctgacgacagccgccagtctcggctgctggctgagctatattcaggggcgctggctgggaaatacgcaaacggtgaaaggctggctggcgcagcttcccgttaaataccatcagcgcgcgacctgtatgttcgaccggcacggcctgctggcgctgcttgccgggcgctttctggcgtttgtgcgcaccctgctgcccacaatggcggggatttcagggttgtccagtcgccggtttcagttttttaactggctgagtgggctgctgtgggtcggcgtggtgaccagtttcggctacgcgctcagcatgatcccgttcgtgaaacgtcatgaagaccaggtgatgacgtttttgatgatcctgccgattgccctgctggccgccggtttgatcggcacattattcgtcgtgatcaagaagaagtattgcagcgcctga

SEQ ID NO: 72441 - DNA, 918 bp, Citrobacter koseri
atgagaaaaaagcgcgccatgaaccgtgaagccatctgcctgttgctgacagataaaattaagcagctgataaacaatcaaaataatctgaatgactgcctgcccgacgtgcgtttgctctacggcacggagccggggttgcgcacgcctgtgatgtatcagcctggcatcatatttctcttttcggggcataagatcggttatatcaatgaacgcgtatttcagtacgatgccaatgaatatctgctgctgacagtacctttaccctttgaatgtgaaacttatgcgacgccggaagtaccgctcgcggggattcgtctgaatgttgatatcctgcaattgcaggagttgctgatggacattggcgaggacgatctgtttcaaccgtcgatggcggcaagcgggattaactccgccacgctgtcggatgacattctttgtgcggcggaacgcctgttagatgtgatggaaaggccgctggatgcgcgcattctggggaaacagattattcgcgaaattttgtatcacgttctgatggggccgcgtggcggcgcgctgctggcgctggtcagccgccagacccatttcagcctgattagccgggtgctgaagcggattgaaaccaaatacaccgagaacctgaacgttgagcaactggcggcggaagccaacatgagcgtctcggcgttccatcataattttaaatccgttaccagtacctcgccgttgcagtacctgaaaacctatcgtctgcataaagcgcggatgatgatcattcacgacgggatgaaagccagcgccgctgcgatgcgcgtcggctacgagagcgcgtcgcagttcagtcgggagttcaaacgctattttggcgtaacgccgggggaggatgcggcacgaatgagaatgatgcagggaagctaa

SEQ ID NO: 72442 - DNA, 1164 bp, Citrobacter koseri
atgaacaactttaatctgcataccccaacccgcattctgtttggtaaaggcgcgattgccgatctgcgcgatcaaatccctcagggcgcccgcgtattgatcacctacggcggcggcagcgtgaaaaagaccggcgtactggatcaggtacatgacgcgctgaaaggtctggacgtgctggaatttggcggcatcgagccaaacccgtcttatgaaacgctgatgaacgccgtcaacattgtacgtgatgagaaagtgacgttcctgctggcggtcggcggcggttccgtgctggatggcactaaatttatcgcggcggcggcgcaatatgacgaaggcgtggacccgtggcgcattctggaaactcgcggcaacgacgtgaaaagcgccgtaccgatgggatcagtgctgacgttgccggcaacgggttcagaatctaactccggggcggtaatttcccgtaaaaccaccggcgataagctggcctttatgacgccgttcgtccaacccgtgtttgcggtgctcgatccggtttatacctacaccctgccgccgcgtcaggttgctaatggcgttgtggatgcattcgttcacaccgttgagcagtatgtcacttatccggttgacggaaaaattcaggatcgctttgccgaaggtatcctgctgacgcttgtcgaagaaggcccgaaagcgctgaaagagccggaaaactacgatgtccgcgccaacgtaatgtgggcggccactcaggcgctgaacggtctgatcggcgcgggcgtcccgcaggactgggcaacgcatatgctgggtcatgagctgacggcgatgcacggccttgatcacgcgcagacgctggctatcgtcctgcctgcgctgtggaatgaaaaacgcgataccaaacgcgccaaactgttgcagtacgcagagcgagtctggaatatcaccgacggttccgacgatgcgcgtattgatgccgccatcgccgccacccgccgcttctttgagcaaatgggcgtaccgactctcctgtctgattacggtctggacggcagttccattccggcattgctggcaaaactggaagcgcacggcggcacaaatctgggtgaacatcaggacattacgctggatgtcagccgtcggatttacgaagcggctcgctaa

SEQ ID NO: 72443 - DNA, 828 bp, Citrobacter koseri
atggctaatccaaccgttatcaagctacaggatggcaacgtaatgccacaactgggcctgggagtctggaaggcaagcaacgaggaagcaatttccgccattcataaggcgctggaagtgggatatcgctccattgataccgctgcggcgtacaagaatgaagaaggcgtcggaaaagcgttaaaagatgccggtatcgaccgggaagagctgtttattaccaccaaactgtggaatgacgatcagaaacgccctcgagaagccttgcaggaaagcctggataagctccagttggatcacctcgatctctatctgatgcactggcccgttccggctatcgaccattatgttgacgcctgggaagggatgattgaactgcaaagagaggggctggtgaaaagcatcggcgtgtgtaacttccaggtaaaccacctccagcgtctgatcgatgaaaccggcgttacaccggtgatcaaccagatcgaattacatccgctgatgcaacagcgtcagctgcatgcctggaatgcgacgcacaagatccagaccgagtcctggagcccgctggcgcaaggcggcgcaggcgttttcgatcagaaaatcattcgcgatctggcggataagtacggtaaatctccggcgcaaattgtgatccgctggcatctggataacgggctggtggtgatccctaaatccgtcaccccttcacgtattgcggaaaacttcgacgtctgggatttccgtctcgacaaagacgaattaagcgaagtggccaaacttgaccagggtaaacgcctggggccggacccggatcagttcggcggctaa

SEQ ID NO: 72444 - DNA, 462 bp, Citrobacter koseri
atgagctgtattttttgccaaatcgttgagggtaaagccccctgccataagatctgggaagacgagcatcatctggccttcctctccatcttccctaacaccgacggttttacggtggtgatcccgaagaagcattatcccagctatgcgttcgacttgccgccgcaggcgttggccgatctgatgcttgccacccaaaaagtggcgaaaaagctggataacgccttcccggacgtgggacgtacgggaatgttttttgaaggatttggcgtggatcatgtgcacagcaagctcagccccatgcacggcaccgctaacctgaacgaatggaagcctattgaatcgcggcaggcgaaattctttgaacagtacgaaggctatttgtcatcgcatgaccacgagcgagcggatgacgaaaaactggcagcgctggccgccagaattcgtgaagcgaacgcgtaa

SEQ ID NO: 72445 - DNA, 2172 bp, Citrobacter koseri
atgagcgcaatatccctgatccagccagacagagatcttttctcctggcctcaatactgggcggcctgttttggtcccgcgccttttttgccgatgtcacgcgacgaaatggatcaacttggctgggatagctgcgacattattctggttaccggtgatgcgtatgtcgatcatccgagctttgggatggcgatttgcggtcgtatgctggaagcgcagggtttccgtgtcggcatcattgcccagccggactggaacagcaaagatgattttatgcgtctggggaaaccgaatctgtttttcggcgtcacagcgggcaacatggactcgatgatcaaccgttataccgccgatcgccgactgcgccatgacgacgcctatacgccggataacgtggcgggcaagcgcccggatcgtgcgacgctggtctatacccagcgctgtaaagaggcctggaaagacgtgccggtgattctcggcggtattgaagccagcctgcgtcgtactgcgcactatgattactggtctgataccgtacgccgctcggtgctggtggatgcgaaagccgatatgctgatgttcggcaacggcgagcgcccgctggttgaagttgcgcaccgcctggcaatgggggagccgatcggccagatccgcgatgtgcgtaacaccgcgattattgttaaagaagccctgccgggctggagtggggttgattccacgcgtctggatacgccggggaaaattgatccgatcccccatccgtacggcgaagatctgccgtgcgcggataataaaccggttgcgccgaaaaagcaggaagccaaagccgtgaccgttcagccgccgcgtccgaagccgtgggagaaaacctacgtgctgctgccgtcctttgagaaggtgaagggcgataaggtgctgtatgcgcacgcgtcgcgtattctgcatcacgaaaccaaccctggctgcgcgcgtgcgctgatgcaaaagcatggcgatcgctatatctggatcaacccgcccgccattccgctctctaccgaagagatggacagcgtttttgcgctgccgtataagcgcgtgccgcatccggcatacggtgacagccgcattccggcttacgaaatgatccgcttctcgattaacatcatgcgcgggtgtttcggcggctgctcgttctgctcgattaccgaacacgaaggccgcattattcagagccgttcagaagattcgatcatcaatgagatcgaagcgatccgcgataccgtaccgggctttaccggcgtgatttccgatctcggcgggccgacggccaacatgtatatgttgcgctgtaagtcgccgcgcgcggaacaaacctgccgccgcctgtcgtgcgtgtacccggatatctgctcgcatatggataccaaccatgagccgacgatcaacctctatcgccgcgcccgcgatctgaaaggcatcaagaagatcctgatcgcctccggcgtgcgttacgacattgctgttgaagatccgcgttatatcaaagagctggcgagccatcatgtgggcggctatctgaagattgcgccggagcataccgaagaagggccgctgtcgaagatgatgaagccgggcatgggcagctatgatcgcttcaaagaactgttcgacctttactcaaaacaggccgggaaagagcagtacctgatcccgtattttatctctgcgcaccccggtacgcgggacgaagatatggtgaatctggcgctgtggttgaaacgccatcgcttccgtctggatcaggtgcagaacttctatccgtcgccgctggcgaactcgacgaccatgtattacaccgggaaaaacccgctgggtaaaattggctataagagtgaagacgtggtggtgccgagaggcgacaaacagcgtcgtctgcataaagcgctgctgcgttaccacgatccggcgaactggccgctgattcgccaggcgctggaagagatggggaaaaagcatctgattggcagtcgtcgcgagtgtctggttccggcgcctacgctggacgagatgcgtgaagcccgtcgtcagaaccgcaatacgcgcccggcgttgactaagcatacgccagtggcgcatcagcgtcagacgcctgctggcaataaaaaacgcagcaaggtagccggacgttaa

SEQ ID NO: 72446 - DNA, 1413 bp, Citrobacter koseri
atgtcactcagtcggcgtcagttcattcaggcttcggggatcgcactgtgtgccggtgccgttccgctgaaggctaatgcagccggtcagcagcagcctctgcccgttccgccgctgctggagtcccgtcgcgggcagccgttgtttatgacgttgcagcgcgcgcactggtcctttacgcagggtacgcgcgcgcccgtctgggggattaacgggcgttacctggggccgacgattcgcgtctggaaaggggatgacgttaagctcatctacagcaaccgcctgactgaaaatgtctccatgaccgtcagcggattgcaggtgccggggccgctgatgggcggccctgcgcggatgatgtcgcccaacgctgactgggcgccggtattgccgattcgtcagaacgccgccgtgctgtggtatcacgccaatacgccaaaccgtaccgcgcagcaggtctataacggccttgccgggatgtggctgatcgaggatgaggtcagcaaatcgctgccgatccccaatcattacggcgtggatgatttcccgatcattatccaggataagcggctggataatttcggcacgccggagtacagcgaaccgggcagcggcgggtttgttggcgatacgctgctggtcaacggcgcgcaaagtccttacgtggaagtttcccgcggctgggtacgcctgcgcttgctgaatgcgtcaaactctcgccgttaccagttgcaaatgagcgacggtcgcgcgctgcatgttatttctggcgatcagggccttttacccgcgccggtgtccgtcaaacaactgtcgctggcgcccggtgaacgccgggaaattctggtcgatatgaccaatggcgatgaggtgtcgatcacctgcggggaagcggccagtattgtcgatcgcatccgtggcttctttgaaccttccagcattctggtctctacgctagtgctgaccttacggccaaccgggctgctgccgctggtgactgacagcctgccgatgcgtttattgcccacggagattgtcagcggcgcgccgattcgcagccgggatatcagcctcggggatgatcccggcatcaacgggcaattgtgggacgtcaaccgcattgatatcaccgcccagcaaggttcctgggagcgctggaccgttcgcgccgatatgccgcagcccttccatattgagggtgtctctttcctgatccgcaacgtcaatggcgccatgccgttcccggaagatcggggctggaaagatacggtatgggtggacgggcaggtggaattgctggtttattacggacagccttcctgggcgcacttcccgttctacttcaacagccagacgctggaaatggccgaccgggggtctatcggacaaatgctggtgaacccggcaccgtaa

SEQ ID NO: 72447 - DNA, 738 bp, Citrobacter koseri
atgctatatatctttcgtctaatcattaccgttatttactgcattcttgtctgcattttcggttcgatctactgccttttcagcccgcgtaacccgaagcatgtcgcgacgtttggccatatgtttggccgtctggcgccgctttatggcctgaaggtggagtgccgtaagcctgctgatgccgaaagctatggcaacgctatctatatcgctaaccatcagaacaactacgatatggtgacggcagccaacattgtgcaaccgcctacggtgacggtcggcaaaaagagcctggtctggatcccgttttttggccagctgtactggttaaccggtaacttgttgattgaccgaaataatcgtgccaaagcgcacggcacaatcgcggaagtggtgagccattttaaaaagcgccgtatctctatctggatgttcccggaaggaacgcgcagccgtggccgtggcctgctgccgtttaaaaccggcgcctttcatgccgctatcgccgccggtgttccggtgattccagtgtgtgtttccaatacatcgaataaaattaagcttaaccgactgaataacggtctggtgattgtagagatgctgccgccggtggacatcagccagtttggtaaggatcaggttcgtgaactggcggcgcattgccgctcgttgatggaacaaaaaattgcagaactcgatcaggaaattgcagagcgcgaagcgaccggcaaagtctga

SEQ ID NO: 72448 - DNA, 2259 bp, Citrobacter koseri
atgagcgatatggcagagcgccttgcgctgcatgaattcacggaaaacgcctatctgaactactccatgtacgtcatcatggacagggcgttgccgtttattggtgacggactgaagccggttcagcgtcgcatcgtgtacgcgatgtctgaactggggctgaacgccagcgccaaatttaaaaaatccgcccgtaccgtcggcgacgtgctgggtaaataccatccgcacggcgacagcgcctgttatgaagcgatggtgctgatggcgcagccgttctcttaccgttacccgctggttgacgggcaggggaactggggcgcgccggacgatccgaaatccttcgcggcgatgcgttataccgaatcccgtctgtcgaaatacgcggaagtcctgctgagtgaactcggtcaggggacggcggactgggtgccgaactttgacggcaccttgcaagagccgaagatgctgcctgcgcgtctgcccaatattctgctcaacggcaccaccggcatcgccgttgggatggcgacagacattccgccgcataacctgcgcgaagtggcgaaagccgcgatcaccctgattgagcagccgaaaacaacgcttgagcaggtgctggatatcgtgcaggggccggactacccgaccgaagcggaaatcatcacctcccgtgcggaaatccgtaagatttacgaaaatggtcgcggctccgtgcgtatgcgcgcggtatggaaaaaagaagatggcgcggtggtgattaccgcgctgccgcaccaggtgtccggcgctcgcgtactggagcagatcgctgcccagatgcggaacaaaaagctgccgatggttgacgatctgcgcgacgagtccgatcacgaaaacccgactcgtctggtgatcgtgccgcgttccaaccgcgtggatatggagcaggtgatgaaccacctgtttgcgaccacggacctggaaaagagctaccgcatcaacctgaacatgatcggtctggacggtcgcccggcggtgaaaaacctgctggagatcctgaccgaatggctggcgttccgtcgcgataccgtgcgccgccgcctgaactatcgtctggagaaagtcctcaagcgcctgcatattctggaaggtttgctggtggcgtttctcaatatcgacgaagtgattgagataatccgccatgaggatgaaccgaaaccggcgctaatgtcgcgttttggcatcacggaaactcaggccgaagccatcctcgaactgaaactgcgccatctcgccaaactggaagagatgaagattcgcggcgaacaggatgagctggcgaaagaacgcgatcaattgcagggcattctggcctccgagcgcaaaatgaacaccctgctgaagaaagagttgcaggcggattcagacgcgtatggcgacgatcgccgctccccactgcgcgagcgtgaagaagctaaagcgatgagcgagcatgacatgctgccgtctgaaccggtgacgatcgtgctgtcgcagatgggctgggtgcgtagcgccaaaggccatgatattgacgcacagggtctgaactataaatcgggcgacagctggaaagcctcggcgaaaggcaagagcaaccagccggtggtgtttatcgacacgaccgggcgcagctacgccatcgacccgattacgctgccgtcggcgcgtggtcagggcgagccgttgaccggtaaactgacgctgccgccgggcgcgaccgtagagcatatgctgatggaaggggatgagcagaaactgctgatggcctcggacgccggctatggtttcgtctgtacctttaacgatctggtggcccgcaaccgtgcgggtaaagcgctgatcacgttgccggaaaacgcgcacgttatgccgccggtggtgattgaagatgaaaccgatatgctgctggcgatcaccgccgccgggcgtatgttgatgttcccggtcagcgatctgccacagttgtcgaaggggaaagggaacaagatcatcaacattccgtctgcggaagcggccagaggcgacgatacgctggcccagctctacgttctgccgccgcaaagcacgctcacgattcatgtcggcaagcgcaaaatcaaactgcgccctgaagagctgcaaaaagtgaccggcgagcgcggtcgtcgcggtacgctgatgcgcggtttgcagcgcatcgatcgtattgagattgactcgccacgacgcgcccgcgacggcgacagcgaagaataa

SEQ ID NO: 72449 - DNA, 393 bp, Citrobacter koseri
atgaaaaaattggctgcaatggttgccgtaatggcgttgtgttccgctccggttctggcggctcagcaaggtggattttctggcccgacggcgacgcaaagtcagggcggcgggtttgttggcccgaacgggagtaatacgaccgtagaaagcgcgaaatcaatgcgtgatgacgcctgggtcaccctgcgcggtaacatcgttgagcgtatctccgacgatctgtatctgttcaaggatgccaccgggacggtgaatgtcgatatcgaccacaaacgctggaacggcgttaccgtaacgccgcaggacctggttgaaatccagggcgaagtggataaagactggaattccgttgaaatcgacgtgaagcaaatcaccaaagtcgccaaataa

SEQ ID NO: 72450 - DNA, 660 bp, Citrobacter koseri
atgcgtattttactggtagaagatgacgcgctgattggcgacggcatcaaggcgggtttaagcaaaatggggttcagcgtcgactggttcaccgaaggtcgtcagggtaaagaagcgctctacagcgcgccttatgatgcggtgatcctcgaccttacgctaccggggatggacgggcgggatatcctgcgcgaatggcgtgaacagggaaaacgcgaacccgtactgattctgacggcgcgagatgcgctggcggaacgcgtggaggggctgcgtctgggggcggacgactatctgtgcaaacctttcgcgctgattgaagtcgccgcccgcctggaggcgctgttacgccgcgctaacggccaggtgagcaacgaactgcgccacggccaggttacgctcaatcccggtaatctggtcgcgacgctggcaggcgatccgctgcccctgaagccgaaagagtttgccctgctggagctgctgatgcgcaacgtcgggcgcgtgttgccgcgtaagctcatcgaagagaagctgtatacctgggacgaagatgtctccagcaataccattgaggtacatgttcatcatttacgccgtaagctgggcagtgattttatccgcaccgtacacgggatcggctacaccctgggcaacccatga

SEQ ID NO: 72451 - DNA, 1350 bp, Citrobacter koseri
atgaaactcacacaacgtctcagcctgcgcgtcaggctcacgcttatttttctgatactggccgccatcacctgggtggcctccagcttcgtggcctggaaacagacgaccgacaacgtcgacgagctgtttgatacccagctcatgctgtttgcgaagcgccttattactctggatgtcaacgaaatctcggcgcctgaacggatggcgcagacgccgaaaaaattgaagcatggtcatgtcgatgacgatgtgctggcctttgcggtgtataccgccgacggcagaatggtgctgaacgatggcgataatggccgggatattccctacagctaccgtcgggaaggttttgatgacggatacctgaatggcgatgatgataaatggcgttttgtctggctgacctctgcggatggcaagtaccgtatcgtcgtcgctcaggagctggagtaccgcgaggatatggcgctggcgattgtcaccgcgcagctaacgccgtggctgatcgcgcttccgctgatgctgctcatcctgattgtactgcttagccgggaactcaggccgctgaaaaagctcgcccaggcgctgcgtttgcgctccccggaatcggaagagccgcttgacgataagggtgtgccaagtgaggttcgtccgttagtcagcgcgctcaaccagttatttgcccgtacgcattcgatgatggtgcgcgagcggcaattcacgtcggacgcagcgcatgagttacgcagcccgctcactgcgctgaaagtacaaaccgaggtggcgcagctctcggacgacgacccgcaggcgcgtcaaaaagcgctcatgcaactgcatacggggattgagcgcgccacgcgcctggtggaccagctcttaaccctttcacggctcgactcgctcgataacctgcaagatgtcgcggaagtctcgctggaggcactattgcaatccgccgtgatggatatctggcaaccggcccagcaggcgcatattgacgtgcgtctgcacgttaacgcccacaacgtcacgcgcacgggccaaccgctgctgctcagcctgctggtgcgcaatttgctggataacgccattcgttacagcccacagggcagcgtggtgaacgtgacgctgaatgcccggtattttaccgtccgggataatggccccggcgtttcgccggcggtgctggcgcgtatcggcgaacgattctatcgcccgccagggcagagcgtcaccggcagtggtctgggtttgtcgattgtccgccgcatcgcctcgctgcatgggatgagcgtctcgtttggcaatgcgccggaaggaggctttgaagccgtagtaacctggtga

SEQ ID NO: 72452 - DNA, 582 bp, Citrobacter koseri
atgagcaacattctgattatcaacggggcgaaaaaatttgcgcactccaatggtcagttgaacgacaccctgaccgaagtggcggatggccttctgcgcgacctcgggcatgatgtcaaaatcgtccgcgctgaaagtgattacgatgtcaaagccgaagtccagcacttcgtctgggctgacgtggttatctggcagatgcctggctggtggatgggcgcgccgtggaccgtgaaaaaatacatggatgacgtctttaccgaaggccacggtacgctgtacgccagcgatggccgcacccgttcggacgcgtcaaaaaaatacggttccggcggtctgattcaggggaaaaaatacatgctttctctgacctggaacgcaccgatggaggctttcaccgacaacgatcagttcttccacggcgttggcgtggatggcgtatacctgccgttccacaaggccaatcagttcctcggaatggaagcgctgccgacctttatcaccaatgacgtcatcaaaatgccggatgtcccgcgttatatcgcagaatatctcaagcatctgagcgagatttttggttaa

SEQ ID NO: 72453 - DNA, 315 bp, Citrobacter koseri
atgcttactgtcattgctgaaatccgtacccgtccaggtcaacatcaccgtcaggcggtactggatcagtttgccaaaatcattccgaccgtgctgaaagaagagggttgccacggctacgcgccgatggtcgatcatgctgcgggcgtggcctttcagacgaccgcacctgactcaatcgtgatggttgaacagtgggaaagcgttgcgcatctcgaagcgcatttgcaaaccccacatatgaaagcctacgccgaagccgttaaaggcgacgtgctggaaacaagtatccgtattctggagtcaggcgtttaa

SEQ ID NO: 72454 - DNA, 1191 bp, Citrobacter koseri
atgttaaatcatatcgttgaggaaacgttgcgcgcatttcctggcagcccggttgacgccggaacttttcaggatgaaatgatcggcgcgcgtgaacacgtcctcgaactgattagccgtcatttaacggaattcggtgaaaaatttcctgccgaaacctgcgttaaaggttattacccgttaactgacaacgttgagtggaccaccagcttctggaccgggcaactgtggctggcgtgggagatgagcggcgaggcgaaatatcgtgaactggcagaaaaacatgtgcgttcttttggcctgcgtattgccggacgccacgacaccaacacccacgatctggggttcctttataccctgtcctgcgtcgcagcctggcgactgacgggcaaccgtgatgcgcgtggtttttcgctgatggcggcggaagcgctactggagcgtttccatgaaaaggcgcagattatccaggcgtggggcgatcttaacgatcccgaacaggccgggcggatgatcatcgactgcaacatgaacctgccgctgctgtactgggcgagcgagcagacgggcgatccgcgttttgccgaggcggcaaaagcccatgtggtgcaggccgcgaaatacctgattcgtgaagatgcgtccaccttccatacttactacatggatgtgaaaaccggcgcgccgcgctacggcaacacccagcagggttatgcggatgattcatgctggtcgcgcggtcaggcgtgggggatttatggcttcctgctgagctatatctatacgggcgacaaagagatggtggcgctgtcgaaaaagctggcgaactatttccttaatcgcctgccggaagacgcggtctgccattgggatctggcgctggtggggacagacgcgctgcgtgacgcctcgtcggcggcgattgccgtgtgcggcctgctggagttgatcaaacacctgcccgtgaccgatccggatcgtgagcgttatcagcagtgggcgatgggaatcatgtcatcgctaacgaagcgctatctgatggcgaaaaatgagaaggggaacgggctgttgaaacattcggtgtaccacctttcgagcaacaaaggggtcgatgagtgtgcaagctggggggattatttctacgtggaagcgttaacgcgttttacccagtgctggaagctgtactggtaa

SEQ ID NO: 72455 - DNA, 1269 bp, Citrobacter koseri
atgaaaaattgttcaacaaataacagaactgaatattataaaatcagtagctttatattcctctatttctttacctggtctgccagtattggtttactggccatctggctggggcagaaagcacagctaagcggcacggttattggtacggtgtttgcagtaaacggtatttttgcggttattctgaaacccatttatggctacattctcgataaaatcggcatgagcaaatacctgctctattttgttgttatgatgtcggcactaatggcgccattctttatttatgtttatcaaccattattgctttcaaacaccatgctgggcattgttatcggcgcgatttacctgagctttgcctggtatgctggcgtggcggcttgtgaatcctactctgaccgcttcagccgtcttaacggcatggagtttggccaaatccgcatgtggggctcgctggggtgggcggtggcgtcgtcgttttccggcctgctgtttaacctctctccggcgtataacttcattatgggcagcgtggcgtcggtggtgatgctggtggtactgctgagtctgaaagtgaatgtgaatgcggcaaacgcagcggacgtgctgacaaaagagaaaatcgtcccggcggatgtctacgcgctgttgcgcagccgtaagttctgggcgttctgcctgtatgtcgccggcgtggcgtggatgatgtttatcgcagagcagcagttctcccgctactttgtcaccttcttctctgacgttcatgaaggcaacgcggtgtttggctatctgggaaccgtgcagtcgggaatggaatttgtcatgtatatggtggttccattatttgttaacgcgatcggcgctaaacgcggtttgttgattgtgggggcgctggttggcgcgcgtctgattatttccgggctgtgtgattcacacctgctcatctctgtactgaagccgctgtatggtctggaaatctgtctgctgttggtttcggtctttaaatacattgctgaacactttgataaacgcgtcaatgcgaccatgtatttattgggctatcaggcgatgctgtatgtcggcaatgtggtgatctcttcacctgccggattaatgtatgaccgaattggttttgagaaaacgtatatcatcatggggattattgcactgacctttacgcttatttcggcatttaccttatcggcatgtcagagtaaatcccgccatcgtactgctattgagatcgccgaaaataatacggcgcattaa

SEQ ID NO: 72456 - DNA, 1818 bp, Citrobacter koseri
atgtggtcggcaactgaagaaaaatcaaatccattgtcattccgtgaagacgtaatcagcgccgtcacaacgatgctgagcgcgctggataaacagtttcccgcaggggcggcgcagttttcactgggtgacacctgcgcgcactacagtgtggatatcgcctgcatggaagggctctccagagcgttatggggtctgtttcctctgatggctggcggcgctgaggtgccgtttgctgataagtatattcaggcgattaaactcggcaccaatccactcagtccgcactactggggcgataccgacccttacgatcagcgcctggtcgagatggccgcctacggcctcggcctggcgttgctgcaaacgcgtttaaccgaccagttcagcgaaacggaactggcgaatcttcatcgctggctaaaccagatcaccgacgcgcaaatgccggacagcaactggaactactttgcgattatcgtccagttgggtttcaaacgtgccgggctgccgttcgatcaggcagcgatcgaccgccgttttacgatgatggaagcgtactacctgggtgacggctggtatgccgatggccccggtcgcccaaaagattactacatttcaatggcgtttcacttttatggcctgatctacgccacgctcggcggggatgaggagagggcagaggtgctgcgcgaacgcgctcgcctgtttgccgctgattttatctacatgtcggcagcagatggcgcatccgtaccgtttggccgcagtctgacctatcgctttgcgatggtcgcgttctggagcgcggcggcgtttgctgagctggatgtcttctcgccgggcgtgattaaaggggtgatcctgcggcatctgcgctggtggcagcagcagccgatcgtcgatcgtgacggcattctgacgctggggtttgcttatccgaatctggcgatgtgtgaagattacaactcgccgggctccccttactgggcgctgaaggtttttttgatcctcgccttgccggacgatcacgccttctggcaggccgaagaactcccgttgccgcaatgcgcagaaaaacacgttattccccatgccgcacaaattttgcagcacagcgaaaattcagaccatgtcacgatgctgacttcgggtcagcttgaactgaataactacgttaacaccgaagcgaaatacacgaagtttgcctactccagccgttttggtttcaccattgaacgcggacgctatggccttaaacatgcggcgtgtgactccatgctgctgctggcggatggcgacaactatttccgtggccgccgtcgctgcgacgaagtgcgggtcgatgagaattttattttttcccgctggtctccgtggcatgacgtcactgttgagacctggctggcgcccttcggcgagtggcatcttcgcctgcaccgcatccacagcgcgcgaacgttgcaaaccgtggaaggcggctttgcggtgatgaaaacggcgcatcagctcagtgagcgcggatgctacctggcggcagagaatggatgcagcacgatcgtcgatctgtcgcccgcgctggcccgccagccggacagcattattactccgccgaacagcagcattatgtttgcacaatgcgccgcgattccactgcttaccgcagaaattgcacagggcgaaagctggctgtgttgcgcggtttctgcttccgggcaacagaaaaaatatacggcaattccgcaactgcaaataaacgataaccaggtggttattcgcgaaccagaaagcgcacgccagttatcgttctttttataa

SEQ ID NO: 72457 - DNA, 852 bp, Citrobacter koseri
atgaatgcaccctcatctcaggaacatctggaactgatcgcgctcaatgacgccattgcgtcatttagtcgattatttgctaattcggttcgctatcaccactggcatcagtgtctggaggtgctgtatgtggaggaaggatttggcgtggtgatcgtcgatcaccagcaatacaccatgcggccaggtcgattgttctttttcccgccctttaccctgcataaaatcatggtggatgagcaggcgcaagaccactaccgccgaaccattattcacctcgatcagcatgcggtactgaaagtgctgcgcgattttccgcttaatcaacagcgtctgcaaagtctgaccgtacgtggcggcgaggccagagtattcgatgtggcggatattcacccgcacgttgattttctcttcagccgttacgagaaaatggcagcgctcaagccgcttaacgccgaacagatttcctgcctgttattgagtttatttagcctgttgcccgaagataacgtcaatatgacggagattggcaccggaatagcaagccaggtgatgttctggctggatgagaattacacccgtaaattcagcctcagcgagctggcagaagagtcaggaaaatcaaaaagctacatttcccggcgctttcattttgaaaccggtgaaagcatcctcaattacctcaatacccttcggttacgcaaagcctgcgaagcgttgttacacagcgaggagagtgtgcgggagattgcccgacaggtggggttttcagacgtgacgtactttattagcgcctttggcaaagggattggcgaaacgccgttacagtatcgcaagcggcatagacagtaa

SEQ ID NO: 72458 - DNA, 1893 bp, Citrobacter koseri
atgacgcaaacttataacgctgatgccattgaggtactcactgggcttgagccggtacgccgccgcccggggatgtacaccgatacaacccgcccgaaccatcttgggcaggaagtgattgataacagtgtggatgaagcactggcgggtcacgcaaaacgcgtggatgtgattttacatgccgatcagtcactggaagtgattgatgacggccgtggtatgccggtggatatccacccggaagagggcgttccggcggttgaactgatcctctgccgactgcatgcgggcggtaagttctccaacaagaactaccagttctccggcggtctgcacggggtggggatttccgtcgtcaacgccttgtcaaaacgcgtggaagtcaccgtgcgtcgtgatgcccaggtctatagcatcgcctttgaaaacggcgagaaagtgcaggatcttcaggttgtcgggacatgcggtaaacgtaataccggcaccagcgttcacttctggccggatgaaacttttttcgacagcccgcgtttttccgtctctcgcttaacccatatcctgaaagcgaaagcggtgctgtgccctggcgttgaaatcacctttaaagatgaggtcaacaatagcgagcagcgctggtgctatcaggatggcctgaacgactatctgggagaagcggttaacggcctgccgacccttcctgaaaaaccgtttatcggtaattttgccggtgatacggaagctgtagactgggcgctgctgtggctgccggaaggcggcgagctgctgaccgaaagctacgttaacctgataccgacgatgcagggcggcactcatgtgaacgggctgcgccagggtctgctggacgcgatgcgtgaattctgcgaataccgcaatattctgccgcgcggcgtgaagctgtctgcggaagatatctgggatcgctgcgcttacgtgctctcggtgaagatgcaggacccgcagttcgccgggcagaccaaagagcgtctctcttcgcgccagtgtgcggcgtttgtgtcgggcgtggtgaaagacgccttcagcctgtggcttaatcagaacgttcagtctgcggagctgctggcggagatggccatttccagcgcccagcgtcgactgcgcgcggcgaagaaagtggtgcgcaaaaagctgaccagcggcccggcgctgccgggtaaactggcggactgtaccgcgcaggatctcaatcgtaccgaactgttcctcgtggaaggggactcggcgggcggttccgccaagcaggcgcgcgatcgtgaatatcaggcgatcatgccgctgaaaggtaagatcctcaacacatgggaagtctcttccgatgaagtgctggcatcgcaggaagtacacgatatttctgtggcgatcggcatcgatccagacagcgacgatctgagccagctgcgttacggcaagatctgtatcctggcggatgcggactccgatggtctgcacatcgccacgctgctctgcgccctgtttgtgaagcacttccgcacgctggtgaagcacgggcacgtctacgtcgcgctgccgccgttgtaccgtatcgatctcggcaaagaggtctactatgcgctgacggaagaagagaaagcgggcgtgctggaacagttgaagcgtaagaaaggcaagccgaacgtgcagcgctttaaaggtctgggtgaaatgaacccgatgcagctacgcgaaaccacgctcgatccgaacacccgtcgcctggtgcagctcactatcagcgacgaagacgatcagcgtaccaacgccatgatggatatgctgctggcgaagaaacgctccgaagaccgtcgcaactggttgcaggaaaaaggcgatatggcggatctcgacgcgtaa

SEQ ID NO: 72459 - DNA, 582 bp, Citrobacter koseri
atgtctacgcttctttatctgcatgggtttaatagctctccgcgttcggcaaaggcatgtcagcttaaaagctggctggcggagcgccaccctcatgttgagatgatcgtgccgcaactgccgccgtatcctgccgatgcggcagagttgctggaatctatcgtgcttgaacacggtggagcgccgctcggcgtcgttggatcgtcgctgggcggctattacgccacctggctgtcgcagtgttttatgttgcctgcggtggtggtgaacccggcggtgcggccgtttgaactgttgaccgactacctcggtcagaacgagaacccctacaccgggcagcaatatgtgctagagtctcgccatatttacgatcttaaagtcatgcagattgacccgctggaagcgccggatttgatctggttgctgcaacagacgggggatgaagtgttggactaccgccaggcggtggcgtattacgcctcctgccgccagaccgttatcgagggcggaaaccatgcattcacgggcttcgaagattatttcaaccagattgtcgatttccttggactgcacagtttctga

SEQ ID NO: 72460 - DNA, 828 bp, Citrobacter koseri
ttggaaagcctgttaacccttcctctggctggtgaggccagagtcaggatcttacaaattaccgatactcacctgtttgccgaaaaacatgaaacgctgctgggcgtgaatacctgggaaagttaccaggcggtgctggatgcgattcatgccgggcagcacgaatacgatctgatcgtggcgacaggtgatttagcgcaggatcaaacggctgcggcctatcagcactttgctgaaggtatcgcaagctttcgcgcgccttgcgtttggttgccgggtaaccatgactttcagcccgcgatgtacagcgcgttgcaggaagcggggatctccccggccaaacgcgtgtttatcggcgatcaatggcaaatcttgctgctggatagccaggtttttggcgtaccgcatggtgaattgagcgactttcagcttgaatggctggagcgcaaacttgccgatgcgccggagcgccacaccttgctgcttctgcatcaccatccgttgccttcgggatgcagctggctggatcagcacagcctgcgtaacgcggccgaactggacagcgtgctggcgaactatcctcgcgtcaaatacctgctgtgcggtcatattcatcaggagctggatcttgactggaatggccgccgcctgctggcgacgccgtctacctgcgtccagttcaagccacactgcgcgaacttcacgctggacacgatagggccaggctggcggacgctggaactgtacgccgagggttctctggaaacgcaagtgcatcgtctgccggggactcaattccgacccgataccgcttcggaaggatactga

SEQ ID NO: 72461 - DNA, 423 bp, Citrobacter koseri
atgaagcgttacacacctgacttccctgaaatgatgcgcctgtgcgaaactaatttttcgcaattgcgccgcctgttgccgcgcaatgacgcacccggcgaaacagtaagctatcaggtggccaacgcgcaatatcggttaacgatcgttgaatcgacccgatacactacgcttgttgcgatcgagcagacggcgccagccattacgtactggagcctgccgtcacttacggtgcgcctgtaccatgacgcgatggtggccgaagtgtgttcaagtcagcagatctttcgcttcaaagcgcggtatgattatccaaataaaaagttgcatcaacgcgacgaaaagcatcaaattaatcagtttctggccgactggctgcgttactgtttagcacatggagcgatggcgattccggtttattag

SEQ ID NO: 72462 - DNA, 633 bp, Citrobacter koseri
atgcataaaccagacaactcgccaatgactttctccaaaaacgatgtagaaattattgcacgagaaacgctatatcgcggttttttttcactggatctctatcgtttccgccaccgcctgttcaacggtgaaatgagcggtgaagtgaaacgcgaaatttttgagcgcggccacgccgcagtgttgctaccctttgaccctgagcgcgacgaaattgtactggtcgaacagattcgtatcgcggcgtatgacaccagcgagacgccgtggttgctggaaatggtcgccgggatgatcgaagagggcgaaaccgttgaggaggtcgctcgtcgcgaagcaatggaagaggccggacttgaggtcaaacggacgaaaccggtcatgagttacctggcaagccccggcggcaccagcgagcgtctttctattttagtgggcgaagtggatgccacgaccgcgaacgggattcatggtctggccgatgaaaacgaagatattcgtgttcatgtggtaagtcgggagcaggcttaccagtgggtagaagaggggaaaatcgacaacgcggcttctgtcatcgctttgcaatggctgcaactgcactatcaagagttaaaacacgagtggaaaaaatga

SEQ ID NO: 72463 - DNA, 1464 bp, Citrobacter koseri
atgaagaaattgctccccatccttatcggcctgagcctgacggggttcagcacactgagccaggcagagaacctgatgcaagtttatcagcaagcacgcctgagcaacccggaattgcgtaaatccgccgccgatcgcgatgctgcattcgaaaaaattaacgaagcgcgtagtcctttactgccgcaactgggtttaggtgccgattacacctacagcaacggctatcgtgatgcgaatggcatcaactccaacgccaccagcgcctctctgcaattaacccagaccctttttgatatgtcaaaatggcgcgcgctgacgttgcaggaaaaatccgcaggtatccaggacgtcacgttccagaccgatcagcaaacgctgatcctcaatacggcgagcgcctactttaaagtcctgaacgccattgacgttctctcttatacgcaggcgcagaaagaagccgtttatcgtcagttagatcaaaccacccagcgttttaacgtcggcctggtcgctatcactgacgtgcaaaacgcccgtgcacaatacgataccgtgctggcgaacgaagtcaccgcccgcaacaatctggataacgccgtagaagaactgcgccaggtcaccggtaactactacccggaactggcttcgctgaatgtcacgaactttaaaaccgataagccgcaggccgttaacgcgctgctgaaagaggccgaaaaccgtaacctgacgctgttgcaggcgcgtctgagccaggatctggcgcgcgagcaaatccgccaggcgcaggacggtcatctgccaacgctggatttaaccgcttctaccggcgtgtctgacacctcttatagcggctctaaaacccataacagcacgcagtatgacgacagcaatatgggccagaacaaaatcggcctgagcttctcgctgccgctgtatcagggtgggatggtcaactctcaggtgaaacaggcgcagtacaactttgttggcgcgagcgaacagctggaaagcgcgcaccgcagcgtcgtgcagactgtgcgctcttccttcaacaacattaatgcttctatcagcagcattaacgcttacaaacaggccgttgtttccgcgcaaagctctttggatgcaaacgaagccggttattccgtgggtacgcgtaccattgttgacgtgctggatgccaccaccgcgctgtatgaagcgaagcaacaactggcgaatgcgcgttataactatctgattaaccaactgaacatcaagaatgctctcggtacgttgaacgagcaggatctggtggcgctgaacaatgcgctgggtaaaccgatctcgacatccccggacaacgtcgcgccggaaaccccgcagcaggatgcagcggcggatggctataatgccagtacggttcagcctgcttcagcacgttccaccagcagcaacggtaacaacccgttccgtaactga

SEQ ID NO: 72464 - DNA, 669 bp, Citrobacter koseri
atgaaacggacaaaatctatacatcacgcctcgttccgcaaaagctggagcgcacgtcatcttactccggttgctctggcggttaccgctgtctttatgctggccggctgtgaaaaaagtgacgaaacggtttcgctgtatcaaaacgccgacgactgctcggcggcgaacccgggcaaaaacgctgaatgtacgaccgcattcaacaatgccctgaaagaagcggaacgtaccgcgccgaaatacgcgacgcgtgaagactgcgtggctgaattcggcgaaggccagtgccagcaggcgccggctcaggctggcatggcgccggaaaatcaggcgcaggcgcaatccagcggcagcttctggatgccgctgatggcgggctacatgatgggccgaatgatgggcggcggcgcgggctttgctcagcaaccactgttcagttcaaaaaacccggccagcccggcctacggtaaatacaccgacgccagcggcaagaactacggcgccgcacagccgggccgcaccatgaccgtaccgaaaaccgcgatggcgccgaagcccgccacaaccacaaccgttacccgtggtggttttggcgaatcagtggcaaaacaaagcacaatgcagcgtagcgccaccggcacctcgaatcgttcgatgggcggctaa

SEQ ID NO: 72465 - DNA, 1161 bp, Citrobacter koseri
atggaaagaatcagtattactgagcgcccggactggcgcgagaaagccaccgaatacggttttaattttcacacgatgtacggggaaccgtactggtgtgaagacgcgtactacaagctgacgctcgaccaggttgagaagctggaagacgtcaccgctgaactgcaccagatgtgccttaaggtcgtggagaaagtgatcgccagcgacgagctgatgacgaagtttcgcattcctaagcatacctggggctttgtacgtcagtcctggcaaacgcagcagccgtcgctctattcccgcctcgatctggcgtgggatggcacgggggagcctaagcttttagaaaataacgccgatacgccgacctcactgtatgaggccgcgtttttccagtggatctggctggaagaccagctcaatgcgggcaacctgccggaaggcagcgatcagtttaacagtctgcaagaaaagctgatcgaacgcttcgccgagctgcgtgagcagtatggcttccaactgctgcacctcacctgctgtcgcgacaccgtggaagatcgcgggacgatccagtatctacaggactgcgccgccgaagctgaaatcgccaccgagttcctctacattgaagatatcggcctgggtgaaaaaggtcagttttcggacttgcaggatcaggtgattgccaatctgtttaagctctatccgtgggaatttatgctgcgtgaaatgttctccaccaagctggaagatgctggcgttcgctggctggaaccggcctggaagagcattatctccaataaagcgctgctcccaatgttatgggaaatgttcccggatcaccctaacctgctgccggcttattttgcggaagatgactatccgcaaatggaaaaattcgtcgtcaaaccgatcttctcgcgtgaaggcgctaacgtctccatcattgagaacgggaaaacgatcgaagcggtggaaggcccttacggcgaagaaggcatgattgtgcagcagttctgtccgctgccgaagtttggcgacagctatatgctgattggcagctggttgatcaacgatcaacccgccgggatcggtattcgcgaagacagagcgttgatcacccaggatctgtcccgcttctacccgcatatctttgtcgaatag

SEQ ID NO: 72466 - DNA, 789 bp, Citrobacter koseri
atgtcttcaacacgtatgccagcattgtttttaggtcacggtagcccgatgaacgttctggaagataatgtgtatacccgtgcctggcggcatctgggggatacattgccgcgtccaaaagcgattgtcgttgtttcggcgcactggttcacgcgagggacgggcgtgacggcgatggaagcgccaaagacgatccatgattttggcggctttcctcaggcattgtatgacacgcactatcctgcgcccggttcgccggaactggcgcaacatctggttgagttgctgtcgccgacgccggtcgcgctggataaagaggcgtggggctttgatcacggctcctggggcgtgttgatcaagatgtacccgaatgcggatatcccgatggtgcagttgagcatcgacagcaccaaaccggcggcctggcattttgaaacagggcgcaaactggcggcgttgcgggacgaaggcattatgctggtcgccagtggcaacgtggtgcataacctgcgcacggcgcgctggcatggcgagaatacgccctacccgtgggcaacgtcattcaatgagtatgtgaaagcgaatctgacatggcaggggccggtagaacagcatccgctggttaattacctcgatcatgaaggaggatcgctgtcgaacccaacgccggatcactatctgccgctgctgtatgtgttaggcgcatgggatggcaaagagccggtgacgatcccggttgacggcatcgagatgggcagcctgagtatgctgtcggtacaggtgggatga

SEQ ID NO: 72467 - DNA, 774 bp, Citrobacter koseri
atgtcagtacctttaattctgaccttactggcgggcgccgccacctttattggcgcgtttcttggcgtgctggggcaaaaaccgtccaaccgcgtgctggcgttttcactgggattcgccgcaggcattatgctgttgatctcgctgatggagatgctgccagccgcgctggcggcggatggcatgtctccggtgctgggttacggtatgtttattatcggcttgctgggttatttcggtctcgacaggctgcttccccacgcccacccacaagatttagtgcaaaaaaccgcacgtcctctccccggctcgataaaacgcaccgccatcctgctgacgctgggcatcagtctgcacaacttcccggaaggtatcgccaccttcgtcaccgccagcagcaacctcgaattgggttttggcattgccctggcggtcgccttgcacaatattcctgaaggattagcggtcgccgggccagtctacgccgcaaccggttcaaaacggaccgcaattttctgggccggtatctccgggatggcggaaattcttggcggtgtaatggcgtggcttattctgggcagcctgatctcaccggtcgttatggcgtccatcatggccgccgtcgcgggaattatggtggcattatccgttgatgagctgatgccgctggcaaaagagatcgaccctaataataatcccagctacggcgtactgtgtggaatgtcggtgatggggttgagtcttgtcgtgcttcaggcgatgggaatcggataa

SEQ ID NO: 72468 - DNA, 177 bp, Citrobacter koseri
atgtttatcgcctggtattggctcgtcttaatttttctggtgatcgtagggtatttttgccatatgaaacgctattgtaaggcgtttcggcaggacagagatgcgctgctggaaatccgcaataaattacttcgtcgcgatgatgaagaacgcgttatgaccaaagagcaggaataa

SEQ ID NO: 72469 - DNA, 654 bp, Citrobacter koseri
atgaatcagacgctactttcctcttttggtacgccttttgaacgtgtggaacatgcgctatccgcgctgcgtgaaggacgcggtgtgatggtgcttgacgatgaagatcgcgaaaacgaaggcgatatgattttcccggccgagaccatgaccgttgagcagatggcgctgaccattcgccacggcagcggcattgtttgtctgtgcatcactgaagatcgtcgcaagcagctcgatttgccgatgatggtggagaacaataccagcgcctacggcaccggttttaccgtgaccattgaagccgcaaaaggcgtgactaccggcgtttctgccgcagaccgcgtaacgaccgttcgcgcagccattgccgatggcgcgaaacctgccgatctgcaccgtccaggccacgttttcccgctgcgcgcgcagccgggcggcgttctgacccgcggcggccatactgaagccaccatcgatctggtgacgctggccgggttcaaacctgctggcgtactgtgtgagctgacgaatgacgatggcacaatggcgcgcgcgccggaatgcatcgcgtttgccggtaaacacaacatggcagtagtgacgatcgaagatctggtggcttaccgccaggcgcacgagcgtaaagccagctaa

SEQ ID NO: 72470 - DNA, 297 bp, Citrobacter koseri
atgattgacccgaaaaaaattgagcaactcgctcgtcaggttcacgagtcgatgccgaaaggggtccgggagttcggggaagatatcgagaagaaaatccgtcagacgctgcaatcgcagctgacgcgtctcgatctggtgagccgtgaagagtttgacgtgcagactcaggtcttactgcgcacccgcgaaaagctggcgctgctggagcaacgcctcagcgagctggaagcgcgtgagaaacctgtagatgttaaacctgcgcccgccatcccgcctgtcgatccgcaagagtaa

SEQ ID NO: 72471 - DNA, 204 bp, Citrobacter koseri
atgaacgacaagaacgtatattcgttaaacaattttgattttctggcgcgcagtttcgccaggatgcaggctgagggccatcctgttgatatccaggccgttaccggaaatatggatgaggcgcaccgcagctggttttgcaaacgctatgcgctttactgccaacaggcgacacaggctaagaagctagaactcgaacactga

SEQ ID NO: 72472 - DNA, 1434 bp, Citrobacter koseri
atgaaagtaacgctgccagagtttgaacgtgcaggagtcatggttgttggtgatgtgatgctggatcgctactggtacgggccgaccagccgtatttcccccgaagcgccggtacccgttgtcaaagtggacaccattgaagaacgtccgggcggtgcggcgaacgtggcgatgaacatcgcttctctgggcgcaaattcgcgtctggtgggtctgaccggtattgacgatgcggcgcgcgcgctgagcaaaacgctggcagatgtgaacgtaaaatgcgacttcgtttctgtgcctacgcatccgacgattaccaaactgcgtgtactttcccgtaaccagcagctgattcgcctggattttgaagaaggctttgaaggcgtcgatccgctgccattgcacgagcgtattaaccaggcgctgggctcaattggcgcgctggtgttgtctgattacgccaaaggcgcgttggccagcgttcagcagatgattcagcttgcgcgtaaagcgggcgttccggtgctgatcgacccgaaaggcaccgatttcgaacgttatcgcggcgccacgctgttgacgccgaacctgtctgagttcgaagcggtggcgggtaaatgtaaaagtgaagaagagattgtcgaacgcggcatgaagctgattgccgatttcgaattttctgcgctgctggtgacccgttccgagcagggaatgacgctgctgcaaccgggtaaagcgccgctgcatatgccgacccaggcgcaggaagtgtatgacgttaccggtgccggggatacggtgatcggcgtactggcagccacattagcggcggggaactccctggaagaggcctgctatttcgcgaacgcggcagcaggcgttgtcgtcggtaaactgggaacatcaaccgtttcgccaatcgaactggaaaatgcggtgcgcggtcgtgcggataccggcttcggcgtgatgacggaagccgaactgaaacaggccgtggccagcgcgcgtaaacgcggcgagaaagtggtcatgaccaacggcgtttttgacattctgcatgccggacatgtgtcttacctggcgaacgcccgcaagctgggcgatcgcctgatcgtcgcggtgaacagcgatgcctccaccaaacgtctgaaaggcgaaactcgccctgtgaatccgctggaacagcgaatgatcgtgctgggtgcgctggagtccgttgactgggtggtttctttcgatgaggacaccccgcagcggctgattgctggcgtgctgccggatttgctggtgaaaggcggtgactataagccagaagagattgccggtagcgaagaagtctgggccaacggcggcgaagtgctggtgcttaacttcgaagacggttgttcgaccaccaatatcatcaagaaaatccagaaagacagcgataaataa

SEQ ID NO: 72473 - DNA, 2841 bp, Citrobacter koseri
atgaagccgctttcttcaccgttacagcagcactggcagaccgtggttgagcggttaccagaaatcctggctgaagccacgcttagcgttcaggcgaagtcagtacttacatttagtgactttgtgcaggacagcgtgattgcgcatcccgagtggctgactgagctggaaagcgcgccgccgcaggccgatgagtggcggcattatgccgcgtggttacaggatgcgttggcgcaggtgactgatgaagcggcgctgatgcgtgagcttcgcatattccgtcgccgcatcatggtacgtatcgcctgggcgcaggcgctgtcgctggtggaagaagaaaacattctgcaacagctaagccatctggcggaaacgttgatcgtcgccgcgcgcgactggttgtatgacgcctgctgtcgcgaatgggggacgccctgcaaccatgatggcgtacctcaaccgttgctgattctggggatgggaaaactgggcggcggcgagctgaatttctcctcggatatcgatctgatcttcgcctggccggagcacggttccacccggggcggtcggcgcgagctggataacgcgcagttctttacccgcatggggcagcgtttgatcaaagtgctggaccagccgacgatggacggctttgtgtaccgggtggatatgcgtctgcgcccgtttggcgacagtggcccgctggtgctgagttttgccgcgctggaagattattaccaggaacaagggcgcgactgggagcgttatgcgatggtcaaagcgcgcattatgggcgctgccgacagtgcgtatgtcgatgaactgcgcgccatgttgcgacctttcgtgttccgccgctatatcgatttcagcgtgatccagtccctgcgtaatatgaaagggatgattgcccgtgaagtgcgccgtcgcggtctgaaagacaatattaagcttggcgccggtggtattcgtgaaattgagtttatcgtgcaggtgttccagttgattcgcggcggacgggaaccctcgctgcaatcgcgctcgttgctgccgacgctgagtgcgattgatgcgctgcacctgttgccagaaaatgacgccggacagttacgcgcggcctatctcttcctgcgccgtctggaaaacctgctgcaaagcatcaatgatgagcagacccagacgctgccgggcgatgaactgaaccgggcgcgcctggcctggggaatgcgcacggatgactggtcgcagctcaccgacattctggcggcgcacatggctaacgtgcgtcgggtatttaacgaactgattggcgatgacgaaaccgatacccaggaagatacgctgtcggaacactggcgcgagctgtggcaggatgcgctacaggaagatgataccacgccggtgctggcgcatctgtctgacgacgatcgcggacgcgtgctggcgttaatcgccgacttccgtaaagagctggataagcgcaccattggcccgcgcgggcggcaggtgctcgaccatctgatgccgcatctgcttagcgacgtgtgctcgcgcgaagatgcctctgtgccgctgtcgcgtattacgccgctgctggtggggatcgttacgcgtaccacttaccttgaattactgagcgaatttcccggcgcgctgaagcacctgatttcgctgtgcgccgcttcgccgatggtggcgagccagctggcgcgttatccgctgttgctcgatgaactactggacccgaatacgctgtatcagccaacggcgaccgacgcttatcgcgatgagttacgccagtatttgctgcgtgtgccggaagatgacgaagagcagcagctggaagcgctgcgccagtttaaacaaacgcaactgttgcgcattgcggcggcggatatcgccggtacgctaccggtgatgaaggtcagcgatcacctgacctggctggcggaggccattatcgacgccgttgtccagcaggcgtgggggcaaatggtggcgcgctatgggcagccgacgcaccttgctgagcgcaccggacgcgggtttgcggtggtgggttatggcaagctgggcggctgggagctgggctacagttccgatcttgatctgatctttttgcacgattgcccaatggacgtgatgaccgacggcgagcgtgaaatcgacggtcgccagttctacttacgcctggcgcagcgcattatgcacctgttcagcacccgcacctcttccggtatcttgtatgaagtggacgcgcggctgcgcccgtccggcgcggcgggaatgctggtcacgtcggcggaagcctttgccgattatcagaaaaacgaagcctggacatgggagcatcaggcgctggtgcgcgcccgtgtggtttatggcgacccgcaactgacctcgcagtttgacgccgtgcgtcgcgatatcatgaccctcgctcgcgaaggcaaaacattgcagaccgaggtgcgcgaaatgcgcgagaaaatgcgcgcgcatctgggcaacaagcatcgcgatcgttttgatatcaaagccgacgaaggcgggattaccgatattgagtttattacccaatatctggtgctgcgctatgcgcatgaaaagccgaagctgacgcgctggtccgataacgtgcgcattctggaactgctggcgcaaaacgacattatggatgaacaggaagcgcaggcgctgacgcaggcttataccacgctgcgcgatgagcttcatcaccttgcgctacaggagcttccggggcatgtggcgcaagagtgcttcagcaaggaacgcgcactggtacgggcaagctggcagaagtggctggttgccgggtga

SEQ ID NO: 72474 - DNA, 1401 bp, Citrobacter koseri
atggcaatttggcgcaaaatactatctactgacaaaaaagaacgcgttaagttcgccgtcattcttcccatatgtgacataacccataagtacaaggcaatggctcaggaaatcgaattaaagtttatcgttaatcacgacgctgtagacgcgttgcgtgaccatctgcaaacactcggcggcgagcaccatgcgcccagccagttacagaacatttactacgaaacgccggacaagtggttgcgtggacatgatataggtctgcgcatccgtggcgagaatggtcgttatgaaatgaccatgaaaatcgccggtcgggttacggggggcctgcatcaacggccggaatacaatgttgcgctgagcgagccgacgttggatctcgcacggctcccgcaggaggtctggccgaacggcgagctgcccgcggatctcgcttcacgcgtgcagccgctgttcagcaccgatttttaccgtgagaaatggctggtggacgttgacggcagccgtattgaaatcgcgctcgatcttggcgaagtgaaggccggagaatgtgccgagccaatttgcgagctggagctggaactgttaagtggcgagacccgtgcggtgttgaaactggcaaaccaactggtgtcgcaagcgggtctgcgtcagggcagcctgagcaaggccgcacggggatatcatctggcgcaggggaatgctccgcgtgggatcagacctactgcggtgctgaaagcgccagccaaagccagcattgagcaggggctggaagcggcgctggagctggcattgtcgcaatggcagtaccatgaagaactgtgggtgcgtggaaatgacgccgccaaagcggatgtactggcggcgatggggctggttcgccatgcgctgatgctgtttggcggcattgtaccgcgtaaagcaagcgctcacttacgcgatttgctgacgcagtcggaagcgacccttgtctctgaggtttcagccatcacggctatctatagcacgcaaacggcgatggctaaactggcgctgaccgaatggctggtcaccaaagcctggcaaccgttcctcgacgccaaagcgcaggcgaaaatggccgattctttcaaacgctttgccgatattcacctgtcgcgccacgcggcggagctgaaagcgactttcgggcagccgttgggcgatcggtatcgcgatcagcttccgcgcctgacccgcgatattgacagcattttgctgctggcaggttattacgacgcgaatgcggtacaggcctggctggagaactggcagggcctgcgccacgcgattgtgacagggcagcgcattgaaattgaacacttccgcaatgaggcgatctttcaggaaccgttctggctgcatagcggaaaacgataa

SEQ ID NO: 72475 - DNA, 621 bp, Citrobacter koseri
atgccaaaattacgcctgattggattaactttacttgcacttagcgccactgccgtctcccacgcagaagagaagcgctatgtctctgacgaactgaatacctgggtccgcagcggtccgggagataattatcgcctcgtgggtacggtgaatgccggcgaggaagtgacattattacagactgacgccaacacgaattacgctcaggtgaaagacagtacaggtcgtactgcctggatcccgatgaaagagctgaacagctcgcccagcctgcgtatccgcgtaccggatctggaaaatcaggttaagacgctgaccgataagctgaacaatattgataccacctggaatcagcgcacggccgacatgcagcaaaaagtgtcgcagagcgacagcgtgattaacgggttgaaagaagaaaaccagaagctgaaaaacgagctgatcgtggcgcagaagaaagtcagcgccgccaatctgcaacttgatgacaagcagcgcaccattattatgcagtggttcatgtatggcggcggcgtgctgggactcggcctgctgctcggcctggttctcccgcacatgatcccaagccgtaaacgcaaagaccgctggatgaactaa

SEQ ID NO: 72476 - DNA, 1242 bp, Citrobacter koseri
gtgaagatttatctggtcggtggtgctgttcgggatgcgttgttagggctaccggtcaaagataaagattgggtggtggttggcgccacgccgcaggagatgcttgacgcgggctaccagcaggtaggccgcgattttcccgtgtttcttcatccgcaaacgcgtgaagagtatgcgctggcgcgcaccgagcgtaaatccggttcaggctataccggctttacctgctatgccgcgccggacgtgacgctggaagaagacctgcaacgtcgcgacctcaccattaatgccctcgcgcaggatgacgacggccatatcgtcgacccctatcaggggcgtcgcgatctggacaatcgcctgctgcgccatgtttcccccgcctttagcgaagatccgctgcgcgtgttgcgcgtggcgcgttttgccgcccgctacgcgcacctcagtttccgcatcgctgatgaaaccctggcgttgatgcgcgacatgaccgccgcaggcgaactggaacacctcacgccggagcgcgtatggaaggagaccgagaacgccttaaccacgcgcaatccgcaggttttctttcaggtgctgcgcgactgcggcgcgctacgcgttctgttcccggaagtggacgcgctgtttggcgttccggctccggcaaagtggcacccggaaatcgataccggcatccacacattgatgacgttatcaatggccgccatgctcagcccgaacgttgatgtgcgtttcgccacgctctgtcacgaccttggaaaagggttgacgcccaaagcgctctggccgcgccatcatggtcacggcccggcaggcgtaaagctggtcgagcagttatgccagcgtctgcgtgtgccgaatgagattcgggatttagccaaactggtggcggaattccacgatctcatccataccttcccgattttgcagccgaaaacgatcgtgaagctgttcgattcgattgacgcctggcgtaagccgcagcgcgtagagcaaatcgccctgaccagcgaggccgacgtgcgcggtcgtaccggttttgaggcgtctgactatccgcaaggtcgctggctgcgcgaagcgtggctggtcgcgcaggcggtgccgacaaaagaggtggtggaggcaggctttaaaggcgcggagatccgcgaagaactcaccagacggcgaattgcagcggtggctaactggaaggaacggcgttgcccgaaacccgaggcgtaa

SEQ ID NO: 72477 - DNA, 819 bp, Citrobacter koseri
atgagcgatatacactcgctgctggtggcggcaattttgggtgtggtcgaaggattgacggagtttttgcccgtctccagcacgggccatatgatcattgtcggtcacctgttgggttttgaaggcgatacggcagagacgtttgaggtggtaattcagctgggatcgatcctggcggtggtggtgatgttctggcggcgtttgttcggcctgatcggcattcactttggcaaacaaccgcatgaaggcaccggaaaaggacggctgacgttagggcatattgtgctggggatgatcccggccgtggtgctgggcctggtgttccatgacaccattaagtctttgtttaatcccgtcaacgtgatgtatgcgctggtcgtgggcggtctgctgctgattgccgcggaatgcctgaagccgaaagagccgcgcgcgccgggcctggacgatatgacgtatcgtcaggcgtttatgattggctgcttccagtgtctggcgctgtggccgggcttttcccgttccggcgcgaccatttccggtgggatgttgatgggggtgagtcgctatgccgcatcggaattctcattcctgctggctgttccgatgatgatgggcgcgacggcgttggatctctacaagagctggtcgttcctgacggtggaagatatccccatgttcgccgtgggatttgtgactgcgttcattgtggcgctgatcgccatcaaaaccttcctgcaattgattaagcgcatctcgttcattccgtttgcgatttaccgctttatcgtggctgctgcggtctacgttgttttcttctga

SEQ ID NO: 72478 - DNA, 369 bp, Citrobacter koseri
atggatattgtatttatagagcaactttcggtaatcaccactatcggtgtttacgactgggagcaaactatcgaacagaaactggtgttcgatatcgaaatggcgtgggacaaccgtaagtcagccagaagcgacgacgttgcggattgtctgagctatgccgacattgccgatacggtagtcagccatgtggagggcggccgttttgcgttagtcgaacgcgtagcggaagaggtggcggatctgctactcagccgctttaactctccgtgggtacgcatcaagctcagtaagcccggcgccgtagcgcgtgcggcgaatgttggcgttatcattgagcgtggcaataatctgaaagaaaataattaa

SEQ ID NO: 72479 - DNA, 618 bp, Citrobacter koseri
atgagtgcaatcgcgcctggaatgatcctcttcgcgtacctctgcggctcaatttccagtgccattctggtctgccgcattgcaggtttacccgacccgcgtcagagtggctccggtaaccctggcgcgaccaatgtgttacgcatagggggcaagggagcagccgtagcggtactgattttcgacgtcctcaaaggcatgctgccggtctggggcgcttatgcattaggtgtaacccctttctggttgggcctgattgccatcgccgcctgtctgggacacatctggccggtcttttttggcttcaaaggcgggaaaggcgtcgcgaccgcattcggcgcgatcgcgcccatcggctgggacttaactggcgtgatggcgggcacctggctgctgaccgtcttactgagcggttactcgtcattgggcgcgatcgtcagcgcgctgattgcgccattctacgtgtggtggtttaaaccccagttcaccttcccggtctctatgctgtcttgcctgattttgctgcgccaccatgacaacatccagcgcctgtggcgtcgtcaggagacgaagatctggacgaaactcaagaagaagcgcgagaaagatccgcagtag

SEQ ID NO: 72480 - DNA, 936 bp, Citrobacter koseri
atgctgaacaactatcccttagccaaagacctacaggttttggttgaaattgtccacacgggaagctttagcgcggcagcggcggcgctggggcaaacgcccgcgttcgtgacgaaacggattcagattcttgagacaacccttgccaccacgctgctgaaccgctcggcaagaggtgttgcgctgacggaaagcgggcaacgctgctatgaacatgcgctgaagctcctcacgcactatcagcggctggtggatgaggtgacgcaaataaaaacgcgcccggagggaatgattcgcattggctgtagttttggttttggccgcagttatattgcacctgccattaccgacctgatgcgcaattatcctgaattacaggttcactttgaactcttcgatcggcaaattgatttggtacaggataatattgatctggatattcggattaacgatgaaattcctgattattatattgcgcatttgttaacaaagaataaaagaatattatgcgcgtctcccgcatatctccagaaatatcctgagccgaaaaccttacaagaattaagcggtcatgattgtctggtgacaaaagaacgtgatatgacccacggcatatgggaactggggaacgggcaagagaaaaaatcagtgaaagtaaccggacacctctcttccaatagcggtgaaattgttttgcagtgggcgctggagggcaaagggatcatgctgcgttcagagtgggatgtgcagccgtttctggcgagcggtaaactggtgagggtattgccggagtatgcgcagagcgccaatatctgggcggtctatcaggaaccgctgtaccgcagcgtaaagttacgggtatgtgtggagtttctggcggcatggtgccagaagcgactcggcaagccagacgagggatatcaggtggcgtggtga

SEQ ID NO: 72481 - DNA, 912 bp, Citrobacter koseri
atgatgagcaatcaaaataaccaaaatgcggttactacgttgacggatattgtcgctaattttaccgccatgatctccacccgaatgcccgacgacgtcgtcgataaattaaaacagctgcgtgatgccgaaacctcatcgatgggaaacattatctaccacacgatgttcgataacatgcagaaagcaatcgacctgaaccgcccggcctgccaggacacgggcgaaattatgttcttcgtgaaggtcggttcccgcttcccgctgctgggcgagctgcaaagtattcttaagcaggccgtggaagacgccaccgtaaaagcgccgctacgccataacgcggtcgaaattttcgacgaagtgaataccggcaaaaacaccggcagcggcgtgccgtgggtcacctgggagattattcccgatggcgacgatgcggaaattgaagtttatatggcgggcggcggttgcacgctgccggggcgttccaaagtgctgatgccttccgaaggctacgaaggcgtcgtgaaattcgtctttgaaaacatctccacgctggcggtcaatgcctgtccaccggtactggtcggcgtgggcatcgcaacctccgtcgaaaccgccgccgtgctttcccgcaaagcgattctgcgcccgataggcacccgtcatccaaatccaaaggcggcagaacttgagctgcggctggaagaagggctaaaccgcctgggaatcggcccacaagggctgaccggcaacagctcggtgatgggcgtacacatcgaatccgccgcccgtcatccgtcaaccattggcgtggccgtctccaccggctgctgggcgcaccgtcgcggtacgctgctggttcattctgacctctccttcgaaaacctgtcccacacccggagcgcgttatga

SEQ ID NO: 72482 - DNA, 606 bp, Citrobacter koseri
atgaaaaagatcctcactaccccgatcaaagccgaagacctggaagatatccgcgttggcgatgtgatctacctgaccggaacgctggtgacctgtcgcgacgtttgtcaccgccgcctgatcgaactcaagcgccctattccttacgatctcaatggcaaagcgattttccacgccgggccgattgtgcgtaaaaacggtgataaatgggagatggtctccgtcggcccgaccaccagcatgcgtatggaagcctttgaaaaagagttcattgagcagaccggcgtgaagctggtggtcggaaaaggcgggatggggccgctgaccgaagaaggctgccagaaattcaaagcgctgcacgtcatcttcccggctggctgcgcggtgctggcggcaacccaggtcgaagagatagaagaggtgcactggacggaactcggcatgccggaatcgctgtgggtttgccgggtgaaagagttcgggccgctgattgtttctatcgatacccacggcaacaacctgatcgccgacaacaaaaaacagttcgccgagcgtcgcggtcccatcgttgacgagatctgcgagtacgtgcactacatcaaataa

SEQ ID NO: 72483 - DNA, 1464 bp, Citrobacter koseri
atggcacctttatctggttggtggcgatacctggctccactggtggtcatcgccattattgctgttttgccagtccccaccggtcttgagagccacacctggctctattttgcggtctttaccggcgtcattgtgggactcattctggaacctgtaccgggcgcggtcgtggcgatgatcgggatttcgatcattgccgttctgtcgccgtggctgctgttcagccccgatcagctcgcgcaggaaggcttcaaatttaccgccaaagccctctcgtgggcggtgtctggtttttctaactcagttatctggctgattttcgccgtttttatgtttggcaccggctatgaaaaaacaggtctcggtcggcgaattgcgctgatgctggtgaagaagatgggccatcgcacgctgtttcttggctatgcggtgatgttttccgagctgatcctcgcccccgtcacgccgtctaactccgcgcgcggcgccgggatcatctacccgataattcgcaacctgccgccgctctataactcgcagcctaacgacgccagttcccgctccattggctcgtatattatgtggatgggcatcaccgccgactgcgttaccagcgccattttcctgacggcgatggcgcctaacctgttgctgattggcctgatgaaaagcgcatcccatacggcgctaagctggggcgactggttctcaggaatgctgccgctaagcattctgctggtcttgctggttccgtggctggcctacgtgctgtatccgccggtgctgaaatcgggcgaccaggtgccgcgctgggcggaagctgagctaaaggagatgggcccgctctgctcgcgcgagaaaaagatgctggtgctgatggtcggcgcgctggtgctgtggatcttcggcggcgattacattgatgccgcaatggtcggttacagcgtggtggcattgatgctggtattacgcattatctcctgggatgacatcgtcagcaataaagcggcatggaacgttttcttctggctggcttcgctgattacgctcgccaccggactgaacaataccggctttatcacctggtttggcaaactgctggcaaacgggctaagcggctattcgccgatgatggtgatggtcgcgctcatcgtggtgttttatctgttacgctacttttttgccagcgccaccgcttatacctccgcactggcgccgatgatgattgccgccgcgctggcgatgccggacatccccttaccggtgttttgcctgatggtcggcgccgccattggtctgggcagcattctcaccccctatgcgaccggcccaagccccatctactacggtagcggttatctgccgacggtggattactggcggctgggcgctatttttggcctgatcttcctggttctgctggtaataaccggccttgtctggatgcctctcgttttgctgtaa

SEQ ID NO: 72484 - DNA, 858 bp, Citrobacter koseri
atgcactcccctcacgctgataagggaaacgctctggacaccgttgcgcacaagactctcacacggggctggcaggccgaactggatctgcggtttacccgcgccgcgcataaaacagtgctcacttcggcgcgacacgtcggcccgctgacggtacagcgtccgttttacccggaagacgacgtttgccacctctatttgcttcatccgccgggcggcattgtcggaggcgatgaactcacgatttccgccacgcttgcaacagacagccatgcgttaatcacccagcctggctcagggaagttttaccgcagtcgcggccctcaggcgcagctgcggcaggatttttatctcgccccacaggccacgctggagtggctgccgcaggatacgatcctttttcccggcgcgaacgctaacatccagtcggtctttcatctggcgcaagagagccggctgctggcctgggatctgctctgtctggggcgaccagtgatgcaggagaccttcagccacggcacgctgcgcaaccgcctggaagtatggcgggacggtacgccgctattaatagaaaggctgcatcttgagggaggaagcctgcacaccgtcgccagacatccctggagcggtacgctgctctgttatcccgccacggaaaagatgctggacggcgtacgcgagcaaattgcccccctcggcgactacgctggcgcgacgctgattgattcactgctggccctgcgctttctcgggcacgacaacctgcttatccagcgcgttatgcgcgccgtctggcaatccttacgaccacaactgacccaaaaaccgccactcctgccccgtatctggcagacataa

SEQ ID NO: 72485 - DNA, 303 bp, Citrobacter koseri
atggaactgactcccagagaaaaagacaagctgttgctctttaccgccgcgctggtggcggagcgtcgtctggcgcgtggactgaagctgaactacccggaatcggtggcgctgatcagcgctttcattatggaaggcgcccgcgacggcaaaagcgtggcgtcactgatggaagacggtcgccatgtgttgacccgcgatcaggtgatggagggcgtgccggaaatgatccctgatattcaggttgaagccacctttccagacggctcgaaactggtcaccgttcataacccgatcgtataa

SEQ ID NO: 72486 - DNA, 321 bp, Citrobacter koseri
atgattccaggcgaatacaggatctccacgggaaacatcgcgatcaatacaggcagagaaacctgcacgatcgtggttgagaatcatggcgatcgcccggttcaggtcggatcgcactatcacttttacgaggtcaatcccgcattacgctttgacaggcaagtcgcacgcggttttcgtctgaacatccccgcaggcacggcggtgcgttttgagccggggcaaaaacgcgaggtcgaactggtgcgcgtcgccggggcacagcgtatttttggttttcgcggcgaggtaatgggctctctggaggcagacaatgactga

SEQ ID NO: 72487 - DNA, 1704 bp, Citrobacter koseri
atgactgagatttcccggcaggcttatgccgacatgtttggtccgacgaccggcgaccgggtgcgtctggcggataccgaactgtggatcgaagtcgaaaacgatctcacgacctacggcgaagaggtgaaattcggcggcggtaaagtgatccgcgacggtatgggccaggggcaaatgcgtgctcgcgcgtgtgtggatctggtgatcaccaacgcgctgatcgtcgatcactgggggatcgtcaaagcggacatcggcatcaaagacggcaggatcttcgccatcggcaaagccggtaacccggatattcagcccaacgtgacgatcccgattggcgtcggcacggaggcgatcgccggcgaagggaagatcgttaccgcaggcggcgtggacacgcatattcactggatctgcccgcagcaggcggaagaggcgctggtctctggcgtgacgaccatgattggcggcggcaccggcccggcggcgggcaccaatgccaccacctgcacgcctggcccgtggtacatcgcccgcatgttgcaggcggcggacagcctgccggtgaatatcggttttctcggcaaagggaatggatcgaacccggacgcgctgcgtgagcagattgccgccggcgcgatcggcctgaagatccacgaggactggggcgcgacgcctgcggcgatcgactgtgcgctgaccgtggctgaagagatggatattcagatcgcgctgcacagcgacacgttaaacgagtccggtttcgtcgaggacacgctggcggcaattggcgatcgcacgatccatacctttcataccgaaggggcgggcggcggtcacgccccggatattatcaccgcctgcgcgcatccccatattctcccctcctccaccaacccgacgctgccttataccgtcaacaccattgacgaacacctcgatatgctgatggtctgccaccatctcgacccggatatcgccgaagatgtggcatttgctgagtcgcgtattcgtcgggaaaccatcgccgccgaagatgtgctgcacgatctcggcgccttttccctgacctcgtcggattcccaggcgatgggacgggtgggcgaagtcattctgcgaacctggcaggtggcgcaccggatgaaagtacaacgcggcccgttagcggaggagacgggcgataacgacaaccagcgcgtaaaacgctacatcgccaagtacacgataaacccggcgctaacccacggcatcgcccatgaggtcggttctgttgaggccggaaagctggcggatctggtgctctggtctccggccttttttggcgtaaaacccgcaacactcatcaaaggcgggatgattgtctgcgcgccgatgggtgatatcaacgcctcgattcccacaccgcaaccggtgcattaccggccgatgtttggcgcgcttggcgcggcgcgtcatcactgtcgcctgacctttctttctcaggctgcggttgaaaacggcattgcgcagcagctcaacttacgcagcgccaccgccgtcgtgaaaggctgccggacggtaaaaaaagccgacatgatccacaacagcctgcaacccaacatcaccgttgacgcccagacttacgaggtgcgcattgacggtgagccgatcaccagcgaaccggcagacgtgttgccgatggcccagcgttattttttattctga

SEQ ID NO: 72488 - DNA, 459 bp, Citrobacter koseri
atgctgtatctgacgcaacgtattgaaacgcccgccgccgtcacggcaacgctgacgctccccattgatgtccgcgtcaaaagccgggcgaaggtagtgctgggcgacggacgcgaagccggtttactgctaccgcgcggtttgctgttacgcggcggcgatcgcctgagcacggaggatggcgcagaggtggtggagatcatcgccgcaaacgaagccgtttcggtcgtgcgctgcgccgatccgttcctgctcgccaaagcctgctaccacctgggcaaccgccacgttccgctgcaaattctgcctgacgaactgcgctatcaccacgatcacgtactcgacgacatgctgcgccagttcagcttagaggtgactttcgcgcatctgccctttgaaccggaggcgggagcatatgccagcgaatctcacggccatcaccacggccacgcccactga

SEQ ID NO: 72489 - DNA, 675 bp, Citrobacter koseri
atgactgacgccagacaacggctgcgcctgatgcagctcgccagcagcagtttaccggtgggatcgtttacctggtctcaggggctggagtgggcggtggagatcggctgggtgaaaaacgcggaagactttgcgcactggcaaacgcaacagctggagcagaacttttttactgtcgacctgccgattttcgcccggttgtaccacgcctgtgaacggaatgacgttaccgccgctcgccgctggagcgcatatctgctggcctgtcgggaaacccgggaactgcgcgaagaagagcgcagccggggggcggcgtttacacgcctggtggtggactgggtgccggactgcccgcagacgtggcgtccgctttttgccgacagccagctctgcggtatggcgtggctgggcgtgcgctggcgcatcccactgacggatctggcgttaagcctcggctacagctggttagaaagcgcggtgatggcgggggtgaagctggtgcccttcggacaacaggcggcgcagcagctcattctttcgctttgcgaccattacgcgcagggtatggcgcaggcgctggctcgcccggatgcggatctgggctcatccacgccgctggccgccatcgcttctgcccgtcacgaaacacaatattgccgattatttcgctcctga

SEQ ID NO: 72490 - DNA, 618 bp, Citrobacter koseri
atgaacgactataaacatcccctgcgcgtcggcgtgggcggtccggtgggttccggtaaaaccgccctgctggaagcgttatgcaaagcgatgcgcgatacgtatcaactggcggtggtgactaacgatatttataccaaagaggatcagcgcattcttaccgaagcgggcgcgctggcgccggaaaggattgtcggcgtggaaaccggcggttgtccgcataccgccattcgcgaagacgcctcaatgaacctggcggcggtggaagcattaagcgagacattcggcaacctggatctgatctttgtcgagagcggcggcgataacctgagcgccaccttcagcccggaactggccgatctgacgatctatgtgatcgacgtggccgaaggcgagaagatcccgcgtaaaggcgggccggggatcaccaaatccgattttctggtgatcaacaaaacggatctggcgccgtatgtgggcgcgtcgctggaggtgatggcgcgcgatacaatgcgtatgcgcggggatcggccgtgggcgtttaccaacctgaaagccggtgacggcctggcgacgattattgcgtttctggaagataaagggatgttgcgggcgtag

SEQ ID NO: 72491 - DNA, 1014 bp, Citrobacter koseri
atgcgtgtactgggtattgagacatcctgcgatgaaaccggcatcgctatttacgacgacgaaaaaggtctgttagccaaccaattgtatagtcaggtgaaattgcacgctgactacggcggcgtagtgcctgaactggcctcgcgcgaccacgtacgcaagaccgtgccgttgatccaggcggcgttgaaagagtcgggtctgacggcgaaagagattgatgccgtggcctataccgcagggccgggtctggtgggggcgctgctggtcggcgcgaccgttggccgttcgctggcgtttgcctggaatgttccagcgattccggtacaccatatggaagggcacctgctggcgccgatgctggaagacaatccgccggaatttccgttcgtggcgctgctggtctccggcggtcatacccaacttatcagcgtgaccgggattggtcagtatgcgctgttaggcgaatccattgacgatgcggccggtgaagcgtttgataaaaccgccaaactgctgggactggattaccctggcggcccgatgctgtcgaaaatggcggcacagggcaccgcagggcgttttgtctttccgcgtccgatgaccgaccgtcctgggctggatttcagcttctccgggctgaaaacgttcgccgcaaacacgatccgcagcaacggtgatgatgaacagacccgcgccgatattgcccgtgcgtttgaagatgcggtggtggatacgctgatgatcaagtgtaagcgagcgctggatcagaccggctttaagcgtctggtgatggccggcggggtgagcgccaaccgcacgctgcgtgcgaagctggcggaaatgatgcaaaaacggcgtggcgaagtgttctacgcgcggccagagttttgcaccgataacggcgcgatgatcgcctacgccggtatggtgcgcttcaaagccggcgcaacggcggatttaggcgtgagcgtgcgtcctcgctggccgctggcggagctgcctgcggcgtga

SEQ ID NO: 72492 - DNA, 216 bp, Citrobacter koseri
atgccggtaattaaagtacgtgaaaacgagccgttcgacgtagctctgcgtcgcttcaagcgttcctgtgagaaagcaggtgttctggcggaagttcgtcgtcgtgagttctatgaaaaaccgactaccgaacgtaagcgcgctaaagcttcagcagtgaaacgtcacgcgaagaaactggctcgcgaaaacgcacgccgcactcgtctgtactaa

SEQ ID NO: 72493 - DNA, 1746 bp, Citrobacter koseri
atggctggacgaatcccacgcgtatttatcaatgacctgctggcacgcaccgacatcatcgatctgatcgatgcgcgggtgaagctgaaaaagcagggcaagaattttcacgcgtgctgtccgttccataacgaaaaaaccccctctttcaccgtgaacggtgaaaaacagttttaccactgctttggctgcggcgcacacggcaacgcgatcgatttcctcatgaactacgacaagctcgatttcgtggaaaccgtcgaagaactggctgcaatgcacaacctggaaattccctacgaagcagggacaggtcttagccagatagagcgccatcaacggcaaaacctctatcagttaatggacgggctgaatgcgttttatcaacagtcgctcgcccaccccacagcagagcctgcgcgccaatatttgcaaaaacgcggccttagcgctgaaatcgttcaacgcttcgcgattggtttcgctccgccaggctgggataacgcattaaaacgtttcggtaataatagcgacaacagagcgctgttactggatgccggaatgctggtcaacaatgaccagggcagaacctacgatcgtttccgtaatcgggtgatgttcccgattcgcgataaacgaggacgggtgattggttttggtggtcgcgtactcggtaacgatacgccgaaatacctgaactccccggaaaccgatattttccataaaggtcgacagctgtatggcctttatgaagctcagcaacataacgctgaaccgcagcgactgcttgttgttgaaggctatatggacgttgtcgcgctggcgcagtacgacattaactacgccgtggcatcgttggggacatcgacaacagccgaccatatccacatgttattccgggcgactaacaatgtgatttgctgttatgacggcgatcgggccgggcgcgatgcggcatggcgagcgcttgaaacggcaatgccctatatcactgacggacggcagttgcgctttatgttcctgcctgatggcgaagacccggatacgctggtgcgtaaagagggcaaagaagcattcgaagcacggatggagcaggctctgccgctctctctgtttctcttcaatagcctcttgccgcaggttgatttgagtacgccggatggaagtacgcagcttgccgcgctggcgctgccgctgattaaccaggttcccggagatacgcacaggatccagctacgacagatgctggggctgaaattaggcatctttgacgatagccagcttgaccgcttaatgccaaaacaggcagaaagtggcacggtacgcccagctccgcagctaaaacgcacgaccatgcgtatacttatagggttactggtacaaaacccggatttagcgccgttagtaccaccgctaggcggtctggatcaaaaaaagctgcccgggcttggcttatttgaagaactggtcaacacttgtttgtctcaaccaggtctgaccaccggccaacttttagaacattatcgcggcacaaatagtgctgcgacccttgaaaaattgtcgatgtgggacgatatagctgataaggacattgctgaaaaaaccttcaccgactcactcaaccatatgtttgattcgatgcttaagctgcgccaggaagagttgattgctcgcgatcgcacacacggtttaagcaacgaagaacgccgggaactctggacgctgaaccaggaactggccaaaaaatga

SEQ ID NO: 72494 - DNA, 1845 bp, Citrobacter koseri
atggagcaaaacccgcagtcacagctgaagcttcttgtcacccgtggtaaggagcaaggctatctgacctatgccgaggtcaatgaccatctgccggaagatatcgtcgattcagatcaaatcgaagacatcatccaaatgatcaacgacatgggtattcaggtgatggaagaagcaccggatgccgatgatctgctgcttgctgaaaacaccaacaacaccgacgaagacgcggaagaagctgctgctcaagttttatccagtgttgaatctgaaatcggtcgtaccactgacccggtacgcatgtacatgcgtgagatgggtacggttgaactgttaacccgtgaaggcgaaatcgacatcgctaaacgtatcgaagacgggatcaaccaggttcaatgctccgttgccgaatacccggaagcgattacttatctgcttgaacagtacgatcgcgttgaagccgaagaagctcgcctgtcagatctgatcaccggctttgttgacccgaacgctgaagaagatatggcgcctaccgccacgcacgtcggttctgaactctctcaggaagagatggacgacgacgatgatgaagacgaagaagaagacgacgacagcagcgatgacgacaacagcatcgacccggaactggcgcgcgaaaaattcgcagagctgcgtacgcagtacgaagtcacccgtgacaccatcaaagcgaaaggtcgcagccacgccgatgcgcagaccgaaattctgaagctgtctgaagtgtttaagcagttccgcctggtgccgaagcagttcgactacctggtgaacagcatgcgcgtcatgatggatcgcgttcgcacgcaagaacgcctgatcatgaagctctgcgttgagcagtgcaaaatgccgaagaaaaacttcatcaccctgttcaccggcaacgaaaccagcgaaacctggttcaatgccgccattgcaatgaacaagccgtggtccgaaaagctgcacgatgtcactgaagacgttcagcgcagcctgcaaaaactgcaacagattgaagaagaaaccggcctgaccatcgagcaggtaaaagacatcaaccgtcgcatgtccatcggcgaagcgaaagcccgccgtgcgaagaaagagatggttgaagcgaacttgcgtctggttatctctatcgccaaaaaatacaccaaccgtggtctgcaattcctggatctgattcaggaaggcaacatcggtctgatgaaagcggtagacaagttcgaataccgtcgtggttacaaattctccacctatgccacctggtggattcgtcaggcgatcacccgctctatcgcggatcaggcgcgcaccatccgtattccggtgcatatgattgagaccatcaacaaactcaaccgtatctcccgccagatgctgcaagaaatgggtcgcgagccgacgccagaagagctggccgagcgcatgctgatgccggaagacaagatccgtaaagtgctaaagatcgccaaagagcctatctccatggaaacgccgatcggcgacgatgaagattcgcatctgggagatttcatcgaggataccaccctcgagctgccgctggactctgccaccaccgagagcctgcgtgccgcaacgcatgacgtgctggctggcctgacggcgcgtgaagcaaaagtgctgcgtatgcgtttcggtatcgatatgaacaccgaccatacgctggaagaagtgggtaaacagtttgacgttacccgcgaacgtatccgtcagatcgaagcgaaggcgctgcgtaaactgcgtcacccgagccgttctgaagtgctgcgtagcttcctggacgattaa

SEQ ID NO: 72495 - DNA, 507 bp, Citrobacter koseri
atggttaaggacatactggcgcgggagctgagagtggtattttgcggcatcaatcccggcctctcttctgcggggacagggttcccgttcgcgcatcctgccaaccgtttctggaaggtaatccaccttgccggatttaccgggcgtcaactgaaaccggaagaggcgcagcatctgctggatttccgctgtggcgttaccaaatttgtcgacagacctaccgtgcaggcgaacgaagttaagcttcaggagatgcgtagcggcggccataagctcattgagaagattgagtactatcaacctgcggcgttggcgattctgggcaagcaggcgtttgagcagggatttagccagcgcggcgcgcagtggggaaaacagacgatgaccattggcgatacgcagatctgggtgttgccgaatcccagcggcttaaatcgcatcaggacggaaaaactggtggaggcgtatcgggaacttgatgaatcgctggtggttcacgggctgtaa

SEQ ID NO: 72496 - DNA, 324 bp, Citrobacter koseri
atggttaattttaaggataaaagtatgccagcagtcattgataaagccttagatttcattaacggtatgaatacatccgcttcagttccacacccaatggatgaaagtacagccaaggggatttttaaatatttgaacgagttgggggttccggcgagagcagaagatgtggcagcccgaggcgatcgggaagggtggaatgccgggtttacggaaaaattggtcgggtgggctgaaaaaattgcgtcaggagaacgggtgcttattaaaaaccctgaatatttttctttatatatgcgagagcagcttcgggcactggtataa

SEQ ID NO: 72497 - DNA, 1926 bp, Citrobacter koseri
atgacggctcagacgcaggacatcgggaaggaagtatcttccgtcatcgctcagtcatggcatcgttgcagcaagtttatgcagcgagaaacctggcagacgccgcaccaggcgcaagggctgacctttgaatcgatttgccgacgcaaaacggcgttgctgacgataggtcaggctgcgctggaagatgcctgggagttcatggatggacgaccttgcgcgctgtttatcctggatgaatccgcctgtatcttaaaccgctgcggcgatcccgggacgctggagaaactggcggaactgggctttctcgacggcagctactgtgcggaaagcatcatcggcagctgtgcgctgtcactggcgaccatgccggggcaaccaaccaaaacggccggagagcagcattttaaacaggcgctgcacccgtggtcattctgctcaaccccggtatttgataatcacggccgcctgtttggctccatttcgctctgctgtctggtggagcaccagtcagtttctgatttatcgctgacgctggcgatcgcccgtgaagtgggaaattcactgttaactgatagcctgttggccgagtctaatcgtcatctgaatcagatgtacgggctgctggaaagcatggacgatggcgttatggcgtggaacgagcagggcgtgttgcagtttctcaacgcgcgggcggccacgatgctgcatctggatacgcaggccagccaggggaaaaacatccatgatctggtcaatttgcctgccttgctgcgtcgcgccattaaacacgcccgcgggttgagccatgtcgaagtgacctttgaaagtcagcatcagtttgttgatgccgtcattaccctgaaaccgatagttgaggagcagggcaacagctttattctgctgctgcacccggtggagcaaatgcgccagttgatgaccagtcaactggggaaagtgagccatacctttgaacagatgtcgacggacgatccagaaacgcgtcggttgatccactttggccgccaggctgcgagggggagcttcccggttctgctgtgtggtgaagaaggagtgggcaaagagcttctcagccaggctatccacaacgaaagcgagcgcgcgagcgggccttatatcgccgtaaactgccagctctatgccaatagcgtactggggcaggattttatgggcagtgcgccaaccgatgatgaaaatggtcgtctgagccgccttgaactggcgagcggtggcacgctgtttctggaaaaaattgaatatctggcgccggagttacagtctgcgctgctgcaagtgatcaagcagggcgtgttaacccgccttgacgcgcgacgtctgatcccggtggatgtgaaagtgatcgcgacgaccacggttgatctggcgaatctggtcgagcagaaccgctttagccgtcagctttactatgccctgcattcgtttgaaattattattcctccgctgcgcgcgcggcgtaacagcatcccttcgctggtctataaccggctgaacggcctgaaaaaacgcttttcaaccagcctgaaggtggatgatgatgcgctggcgcaactggtggcctattcctggccgggcaatgacttcgagctgaacagcgtcatcgaaaacatcgctatcagcagcgataacggccacatccgcctgagtaatctgccggaatatctgttttctgaacgccccggcatggatacgacatcatcgctgttacccgccagcctgacgtttacggctatcgagaaagaggcgattatccatgccgcccgcgtcaccagcggacgggtgcaggaaatgtctcatttgctgaacattggccgcactacgctgtggcgtaagatgaagcagtacgacatcgacgccagccagttcaagcgcaagcatcacgactag

SEQ ID NO: 72498 - DNA, 1098 bp, Citrobacter koseri
atgctaaaagttattcaatctccagccaaatatctccagggacctgatgcttctgtcttattcggtcaatatgccaaagacctggcggacagcttttttgtgattgcggatgacttcgtcatgaagctggcgggagagaaggtgctgaatggcctgaatagccacgaaatccgttgccacgcagaacgtttcaatggcgaatgcagccatgttgaaatcaaccgtctgatggccattttgaaacaaaaaggctgccgtggcgtggtggggatcggcggcgggaaaacgcttgatacggcaaaagccattggttactaccagaaactgccggtcgttattattccgactattgcgtccaccgatgccccgaccagcgcattgtcggttatctataccgaagcgggcgagtttgaagagtatctgatctacccgaaaaacccggatatggtggtgatggacacggcaatcatcgccaaagcgccggtgcgtttactggtgtccgggatgggggatgcgctttccacctggtttgaagcgaaagcctgctatgacgccagagcgaccagcatggcgggcgggcagtctacggcggcggccttgagcctggcgcgcctgtgttatgatacattgctcgcagaaggtgaaaaagcgcgtctggcggctcaggctggcgttgtgaccgatgcgctggagcgtatcgttgaagccaacacctatctcagcggcattggctttgagagcagcggtctggccggggcgcatgcgattcacaacggtttcactattctggaagagtgccaccatttgtatcacggcgaaaaggtcgcgtttggcacgctggcgcaactggtattacagaacagcccgatggaagagattgaaaccgttctggggttctgcgagaaagtgggactgccgattaccctcgcgcagatgggcgtgaaagacggcattgaagggaaaattcaggcggtggcgaaagcgacctgcgcggaaggcgaaaccatccacaatatgccgtttgaggtgacgccggacagcgtttatgccgcgattctgacggcggatctgttaggccagcagtggctggcgcgttaa

SEQ ID NO: 72499 - DNA, 1659 bp, Citrobacter koseri
atgactcaattcttttttaaccagcgaccccatctcgtcaacgacgtcattgaaggaacgattatctccagcccgtggaacaatctggtgcgcctggagagcgatccggcgattcgtgtcgtggttcgccgcgatctgaaccgtagcaacgtcgcggtgatttccggcggcggctccgggcacgaacctgcccatgttggtttcatcgggaaaggcatgttaaccgctgccgtctgcggcgatctgtttgcctcccccagcgtcgatgcagtgctgaccgctatccaggcagtcactggcgacgccggctgcctgttaatcgtaaaaaactataccggcgatcgtctgaacttcggccttgcggcagagaaagcacgccgtctgggctacaacgttgaaatgctgattgtcggggatgacatttcgctgccagacaataagcacccgcgcggtatcgcaggcaccattctggttcataaagtcgccggctattttgccgaacgcggctacaacctggcgaccgtcttgcgtgaagcgcagtacgccgccaacaataccgtgagtcttggcgttgcgatttccagttgccatctgccgcaggagacggagaacgcgccacgccatcatcctaatcagtctgagctgggcatggggatccacggtgaacccggcgcatcagtcattgatacccaaaacagcgcgcagattgtgcgcctgatggccgacaaactcctctccgctctgcctgagaccggtcgtctggcggtgatggtcaataaccttggcggcgtctccgtcgcagaaatggccatcatcacgcgtgaactggcgcgcagcccgctgcataaacgcatcgactggcttatcggcccggcttcgctggtgactgcgctggatatgaaaggtttttcactgacggcaatggtgctggaggaaagtatcgaaaaagcgttgctctccggggtggaaaccagcagttggcaaacgccggtgccgccgcgtgagataaccattatgccatcctcactgcaaagcgcgcgagtagagtttcagccttcagagaacgcgttagttgccgggattgttgagcaggtcacccgcacgctgtccgatctggaaatggatcttaacgcgctggatgccaaagtcggcgacggcgataccggctcaacttttgcggcaggcgcgcgtgaaatcgcgggcctgctacaccgccagcagttgccgctcgaccatctcgccacgctgttcgcactcattggcgaacgcctgaccgtcgtcatgggcggctccagcggtgtgctgatgtccattttctttaccgccgcagggcagaaactggagcaaggcgccagtgtggcggaagcgctgaataccggtctggcgcagatgaagtattacggtggcgcggatgaaggcgatcgtaccatgatcgacgctttacagccggccctgacatcgctgcttgcgcagccacaggatctgcacgcggccttttccgccgcgcaaaatggcgcagaacgtacctgtcagtccagcaaagccaacgccggacgcgcatcctacctcagcagcgaaagcctgcttggcaatatggaccctggcgcacacgccgtggcaatggtgtttaaagcgctggcggaaagtcacaacgcctga

SEQ ID NO: 72500 - DNA, 894 bp, Citrobacter koseri
gtgagatatatcgaagattactgtatcaaaaaagtgcttgcaatcttcataactaacaatcattatcatttaaaatttaatttagatatatcgtattatctgcatgaaggcgaaaaaatgataaatacatcctcacgctacccacagcgcgttcgtaacgaactgcgttttcgtgaacttaccgttctgcgcatcgagcgtattagcgccggttttcagcgcattgttcttggcggtgaagcgctggaaggctttagctcgcgcggctttgacgatcacaccaaagtgtttttccctgaaccgggcagcctgttcgtccctccgacggtaactgacgaagggattgtctggggagagggcgtacgtcctgcttcccgcgattacacgcccttatatgatgaagagcggcacgagctggcgctggatttctttattcacgacggcggcgtggcgagcacatgggcagtaaacgctcgcgaaggcgacacgctcaccatcggtgggccgcgtggatcgctggtggtgccggaagactatgcatatcaggtttatgtctgcgatgagtcagggatgccagcgctgcgccgccgcctggaagcgctcgatcgcttgtccgttcgcccgcatgttacggcgctggtcagcgtacaggatgccgcgtatcaggattatctggcgcatcttgatggctttgccattgaatgggtggtcggacacgatgagaaggcgattgatgagcgactggcgcaattaacggtgccggaggcggattatttcatctggatcacgggtgaagggaaagtggttaagcatctgagccgtcgctttgagacggaacagtttgatccgcaacgggtgcgcgccgcggcatactggcatcgtaagccggcttaa

SEQ ID NO: 72501 - DNA, 561 bp, Citrobacter koseri
atgcgacatcatcatgaaggttgcgagagagagcatcaccacggccatgaacatggctgcgagcaccgtcatggccggggcggtggcggcggacgtcgccagcgcttttttggccacggcgaactacgcctggtgattctggaaattttgacccgcgaggccagccacggttacgaattgattaaagccatcgagaacctgacgctgggcaactacaccccaagcccaggcgtgatttacccaacgctggattttcttcaggatcaggaatttatcactatcaaagaagaggacggcgggcgtaagcagatcaccattacagagcaggggcaacggtggctggaagagaaccgtgaacacctggagcacatccacgaacgagtgaaagcgcgctgcgtcggctttgaactgcgtaagaacccgcagatgaaacgagcgctggacaacttcaaagccgtgttggatctacgggtgaatcagggcgggatcagcgacgcgcagcttaagcagatcattggcgttatcgatcgcgcggcgctggaaatcagccaactggattaa

SEQ ID NO: 72502 - DNA, 1566 bp, Citrobacter koseri
atgcttttgcataacatgaagatccgctcgaaattatttattgcgtttggtttgtttattgtactgatgatcgtgagttctggcctttcgttgttcagcctggatcgaacgaataccagtatgcagaacatcattactcacgattatcccacgacggtgaaagccaacctgctgatcgataattttcaggatttcgttagcacgcagcaactgatgctgctggatgaagaaggacgctggagccaggagtcgcaaaagcagctggatgcgattagccagcgcattacggtattgctcgatgaactgtccgccagccgtcaggacgaggcctcaaaggccattatcgccggaattcgcgatgtgcgtcagcagtatctggcctcccggttccgtattttgcaggaaattcagaaccataatcgtccggcggcgatacaggaaatgatgacgaccaccgtcaacatacagcaggcgtataaagccaaagtacaggagctgatcgctattgaagatacgctgatgcgcaacgcgggcgcgtcggttgaccaggattttcgcaccaaccgggcacagctgattctcctggcgcttatcagcattgccgccggagtgataatgggatggtacatcgtgcgttccattacccggccgcttaatgacgccgtgcagtttgccggggcgattgcggagggggatttgacccgcacgattcatatcgcgcaaaaggatgaaaccggcgtgctgttgcaggcgctgatggagatgaaaaaccgtctgttggcgatcgtgcaggaagttcagaacggctctgaaaatatctccagcgcggcggcgcaaattgtcgcgggcaaccaggatctggcggcgcgtactgaagaacaggccagttctgttgagcaaacggcggcctctatggagcagattaccgccaccgtcaaaaatacggcggaccacaccagcgaagcgacccatctttctgccgatgcggccagcgtagtgaaaaataacggtgagatgatgcgtcaggtcacgcaaaaaatgcgcgtgataaatgagacctctaatcgcatgtccgacattatcaacctgattgattctattgccttccagaccaacattctggcgcttaacgccgccgtggaagccgctcgcgccggggaacacgggcgtggcttcgcggtcgtggcgggggaagttcgtcaactggcgcaaaaaagcgcgtcgtcggccagtgagatccgccacctgatcgaagactctaccagccagacgcaggaggggatgcaactggtggaaaaagccagtgcgttgattaatggtatggtggataacgttgaagagatggatgtgattctgcgtgaaatcggtcaggccagtcgcgaacaaaccgatgggatttcgcaaatcaacagcgcgattgggctgattgacgccaccacgcaacagaactcgtgtctggttgaggagtccgttgcggcagcggcgtcgctgaatgagcaggcccggcacttaaaagagattgtgaaagtgttccgcatccgtgcggaggacgtaccgcctgcttaa

SEQ ID NO: 72503 - DNA, 1521 bp, Citrobacter koseri
atgtcttctcatccctacgtcagccagcataattatccgctggatgatgatacaaccctgatgtccacaactgacctgcaaagctatatcacccatgcaaatgataccttcgttcaggtaagcggctttacgctgaatgaactgcttacgcaaccgcataatctggtacgccacccggacatgccgaaagccgcgtttgcggatatgtggtacaccctcaggcagggtgagccgtggagcggcatcgtgaaaaaccgacggaagaatggcgatcactactgggtgcgggcgaatgcggtgccgatggtgcgggaagggcgcgtgaccggctatatgtcgattcgtacccgcgcgacagatgaagagattgcggccgttgagcctttgtataaggcgctgaatgaaggccgcagcaacaaacgtatccacaaaggactggtggtgcgtaaaggctggctggggaaactgccggcaatccccattcgctggcgtgtacgcagcgttatggcgctaacgggcgtggtgctgatggcggcgatggcgcaaatgggcgttgcgtggccagcgctattcgtgaacgccctgctgatgctggcgggaacggcggtgtttgaatggcagattgtgcgtccgatcgaaaatgtcgcccggcaggcgttgaaagtcgcaacgggcgagcgtaatagcgtatcgcatcttaaccgtagtgacgaactggggctgatgttgcgcgcggtaggccagcttgggcttatgtgccgctggctgattaatgatgtctcaagccaggtttccagcgtaagaaacggcagcgagacgttagcgaaaggcaatgacgatctgaacaaacatacccgccagacggtggagaatgtgcagcagacggtgacgaccatgaaccagatggcggagtccgtgaagaaaaattccaccaccgcgtccgccgccgataaattatccagcgcggccagcagtgcggcgacgcagggcggagaggcgatggaaaccgtcattaaaacgatggatgacatcgctgacagcacgcagcagattggcacaatcactacgctgattaacgatattgctttccagacgaatatcctggcgctgaacgcggcggttgaagcggcgcgagcgggcgagcagggtaaaggatttgccgttgtcgccggggaggttcgccatcttgctagccgaagcgccagcgcggcgaatgatattcgtaagctcattgacgccagcgcaagccgggtacagtccggttccgaacaggtgcatgcggcaggacgcacgatggatgatattgtggctcaggtgcaaaacgtcactcagcttattgcgcaaatcagccactcgacgctggaacaggcggacggactctccagcctgacccgtgccgtggatgagttaaaccatatcacgcagaaaaatgccgagctggtggaggagagcgctcaggtttcagcgatggttaaacatcgcgccagccgtctggaagacgcggtaacggttctgcattaa

SEQ ID NO: 72504 - DNA, 1512 bp, Citrobacter koseri
atgagattaaatattgcacacttgatattttccctggtgtttatcccgattttcatgatccacgccgatatggcgcaatccctgcaatacttaactcagtatcatgtgatacgcgagttccgggagcacattttgaacaggttaccttccagcgcatcggccctggcctgtagcgcacacgcactgaatctcattgaaaagcgaacgcttgatcatgaggaaatgaaagcactgaaccgagaggtgattgattacttcaaagagcatgttaatccggggtttttagagtatcgaaaatctgtgaccgctggcggggattacggagccgtagagtggcaagcgggaagtctgaatacgcttgtcgacacccagggacaggagtttattgattgcctgggtggttttggcattttcaacgtggggcaccgtaatccagttgtcgtatccgccgtacagaatcaactcgcaaaacaacctctgcacagccaggagttactggacccgctccgggccatgttggctaaaacgctcgcagcgcttacgcctggaaaactgaagtacagttttttcagcaacagcggcaccgaatcggtagaagcggcgctgaaactggcgaaggcgtatcagtcgccgcgcggtaagtttacctttatcgctaccagcggcgcgtttcacggtaaatcgctggggtcgctttccgccacggcgaaatccacgttccgcaagccgtttatgccgctgctgccgggttttcgccatgtaccgtttggcaacattgaggccatgcgtactgcgcttagcgagtgtaaaaaaaccggcgacgatgtggcagccgtcattctggaaccaattcagggcgagggcggcgtgatcctgccgccgcagggctatctgaccgccgtgcgtaaactctgcgatgagtttggcgccctgatgattctggatgaagtccagaccggcatggggcgcaccggtaagatgttcgcctgcgaacatgaaaacgtgcagcctgacattttatgtctggcaaaagcgttgggcggcggcgtgatgccggttggggcaaccatcgccaccgaagaggtgttctccgttctgttcgataatccgttcctgcacaccacaacctttggcggcaacccgctggcctgtgcggcagcattagcaaccattaacgtgttgctggagcagaatctaccggcacaggcggagcagaaaggcgatatgttgctggacggcttcctccagcttgccagggaataccctgacctggtgcaggacgctcgcggaaaagggatgttgatggcgattgagtttgttgacaacgaaatcggctacaacttcgccagcgagatgttccgccagcgggtactggttgccgggacgctcaacaactcgaaaacgattcgcatcgaaccgccgctgacattaacaattgagcagtgtgaacaggtattaaaggcgacccgcaaggctctggcggcgttacgggtgagcgtggaggaaacataa

SEQ ID NO: 72505 - DNA, 333 bp, Citrobacter koseri
atggagacggtggcctttgcggattttgcccgactggagctgcgtgttggaaagattgtacaggtaaagcgtcatgataatgccgataagctttacattgtgcaggtggatgtgggcgagcgtacgctgcaaacggtaaccagcctcgtaccttattaccgagaggatgcgctgatggggaaaacggtggtggtactgtgcaatctgcaaaaagccaaaatgcgtggtgaaacgtcagagtgcatgttgctgtgcgccgaaaccgatgacggcagtgaaagcgtattgctgacgccggaacgcgtaatgcctgcgggcgtgcgggttgtgtga

SEQ ID NO: 72506 - DNA, 984 bp, Citrobacter koseri
atggcaacacttaaagatatcgcaattgaagctggcgtatccctggcgacagtgtcgcgggtcttaaacgacgaccccacgctgaatgtcaaagaagagaccaaacaccgcattctggaaatcgcggaaaagctggagtacaaaaccagcagcgcccgtaagagccagaatagtacggtcagcctgcaacacatccttgccatctacagttatcagcaagagctggaaattaacgatccctactatctggcaatccgccacgggattgagacacagtgtgaaaaactggggattgaactgaccaactgctacgaacacagcgggttgccggatcttaaaaacatcaccggcattctcattgtcggcaagccctcagccgccttacgcgacgccgccgccgcgctgactgacaatatctgctttatcgactttcacgaatcaggcagtgaatacgatgccgtcgatatcgatttgtcccgcatcagcaaagagatcatcgactttttcattgctcagggcgcaacccgtattggttttattggcggggaggatgagcccggcaaagccgatatccgcgaagccgcgtttgtcgaatatggccgcctgaagcaggtcgtgcgtgaagacgatatctggcgcggtggtttttccagttcatcaggttacgaactggcgaaacaaatgctggctaaagcggattatccgcgcgcgctgtttgtcgcctccgactcgatagccattggcgtgttacgcgcaatccacgagcatggccttgagatcccgcgcgacatctccctgataagcgtgaatgacattccgacggcgcgattcaccttcccaccgctttccacggtgcgcattcattccgaaatgatgggcagccagggcgtaaatctggtgtacgaaaaagcccgtgacgggcgcgcactgccgctgctggtcttcgttcccagtaaacttaaactgcgcggcaccagccgctaa

SEQ ID NO: 72507 - DNA, 3093 bp, Citrobacter koseri
atgaatcgctgggaaaacattcagctgacccacgaaaacagactggcgccacgcgcctactttttttcttatgactcaatagctcaggctcgcacattcgcccgcgaaaccagcagctattttttgccactaagcggtcagtggaactttcagttcttcgaccacccgcttcaggtgccggaagcctttacctcagagtatatgcgagactggggaacaattaccgttccagggatgtggcaaatggaaggccacggcaagctgcaatataccgacgaaggtttcccgtttccgatcgatgtgccgtacgtccccagcgataaccccaccggcgcttatcaacgcattttcacgctgagcgaaggctggcaaggaaagcaaacgctgattaaattcgacggcgtcgaaacgtatttcgaagtttatgtgaacggccattatgtgggattcagcaaaggcagccgcctgacggcagagttcgacatcagcgcagtcgcgaagacgggcgacaacctgttatgcgtccgcgtgatgcagtgggcagattccacctatgttgaagatcaggatatgtggtggtcggcgggcatcttccgcgacgtttatctggttggtaaacacaccgtccacattcaggacttcaccgttcgcaccgattttgacgacgattatcgcaatgccaccctctcctgtcagctggttctggaaaacctgaccgccgacccggcaatcgcttctctggagtatgcgctgtttgacggtgaggatgttgtacatgcaggcgccatcaacgcactgaccattgaccagcgcatcagcaccgactttactgttggcgttcacgctccgcaccagtggtcctctgagtcgccgtatctctaccacctggtgatgaccctgaaagacgccgatggcaatactcttgaagtggtgccgcaacgcgtgggctttcgcgatattcaggttcgcgacgggctgttttacatcaacaaccgctacgtgatgctgcacggcgtcaaccgccacgataacgatcatcttaaaggtcgggctgtcggcatggatcgcgttgaaaaagatctgcggttaatgaaacaacacaacatcaactcggtacgaaccgcgcactaccctaacgatccacgtttctacgagctctgcgatatctacggcctgtttgtgatggcggaaactgacgtcgagtcacacggattcgctaacatcggcgatatcagccgcatcaccgacgacccggcgtgggaaacggtctacgtcgagcgcatcgtgcgccatatccatgcgcagaaaaaccacccttctatcatcatctggtcgctgggcaacgaatccgggtacggctgtaatattcgcgcgatgtaccacgccgccaaagcgctggatgacacgcgcctgattcactacgaagaagaccgcgacgccgaagtggtggatatcatctccaccatgtatacccgcgtgccgctgatgaacgagtttggtgagtacccgcatccgaagccgcgcatcatctgcgaatacgcccacgcgatgggcaacggccccggcgggctaaccgaatatcagaatgtcttttaccagcacgactgcattcaggggcactacgtctgggaatggtgcgatcacggtattcaggcgaaagacgacgatggcaacgtgtggtacaaatttggcggcgattacggcgactacccgaataactacaacttctgccttgatggtctgatttaccctgaccagacgccgggcccgggtctgaaggagtacaagcaggtcattgcacctgtaaaaatccacgcacaggatctggaacgtggcgaactgaaagtagaaaacaagctgtggttcacctcccttgacgactataccctgcatattgacgttcgtgccgaaggggagacgctctccacgcaacagatcaaactgcgcgacgtcgcgccgaatagcgaggcgttactgcactgcacgttgccagcgctggatgggcgagaaacgtttcttaacgtcaccgtgaccaaagactcccccacactttacagcgacgcagggcatcatatcgccacctgtcagttcccgctgaaggccagaacggcgcctcctgtaccgtttagccagccaaacgcgcgcgcgttgacgctggaagacgatcgtctgagctgcaccgtgcgcggctacaacttccatctgacgttctcaaaactgaacgggaagccaaccgcctggaacgttaatggtgaagcgctgctgacccgcgcgccaaaaatcaatttctttaagccgacgattgataaccacaagcaggagttcgagggactctggcaaccaaaccatctgcacatcatgcaggagcatctgcgggcgtttaccgtcgagcaaacggaagatgcggtgctgattaccagccacacccttattgctccgccggtatttgatttcggcatgcgctgtacgtatcgctggcgcattgcgatggatggtcaggtaaacgtcgcgctttccggcgaaccctacggcgaatatccgcacattattccgtgtattggcttcacgatgggaatcaatggcgccttcgatcaggttgcctggtatggtcgcggtccgggagaaaactatgccgacagtcagcaggccaacatcatcgacatctggcgctccaccgtggatgacatgtttgagaattacccgttcccgcagaacaacggtaatcgccagcatgtacgctgggcgacgctaaccaaccgccacggcaacggcctgctggtggtgccgcaacgccccatcaacttcagcgcctggcattacacaccagaaaacctctttgtcgcgcagcactgcaatgagttgcagcgctgcgacgacatcactctgaatctggatcatcagttgcttgggctgggttccaactcctggggaagcgaagtgctcgattcctggcgcgtctggttccggccattccgttatggctttacgttgctgccggtgtccggcggcgaagcgaccgcccaggctatcgccagccatgtcttcggcacggacttcttttccacaaatttgcatagcgagaatgaaaaatga

SEQ ID NO: 72508 - DNA, 450 bp, Citrobacter koseri
atgaggctcctcgataacttagaacagttccggcaggtctacgcctctggtcgaaaatggcagcgctgcattgaagcgattgaaaatatcgacaacattcagcccggcgtcgctcactccatcggggattctctgacgtatcgcgtggaaaccgactctgccgccgatgcgctgtttaccgggcatcgccgttacgttgaagtgcattactacctgcaagggcgacaaaaaattgaatatgccgccaaagatacgttgcaggtcgttgaatattatcgcgatgaaaccgatcgcgaatatctgaaaggttgcggaaacaccgtagaggttcacgaaggacagatggtgatttgcgacaaccatgaagcctaccgttttatctgtaatcacgcggtaaaaaaagtcgtactcaaagtgaccattgaagatggttattttcataacaaataa

SEQ ID NO: 72509 - DNA, 1434 bp, Citrobacter koseri
atgtctgataccaaacgtaatacaatcggcaagttcggcttactctcgcttacctttgccgccgtttacagttttaataacgttatcaataataatattgagctggggctggcatcggcgccgatgtttttcctggcaacgattttctactttatccccttctgtttaattattgcagaattcgtttcattaaataaaaactctgaagcaggcgtttatgcttgggtaaaaagctccctcggcggacgctgggcatttattaccgcctacacctattggttcgttaacttgttctttttcacctcgctgctcccgcgcgtaattgcctatgcctcttatgcgttcctgggctacgaatatattctgacgccggtcgcaacaaccgtattgagtatggtgctgttcgccttctcaacctgggtttccaccaacggggcgaaaatgctggggccaatcacctccgtcacctccacgctgatgctcctgttgacgctttcctatattttactggccggtacggcgctggtgggcggcgttcagcctgccgatccgatcaccgtggaggcgatgatcccaaactttaactgggcattcctcggtattacgacctggatctttatggccgcaggcggcgcggaatccgttgcggtgtatgttaacgacgtaaaaggcggatcaaaatcatttgtaaaagtgatcatcctggccgggattttcatcggcgtgctttattccatttcgtcggtactgatcaacgtattcgtaagcagtaaagagctgaaatttaccggcggttcagtacaggtcttccacggtctggcagcctggtttggtctgcccgaactgttgataaaccgctttgtcggtctggtctcttttactgcgatgttcggctccctgctgatgtggactgcaacgccggttaaaattttcttctccgaaattcccgcagggatttttggcaaaaaaaccgtcgaactgaatgaaaacggcgtccccgcccgcgccgcctggattcagttcctgattgtcattccgttgatgattatcccgatgctcggctcgaataccgttcaggaattaatgaacaccatcattaatatgaccgcagcggcctccatgctgcctccactgtttattatgctggcctacctgaatctgcgggcaaaactggagcacttaccgcgagacttccgtatgggatcgcaaagaaccggtattatcgtcgtgtcgatgttaattgttatatttaccatcggatttattgcctccactttcccaaccggcggcaatattatgaccattgttttctataacgtgggcggtattgttattttcctcggattcgcctggtggaaatacagccgatacattaaaggactcacaaaagaagaacaggatattgaagccgcacccgcatcaaacattaattaa

SEQ ID NO: 72510 - DNA, 1062 bp, Citrobacter koseri
atgaaaatgatgaaaaatattcgcagggcaataattgccctgcccttcctctgtgtttttcccctggctgcggaagacgttcatccggcagaacatgacgacacaaaaacgccagccgtcacctctccctcctttcgtttttacggcgagatggggttggggggatatatggatttagagggacaggataaacataaatacagtgacggcacctatattgaaggcggcctggaggtgaaatacggctcatggtttggcctgatttacggcgaaggctggacggtgcaggccgaccatcagggtaacgcctgggttcccgatcatagctggggcgggttcgaaggcggaatcaaccgtttttatggcggttatcgtactgatgacggcacggaactgatgctgagcctgcgtcaggattcctcgctggatgacctgcaatggtggggcgattttacgccggatctgggctacgtcatccccaatacccgtgacatcatgaccgcgattaaggtgcagaatctgagcggcgccttccgttatagcgtcaccgccacgccagccgggcatcacgatgaggggaaagcctggctccatttcggcaaatacgatcgctatgacgataaatacacctatccggcgatgatcaacggttatatccagtacgatcttgtcgaaggcgtcacctggatgaacggtctggaagttaccgacggcaccgggcaactgtttctgaccggcgttctctctcccaacctggccgcccgcgcctggcaccacactggtcgcgccgacggtctggacgtgccgggcagcgaaaccggctttatggtcagcgccatgtacgaagcgctaaaaggcgtttatctctctacggcctacagctatgccaggcaccggccagatcatgccgcagacgaaaccacctcttttatgcagtttggcgtctggtacgaatacggcggcgggcgtttcgccaccgccttcgacagccggttctatatgcaaaacgcatctggcgatcccagcgaccagattttcctgatgcaatatttctactggtaa

SEQ ID NO: 72511 - DNA, 2352 bp, Citrobacter koseri
atgaaaatcacgacggccctgacgccgctgacctgcgctttactgataagcctctccgcacatgccgccactgcggacgattataaaaatgtcattaaccgcaccggcgcgccgggctatatgcatgattacgattacgatgatcaccagcgttttaatccgtttttcgatcttggcgcgtggcatggatacctgctgccagacagcaaggccacgatgggcggctttcccggcgtcgcactgctgacggaagagtacatcaactttatgtccacccattttgaccgtctgttggtgtatcaaaacggccaacaggttgactttgcgcttgaggcttacagcattcccggcgcgctgatccaaaaattatcctcaaaggacgtgcaggttgagatgacgctgcgcttcgccagttcgcgcacggccctgctggaaacaaaaatcaccagcaagacgccgctggatctggtgtgggacggcgagttactggaaaaactggaagcgaaagagggaaaagcaatctccgataaaaccattgatggagaatacccggactatcagcgaaaaatcatcgccacccgtgatggtctgaaagtcaccttcggcaaagtgcgttccacctgggatctgctcacttccggcgaatctgaatatcagatacataagtccctgccgacagacacaaaggtcaacggccaccgctttaccagcaaggcgcacatcaacggttccaccacgttttataccacctggtcgcatctgctcaccgcgcaggaagtggataacgagcaggcgcagatccgcgacattctggctcgcccggctgactatctcagcgcatcacaaaaacgctgggagggctatctgcaaaaaggcttaaccaacccggacgccacgccagaacagacgcgggttgcggttaaagccattgaaacgctgaacggcaactggcgctcgccaggcggcgcgatcaaacaccataccgtgacgccatcggtcactggccgctggttttccggtaatcagacctggccgtgggacacctggaagcaggcctttgcgatggcgcatttcaacccggaaatcgccaaagagaatattcgcgccgtcttctcttggcagattcaacccaacgatccgcttcgcccacaggatgcgggtttcgttcccgatctgatcgcctggaacctcagcccggaacgcggcggcgatggcggcaactggaacgagcgcaacaccaagccaagcctcgcggcgtggtcagtgatggaggtctacaacgtcaccaaagacaaagtctggcttgaagagatgtacccgaaactggtggcataccatgactggtggctgcgtaaccgcgatcacaacggcaatggcgtcccggaatatggcgcaacccgcgacaaagcccacaataccgacaccggcgaaatgctgtttacggtaaaacagggcgacaaggaagagacgttatccgggctgagaaactatgcccgcatcatcagcgaaggccagtacgacagcctggaaattccggcgcaggtcgccgcctcctgggagtccgggcgtgatgacgccgcagtgttcggttttattgataaagcgcagctggataaatatgtcgcaaacggcggcaaacgcagcgactggacggtgaaatttgcggaaaaccgtcgccaggacggcacgctgctgggctattcgctgcgacaggagtcagtcgatcaggcgagctacatgtacagcgacaaccactatctggcggaaatggcgaccctcctcaataagccgaacgaggcgcagcactatcgccagttggcgcaaaagctcgcggattacatcaacacctgcatgttcgatccggcaacacacttcttctatgacctgcggattgaagaaaagccgctggcaaacggctgtgcggggaaaccgatcgttgagcgtggcaaggggccggaaggctggtcgccgttgtttaacggcgctgcgacgcaggctcacgccgatgcggttgtgaaggtgatgcttgacccgaaagagttcaacactttcgtaccactcggcaccgccgcgctgactaatccggcgttcggcgcggatatttactggcgcggacgcgtgtgggtggatcagttctggttcggattaaaaggcatggcgcgttacggctatcgtgatgatgcgctgaagctggcggatactttcttcaggcatgcgaaagggctgaccgccgacgggccgattcaggaaaactacaacccgttgaccggcgcacagcagggcgcgccgaacttctcctggagcgccgcgcacctgtatatgctgtataacgacttcttcaggaaactgtaa

SEQ ID NO: 72512 - DNA, 2019 bp, Citrobacter koseri
atgagctatccgtcgcttttcgccccgctcgatctgggctttacccggcttaaaaaccgtgtgctaatgggttcgatgcataccgggctggaggaataccccgatggcgccgaacggctggcggctttctacgccgaacgtgcgcggcatggcgtcgcgctgatcgtcaccggggggattgcccctgcactgtccggggtgggaatggaaggcggcgccacgttaaatgacgccagccagctgccgcaccaccgcgtgatcacggacgccgttcatgaggaaggcgggaaaattgcgttgcagatcctgcataccggacgctatagctatcagccgcatctggtcgccccttcggcgatccaggcgcccatcaaccgttttacgccgcacgaactcacgcacgatgaaatcctgcaactgattgacgatttcgcccactgcgcccagctggcgcgggaagcgggttacgacggcgtcgaggtgatgggttcggaaggctatctgatcaacgaatttcttaccgtgcgcacgaaccagcgcgacgatgaatggggcggcgattacgccaggcgtatgcgtttcgcggtggaagtggtgcgggcggtacgccagcgcgtgggcagcgattttatcattatctaccgcctgtcgatgctcgacctggtggaaaacggcgggacgttcgacgaaaccgtacagctggcgcaggccattgaagcggctggcgcgacgctcatcaacaccggtattggctggcacgaagcgcgtatcccgacgatcgccacgccggttccgcgcggcgcctttagctgggtgacgcgcaaactgaaaggccacgtcaccgttccgctggtcacgaccaaccggatcaacgatccgcaagtagcagacgatattctggcgcgcggcgatgcggatatggtgtcgatggcgcgcccgttcctggcggatgccgaactgctgtcgaaagcgcaatcagggcgggcggatgagatcaacacctgtatcggctgcaaccaggcctgtctggatcaaatcttcgtgggtaaagtcacctcttgcctggtgaatccacgcgcctgtcacgaaaccaaaatgccgatagttccggctgaacataagaaaagcctggccgtcgtcggcgcaggcccggcgggtctcgcatttgccattaacgcggcggcgcgcgggcacgacgttacgctgtttgatgccctggccgagatcggcgggcagttcaacatcgctaaacagatccccggcaaagaagaattttatgaaacgctgcgctattaccgtcggatgatcgaagtgaccggcgtgacgctgaagctcaaccggtttgtcaccgcagacgatctgcaaccgtttgatgaagcgatcctcgcttgcgggatcgagccgcgtaaaccgtcgatcgagggcatcgatcacccgaaagtgctgacctatcttgaggtgctgcgcgataaaactcccgtcgggaaacgtgtcgcgattatcggctgcggcgggattggttttgataccgcgatgtacctcagccagccaggcgatcccagcagcctgagcattgccgagttctgcgtggaatgggggatcgacaccagcctgcaacagcccggcgggttacgcccggaagggccgcatctgtctcgcagcccacgtcagattgtgatgctacagcgtaaagccagtaaacccggtcaggggctgggaaaaaccaccggctgggtccatcgcgcaacgctgttgtcccgcggcgtaaaaatgatcccggcggtcagttatcagaagatcgacgatgacggattgcacgtattgatcaacggcgaaccgcagcttctgaacgtcgatcatgtcgtgatctgcgcggggcaggagccacggcgcgaactggcggagccgctgcgcgcgtcagggaaaacggtacacctgattggcggatgcgacgtggcgatggagctggatgcgcggcgggcaattgcgcagggaacaaaattagcgctggcgatttaa

SEQ ID NO: 72513 - DNA, 1137 bp, Citrobacter koseri
atgagccacgtagacaacggtttccgttcactgacactgaaacgtttcccggaaacggatgacgttaacccgcttcaggcgtgggaagcggcggatgaatatctgctgcaacagttagacgacacggaaatcagcggcccgctgctgatcctgaatgatgcctttggcgcattaagttgcgcgctggctgagcatacaccatacagcatcggcgactcgtatttaagcgagctggcgacgcgcgaaaatttacgccacaacgatatcgccgaatccagcgtgaagtttctcgacagcaccgccgcgtacccgccggcgccgggcgtcgtattgattaaggtgccgaaaacgctggcgctgctggagcaacaattgcgcgcgttgcgccaggtcgtgactccgcagacccgtattattgcgggagcaaaggcgcgtgacattcatacctccacgctggaactgttcgaaaaagtgctcggccccacgaccacgacgctggcctggaaaaaggcgcgcctgatcaactgtaccttcagtaagcctgaactggcggatgcgccgcagacgctgagctggaaactggacggcaccgactggactatccacaatcatgcgaacgttttctcgcgtaccggcctggatatcggcgcgcgcttctttatgcagcatttaccggaaaatctggaaggggagatcgtcgatctcggctgcggtaatggcgtgattggcctgacgctactggcgaagaaccctcaggcgagcgtcgtgtttgtcgatgaatcgccgatggcggtcgcgtccagccgtttgaatgtggaaaccaatatgccggaagcgttggatcgctgcgagtttatgattaacaacgccttgtccggcgtggaacctttccgctttaacgccgtgctgtgcaacccgccgttccatcagaaacatgcgctgacggataacgttgcctgggagatgttccaccatgcgcgccgttgcctgaagatcaacggcgagctgtacattgtggcgaaccgtcacctggattatttccacaagctgaagaagattttcggtaactgcaccaccatcgccaccaataacaaattcgtggtgttgaaagcggtcaaaaccggtcgccgccgctaa

SEQ ID NO: 72514 - DNA, 504 bp, Citrobacter koseri
atgggtcaacttacttatctccacggctacccggagaatttactgtctcaggtacgcacgctcattgctgaacagcgtctgggcgcagtgctggaaaaacgctatccgggaacgcatgattttgcgaccgataaagcgctctggcagtatacccaggatctgaaaagccagtttctgcgtaacgccccgccgatcaacaaagtgatgtatgacaacaagatccatgtgctgaaaaatgcgctggggctgcataccgccgtttcacgcgtacagggcggcaagctgaaggcgaaagccgagatccgcgtcgctaccgtgtttcgcaatgcgccggaaccttttctgcgaatgattgtggttcacgaactggcgcatctgaaagagaaagagcacaacaaagcgttttatcaactgtgctgtcatatggagccgcagtatcaccagcttgagtttgatacccgcctgtggttaacgcatctttcgttaaagcaatctgagcagtag

SEQ ID NO: 72515 - DNA, 987 bp, Citrobacter koseri
atgatacgtttcgctgttattggcacaaactggatcacccgccagtttgtcgatgccgcccatgaaaccggcaaatataagttaaccgcagtctattcccgtcgcctcgaacaggcgcaaaccttcgccaatgattatcccgtcgagcatttattcacttcgcttgaagcaatggcgcaaagcgacgccattgatgcggtgtatatcgccagcccgaactcgctgcatttcccccagactcagctctttttaagccacaaaaagcatgtgatctgcgagaagccgctggcctcgaatctggccgaagtcgacgccgccatcgcgtgcgcgcgtgaaaatcaggtcgtcctgttcgaagcctttaaaaccgccagcctgcctaatttccagttgctacagcagtcgctgccgaaagcaggaagaatacgcaaagcccttatcaactactgccagtattcttcgcgctaccagcgctatctggacggcgaaaaccccaatacctttaatccggccttctcgaatggctccattatggatatcggtttttactgtctggcgtcagcggttgcgctttggggagaaccgcaaaacgttcaggcatccgccagtctgctggaaagcggtgtcgatgcgcatggcgtggcggtgctggattacggcgacttcagcgtcaccctacagcattccaaagtgagtgattccgtactgcccagcgaaatccagggcgaagccggttctctggtcatcgagaaaatttcggaatgtcagaaagtgtgcttcattccgcgcggcggaaaaacgcaggatttatccgttcctcagcatatcaatacgatgctgtatgaggcggaacgctttgcacacctggtcgagaccaacgaggtgaaccatcccgagctgaccgtcagccgtatcacggccaaactgctcacggagattcgtcggcagacgggcgtcgtcttccccgctgatgacgccacagcgtaa

SEQ ID NO: 72516 - DNA, 969 bp, Citrobacter koseri
atgaatactgtcggcacaccgttgttatggggcggattcgctgtcgttgtggtgattatgctggctatcgaccttctgttgcaggggcgtcgtggcgtacacacgatgtccatgaagcaggcggcggcctggtctctggtctgggtgacgctttcactgctgttcaacgccgccttctggtggtatctggcggagacccagggccgggcggtggccgatccgcaggcgctggcgtttctcaccggttatctgatcgaaaaatcgctggccgttgataacgtctttgtctggctgatgctgttcagctacttctctgttccgcctgccctgcaacgccgggttctggtgtatggcgtacttggcgccattgttctgcgtacgattatgattttcgccggtagctggctgatcgcccagttcgactggatactgtacctgttcggcgctttcctgctgtttacgggcgtgaagatggcgctggtgaaagaggatgaatccggcatcggcgacaaaccgctggttcgctggctgcgtagccaccttcgcatgaccgataccatcgaaaacgagcatttctttgtgcgtaagaatggcttgctgttcgtgacgccgctgatgctggtcctgattctggtggaactgagcgatgtgattttcgccgtcgatagcattccggccatctttgccgtgactaccgacccgttcatcgtcctgacctccaacctgtttgcgatcctgggtctgcgcgccatgtacttcctgctggcaggggtagcggagcgtttctcgatgctcaaatatggtctggccgtcattctggtctttatcggtattaagatgctgatcgtcgatttctaccacattccgatcgccatctcgctgggcgtggtgttcagtattctggtgatcacgctgattgttaacgcgtgggtaaatcgccagaacgataaaaagcagcagctacagtaa

SEQ ID NO: 72517 - DNA, 1245 bp, Citrobacter koseri
atgactacgcaacgttcatcggggctactccagcgtttggttcaagggagcctggttaaacaaattttaattgggcttatactgggaattttactggctttagtttcaaaacctgccgcagaggcaacgggtctgctgggcaccctgttcgttggtgcgctgaaagctgtcgcgccggttctggtactgacgctggtgatggcgtctatcgccaaccatcaacacggtcagaaaaccaatattcgcccgattttgtggatgtatctgctcggcacattttcagccgcgctgacggcggttgtggtgagcttcctctttccgtccacgctgcaactgacgactggcgccacggatatcacgccgccgagcggcattgtccaggtgatacacgggctgctgatgagcatcgttgcgaatccgatccatgcgctgatcaacgccaactacatcggtattctggtgtgggctatcggcctgggctttgcgctgcgccacagtaatcaaaccaccaaaaatctggtgaacgatctgtccgacgccgtcacctttattgtgaaactggtgattcgtttcgcgccgatcggtatctttggcctggtcgcctcaacgctcgccactacgggcttctcagcgctatggggctatgcgcaactgttactggtgctgattggctgtatggcgattgtggcgctggtcatcaacccgctgctggtctttttacagatccgccgcaacccgtatccgctggttctcacctgcctgcgtgaaagcggcgtgaccgccttctttacccgtagctccgctgcaaatattccggtgaatatgtcgctgtgcgaaaaactgaatctggacagagatacctattctgtttccatcccgctgggagcaaccgtcaatatggccggtgcggcaatcacgattaccgtgctgacgctggcggcggtgtatacgctgggtattccggttgatctgccgacggcgctgctgctgagcgtggtggcatcgctgtgcgcatgcggcgcttccggcgtggcgggcggttcactgctgctgatcccgctggcgtgcaacatgttcggtattccgaacgaaatcgccatgcaggtggttgcggttggcttcattatcggcgtgttgcaggactcctgcgagaccgcaatcaactcctctaccgacgttatgtttaccgccgcggtatgtcaggcggaagacgcgcgtttagcgaaaagcgcgctgcgtagctaa

SEQ ID NO: 72518 - DNA, 1488 bp, Citrobacter koseri
atgcaatacatcaggatccatacgctggataacgttgcggtagcgttggccgatttaacgcagggcgctgaggtcagcgtcgataaccataccgtgacgctacgccaggatgtcgtacgcggtcataagtttgccttacgcgatattgcgcagggggagaacgtcatcaaatatggcctgcctatcggccatacgttggtggacgtcgcggcgggtgagcatattcatgcccacaatacccggactaacctcagcgatttggatgagtacagctatcaacccgattttcaggcccctgaagtacaaccggcggatcgcgatgtacagatttatcgccgtgccaacggagacgtcggcgtgcgcaatgagctgtggattctgccgaccgtcggctgtgtcaacggcattgcgcggcagatccagaaccgtttcctgaaagagacttttgatgccgaaggaactgacggcgttttcctcttcaaccacacctacggctgttctcagcttggcgacgatcacatcaatacccgcaccatgctgcaaaacatggtgcgtcacccgaatgcgggggcggtgctggtgattggactgggttgcgaaaacaatcaggtggatgcctttcgcgagacgctgggcgagttcgaccctgaacgcgttcattttatgacctgccaacagcaggacgatgaagtggaggcgggcgttgagcatctgcatcagctgtataacgtgatgcgccatgacaaacgcgtgccgggcaaactgagcgaacttaagtttggtctggaatgcggcggttcagatgggttgtccggtattaccgcgaacccgatgctgggtcgcttctccgactatgttatcgccaacggcgggacgacggtgctgacggaagtgccggaaatgttcggtgcagaacagctgttgatgagccattgccgcgatgaagagacgtttgaaaaactggtgacaatggtcaatgacttcaagcaatactttatcgctcacgaccagccgatttatgaaaatccgtcgccgggtaacaaggcgggcgggattacgacgctggaagacaagtctctggggtgcacgcagaaggcgggttccagccaggttgtggatgtgctgcgctacggtgaacgcctgaaaacgcgcggtctgaatctgttaagcgcgccaggcaacgatgcggtcgccaccagcgcgctggcgggcgcgggttgccacatggtgttgttcagtaccggccgcggtacgccatatggcgggtttgtcccgacggtgaagattgctaccaacagcgaactggcggcgaagaagaagcactggatcgattttgacgccgggcagttgattcacggtaaggcgatgccgcagttgttgaatgaatttgtggatacgattgtggcgtttgccaacggtaagcagacctgcaatgagcgcaatgatttccgcgagctggcgattttcaaaagcggcgtaacgctgtag

SEQ ID NO: 72519 - DNA, 1413 bp, Citrobacter koseri
atgaccccgtttatgactgaagattttctgctggataccgagtttgcccgccgtctgtaccatgattacgcaaaagatcagcccatcttcgactatcattgccacctgccgccgcagcagatcgcggaaaactaccgttttaacaacctgtatgatatctggctgaaaggcgaccactataaatggcgggcgatgcgcaccaatggcgttgctgagcgtctgtgtacgggcgatgcgtccgatcgtgagaagttcgacgcctgggccgccacggtgccgcacacgatcggcaacccgttatatcactggacgcaccttgaactgcgtcgcccatttggtattacaggtaagctgctgtcgcctgcgacggcagacgagatctgggatcgctgcaatgaattgctggcgcaggatgcattctccgcgcggggaatcatgcagcagatgaatgtaaaaatggtcggcactaccgacgatcctgtcgattcgctggagcaccatgccacggtcgcgaaagacagcacgttcaccgttaaagtgctgccgagctggcgccctgataaagcgttcaacattgagcaggcaacctttggcgattacatgacgaagctgggcgaagtatcggataccgatattcgccgcttcaccgatctgcaagccgcgctgactcagcgtctggatcattttgccgcccacggctgtaaggtttctgaccacgcgcttgacgtcgttatgtttgctgaagccagcgacgctgaactggacagcattatggcgcgccgtctggcgggcgagaccctgagcgagcatgaggtcgcgcagttcaaaacggccgtactggtgtggctgggcgcggaatatgcgcgtcgcggttgggtgcagcagtaccacatcggcgcgctgcgtaataacaaccagcgccagttcaaactgctggggccggatgtcggcttcgattccatcaacgatcgtccgctggcggaagagctgtcaaaattgctgagcaagcagaatgaagaaaatctgctgccgaaaaccatcctgtactgtctgaacccgcgcgataacgaggtgctgggcactatgatcggcaacttccagggcgaagggatgccgggcaagatgcagtttggttccggctggtggttcaacgatcagaaagacgggatggagcgtcagatgacgcaactggcgcagcttggcctgctgagccgcttcgtcggtatgctgaccgacagccgcagcttcctgtcttatacccgtcacgaatatttccgtcgcatcctgtgccagatgataggccgctgggttaacgcgggcgaagcgccggcggatatccagttgctgggtgaaatagtacgaaacatctgcttcaacaatgcgcgcgactatttcgccattgaactgaactaa

SEQ ID NO: 72520 - DNA, 1302 bp, Citrobacter koseri
atgcgtaaaattaaagggttacgttggtatatgattgcactggtgacattaggcaccgtgctgggctatctgacgcgtaacactgtggcggcggctgcgccaacgctgatggaagagttacacatctccacacaacagtattcctatatcatcgcagcctattctgctgcttacactgtcatgcaacccgtagccggttacgtactggatgttctcggtacgaaggtgggttacgccatgttcgccgttctgtgggccgtattctgcggcgcaaccgcactggctggaagctggggcggcctggcgctggcgcgcggcgcggtcggcgctgctgaagccgcgatgatcccggcgggcctgaaagccagctctgaatggttcccggcaaaagaacgctctattgcggtcggctactttaacgtcggctcttccatcggcgcgatgattgcgcctccgctggtcgtctgggctatcgtgatgcatagctggcagatggcgtttattatttccggcgtgctgagcttcatctgggcaatggcctggctggtgttctataaacacccgcgcgaccagaaaaagctgacggatgcagaacgcgactacatcattggcggtcaggaagcgcagcacaaagacaatactgcgaagaaaatgtctctcgcgcagatcctgcgtaaccgccagttctggggtatcgccctgccacgtttcctggcggaaccggcatggggaaccttcaacgcctggatcccgctgttcatgtttaaagtgtacggctttaacctgaaagagatcgccatgttcgcctggatgcccatgctgtttgccgacttaggctgcatcatcggcggttatctgccgccgctgttccagcgctggttcggcgtaaacctgatcgtctcccgtaaaatggtcgttaccctgggcgcgctgctgatgattggcccaggcatgatcggcctgttcaccagtccgtatatcgccatcatgctgctttgcatcggcggtttcgctcaccaggcgctgtccggcgcgctgattacgctctcttctgacgtcttcggccgtaatgaagtggcaaccgcgaatggcctgaccgggatgtccgcctggctggcgagcacattgtttgctctggtggtcggcgcgctggctgacaccatcggcttcagcccgctgttcgcggtactggcggtgttcgacctgctcggcgcgctggttatctggacggtgctgcaaaacaaaccggccagcgagtcggggccagggtcgcaggtcaatcaccccgcaacgcaaagttga

SEQ ID NO: 72521 - DNA, 777 bp, Citrobacter koseri
atggaaatcaccgaaccacgacgtttgtatcaacaacttgctgctgacctgaaagagcgcatcgaacagggcgtctaccttgtgggcgataaactccctgccgaacgctttattgccgatgagaaaaacgtcagccgtacggtggttcgtgaagcgattatcatgctggaggtcgaaggctacgtagaagtccgcaaaggttccggcatccacgttatttcaaatcaaccgaaatattatgtcgccccggatgaaaatcttgagttcgccaattatggcccgttcgaacttctccaggcgcgccagttgatagaaagcaatattgccgagtttgccgccacgcaggtgacgaaacaggacatcatgaagctgatggaaatccaggagaaagcgcgtaacgaaaaatgtttccgcgactccgaatgggatctccagttccatgtgcaggtcgcgctggcgacgcaaaataccgcgctggccgccattgtcgaaaaaatgtggactcagcgcgtacataacccgtactggaaaaaactgcacgatcatattgattcacgcaccgtcgataactggtgcgacgatcatgaccatattctcaaggcgctgattcgcaaagatcctcatgccgcgaaactggcaatgtggcagcatctggagaacaccaaacagatgctgtttaacgaaaccagcgacgatttcgaatttaacgccgaccgctatctttttgctgaaaatcccgttgttcatctggacaccgccgctaacggggcaaaatag

SEQ ID NO: 72522 - DNA, 663 bp, Citrobacter koseri
atggaactactgactcaattactgaatgccctgtgggctcaggattttgaaacactcgccaacccttccatgattggcatgctttatttcgtactatttatgattttgttcctggaaaatgggttgcttcctgccgcctttttacctggtgacagtttgctggtgctggtcggcgtacttatcgccaaaggcgcaatggggtttccgcaaacgctcctgctgttaaccgtggccgccagcctgggctgctgggtcagttatattcagggacgatggctgggcaacacgcgtattgtacaaaactggctgtcgcatctgcccgcgcattatcatcagcgcgctcaccatttgttccataaacatggtctgtccgcgctgttaattggccgttttatcgctttcgttcgtaccttgttacccactatcgcgggtctgtccggccttaataacgcgcgctttcaattctttaactggatgagcgggttgttgtgggtcctgatcctgacctcgctgggttacttgctgggcaaaacgcctgtattcctgaagtacgaagaccaactgatgtcatgtctgatgctgctgccggtggtgctgctggtctttgggctggcgggttcgctggtggtgctctggaaaaagaaatacggaaatcggggatag

SEQ ID NO: 72523 - DNA, 384 bp, Citrobacter koseri
atggtgaaaccacgcataacgcttcgacaactggcctggacaacctcttttctcatgctgatgagcgtgctttttctcgtctggtcgaccattcgccagcaggaatccacgctggccattcgcgccatccatcagggcgtcagtatgccggacggcttttccatctggcatcatctggacgctaacggcattcgcttcaaaagcatcacgccacaaaatgacgcgctgctcattacgtttgactccagcgcgcaaagcgcggcggctaaggccgtgctggacagaacgttgccgcatggctatatcatcgcccaacagaacggcgacagccaggccgtacagtggttgacccgcttacgggataacccacatcgcttcggttaa

SEQ ID NO: 72524 - DNA, 369 bp, Citrobacter koseri
atgaaataccgcatcgctttcgccattacccttttcacgctcagtgcaggcagctatgccaataccctctgtcaggaaaaagagcaggatatacagaaggaaattagctacgccgaaaagcacaacaaccagaaccgcattaatggtttgaataaagcgctcagcgaactcagagcaaactgcaccgacagtaaactgcgtgctgaccatcagaaaaagatcgcaaaacaaaaagatgagattgctgaacgtcagcgtgatctggtcgaagcaaaacaaaaaggcgatgcggataaaattgcgaaacgtgaacgcaagctggctgaagctcaggatgacctgaaaaagcttgaggcacgcgactactaa

SEQ ID NO: 72525 - DNA, 306 bp, Citrobacter koseri
atgtcgaaagataacactacggaacatctgcgcgctgagttgaaatccctggctgatacgctcgaagaggtgcttagctcctctggcgataagtcgaaagaagagttgagtaagattcgtagcaaagccgagcgtgcgctgaaagaaagccgcaaccgtctgggcgaaaccggcgatgcgattgccaaacaaacccgcgaagccgcagcacgcgctgacgactatgtacgcgagaacccgtggacgggcgtcggcattggcgcagccgttggtgtggtgctgggcgtactgctgacgcgtcgttaa

SEQ ID NO: 72526 - DNA, 399 bp, Citrobacter koseri
atggcggattctcatcacgcgcaggggccaggcaaaagcgttctgggcatcgggcagcggattgtcactatccttgttgagatggtagaaacccgactgcgactggcggttgtggaactggaagaggaaaaagcgaatctctttcagcttctgctgatgctggggctgaccatgcttttcgcggcgttcggtctgatgggcctgatggtgcttatcatctgggcggttgaccctcagtatcgcctcaatgcaatgatcgccaccaccgttgtgttgctggttctggcgctgatcggcggactctggacgttacacaaagcccgccagtcaacgctgttacgccatacgcgtcatgaactggctaacgaccggcaaattctggaggatgataagccgtga

SEQ ID NO: 72527 - DNA, 300 bp, Citrobacter koseri
gtgagcagtaaagtcgaacgtcaaaagcgtaaggcgttgctgctcagccaaatccagcagcaaaggctggacctttcagccagtcgtcgcgactggctggaagcgacggacagctgggatcgcggctggaacacgctgatcagcctgcgttcctgggcgctggtcggcagcagcgttatggctatctggacaattcgccacccgaatctgctggtgcgctgggcaaaacgcggttttggcatctggagcgcctggcggctggtcaaaagcacgatccgaaaacagcagctgcgcggctga

SEQ ID NO: 72528 - DNA, 393 bp, Citrobacter koseri
atgaaaaaattagaagatgttggtgtactggtagcgcgcattctgatgcccattctgtttatcaccgcaggttggggaaaaatcaccggttatgcgggtacccaacaatacatggaagcgatgggggttccggggttcctgttaccgctgactatcctgcttgagtttggcggcggtctggcgattctgttcggtttcctgacccgtacaacggcgctgtttaccgcaggctttaccctgctgaccgcgttcatcttccacagcaactttgcggaaggcgttaactcactgatgttcatgaaaaacctgaccatcgcaggcggtttcctgctgctggccatcacagggccaggcgcattcagcatcgaccgcgtcctgaataaaaagtggtaa

SEQ ID NO: 72529 - DNA, 996 bp, Citrobacter koseri
atgggacaactgattgacggcgtatggcatgacacctggtatgacaccaagtctacgggggggaaatttcaacgttctgtatcggctttccgtaactggctcaccgctgatggcgcgccgggtccgactggcgaagggggctttgccgccgaaaaagatcgctatcacctgtatgtttcacttgcctgcccgtgggcgcatcgcacgctgatcctgcgtaagctcaaggggctggaaccgtttatctccgtttctgttgtgaatccgctgatgctggagaatggctggacgtttgatgataatttcccggcggcaaccggtgatacgctgtatcaacacgagtttctgtatcaactctatctgcatgccgatccgcactacagcggtcgcgtcaccgtaccggtattgtgggataaaaagaatcacaccatcgtcagtaatgaatcggcggaaatcattcgtatgttcaataccgcattcgatgcgctgggcgccaaagccggggattactacccgacagccctgcgcggaaaaattgacgagctcaatagctggatttatgacaacgtcaacaacggcgtgtacaaagccgggttcgccaccagccagcaggcctatgatgaagccgtagagaaagtgttcgagtcactggcgcgtctggagcaaatcctggggcagcaccgctacctgaccggcgaccagttaaccgaggcggacattcgcctgtggaccacgctggtgcgttttgaccaggtttacgttacgcacttcaagtgcgacaaataccgcatcagcgattacctgaacctttatggtttcctgcgcgatatctggcagatgcccggcattgcggaaaccgtcaacttcgaccatatccgtaaccactacttccgtagccacaaaaccatcaacccgacggggattatctccattggcccgttgcaggatctcaatgagcctcacggacgcgacatccgctttgcaaaagcgggataa

SEQ ID NO: 72530 - DNA, 366 bp, Citrobacter koseri
atggactggtatttaaaagtattgaagaactatatcggctttggcggccgcgcgcgtcgtaaagagtactggatgtttattctggtcaacgtcatttttacgtttgtgttgggcgtgctggacaagatgttcggctggcaacgcgccgggggcgaaggcgtgctgacaaccatttatggcattctgattttcttaccgtggtgggcagtacagttccgtcggttgcatgataccgatcgttccgcatggtggctgttactgctcctcatccctgttattggctggctggtcatcatcctctttaactgccagaacggtacgccaggcgaaaaccgtttcgggcaggaccctaaaattctgccctga

SEQ ID NO: 72531 - DNA, 897 bp, Citrobacter koseri
atggccaaagaaagggcgttaacactggaagcgttacgcgtcatggacgcaatagatcgacgcgggagcttcgcggcggcggcagatgagttaggtcgcgtaccatccgcgctcagctacaccatgcaaaaactggaagaagagctggatgtggtgttgtttgaccgctccggccatcggacaaaattcaccaacgtggggcgtatgctgctggaacgcgggcgcgtattgctggaagcggcagacaagctgaccaccgatgccgaagcgctggcgcgcggttgggaaacgcacctgacgctggtgacagaagcgctggtgccgacctcagccttcttcccgctgattgaccgactggccgcgaaagccaacacccagctttcggtgatcacggaagtgctggcgggcgcctgggaacgtctggagcaggggcgggccgatattgtgattgcaccggatatgcatttccgctcgtcgtcagaaattaactcccgcaaactgtatacgctgatgaacgtctacgtggcggcgccggaccatccgattcatcaggagccggagccgctgtctgaagtgacccgcgtgaaatatcgtggtgtggcggtggcggataccgcccgcgagcgaccggtattgaccgtgcaactgctggacaaacagccgcgcctgacggtgagtaccattgaagacaaacgtcaggctttgctggccgggctgggtgtcgcgaccatgccgtatccgctggtcgaacaggatatcgcgcaaggaagactgcgggtcgtcagcccggaatcgaccagtgaaattgatattattatggcctggcgacgcgacagcatgggcgaggcgaaagcctggtgcctgcgggaaatcccgaaactgtttgccagcagataa

SEQ ID NO: 72532 - DNA, 702 bp, Citrobacter koseri
atgattactacccgaacagccaaacagtgcggacaggcagactacggatggttgcaggcccgttataccttctcctttggacactacttcgaccctaaactgctgggctatgcctccctgcgcgtactcaaccaggaagtgctggcgccgggcgcctccttccagccgcgcacctacccgaaggtggatattttaaacctgattctggaaggcgaagcggaatatcgcgacagcgaaggcaatcatgtccaggcgaaagcgggcgaagccctgctgctcgccacgcagccgggcattagctatagcgagcataacctcagtaaagataagtcgcttaccaggatgcagctatggctggacgcctgtcctgagcgggaaaacccgttggtacagaaaaccacgctaaccgcgggcaaacagcaactcctcgcctccccggatggagaacaggacagcctgcaattacgccagcaggtctgggtgcaccatattgagctgaaaaaaggcgagtcgctgagctttcaactgcatggcccacgcgcctatttgcagtcgattcacggtacgtttcatgcggtaacgcataacgaggagcgagaagcgcttacctgcggcgacggcgcatttattcgtgatgaagctaacataacgttagttgccgacacgccattgcgcgctttactgatagatttgcctgtgtag

SEQ ID NO: 72533 - DNA, 171 bp, Citrobacter koseri
atgactgtgagcaaaaaatcggctaaaaagcatcaatccgtaacccaacccgcagcacaggatgcggcaaacgcgcccgggaaatttggctacgaggagatgctaaccgaactggaagcgatcgtcgcggatgcagagatccggttagcggaagaagatgaagccgcctga

SEQ ID NO: 72534 - DNA, 1311 bp, Citrobacter koseri
atgtttgagtctacagaaaatccgttatggcagcgttttatcctcgcagtacaggaagaggtaaaaccggcactgggatgtacggaacctgtctctctggcgctggcggcggcggttgccgcggctgaacttgacggcgaagttgaacgcgttgacgcgtgggtctcgccgaacctgatgaagaatggcctgggcgtcaccgtgccgggcaccgggatggttgggcttcccattgcggcagcgctgggggcgcttggcggcgatgccagcgcggggctggaagtgttgaaaaacgcctcttcgggggcgattgcggatgcgaaagcgatgctggctgccgggaaggtgtcggtgatgttgcaggagccatgcgacgacatcctcttctcacgcgctaaagtgtacagcggcgatgcgtgggcctgcgtaacgatcgtcggcgggcacaccaatatcgtgcgcattgaaactcacactggggtgatctttacgcagaccgaaagcgtgcagggggaggcgcaagaatcgccgctgtcggtcttatcaaagacctcgctggaagagattctggcgtttgtgaatgcggtgccatttgtgtcaatccgctttattttggaggccgccagactgaacggcgcgctgtcgcaggaaggattgcgcggcacctgggggctgcatatcggggcgacgttgcaaaagcagtgcgcacgcggtctgctggcggacgatctgtcaacggcgatcctgattcgcaccagcgcagcctcggatgcgcggatgggcggcgcgacgctgccagccatgagtaactccggctccggcaatcaggggatcaccgcgacggttcccgtaatggtggtggcggagcatgtgggggcggatgacgaacgtctggcgcgcgccctgatgctctcgcacctgagcgcgatctacattcaccatcagcttccacgcctgtcagcgctctgtgcggcgaccacggcggcaatgggggcggcggcaggaatggcgtggctgatggatggccgctataacacgattgcgatggcgatcagcagtatgatcggcgacgtgagcgggatgatatgcgacggcgcatcgaatagctgtgcgatgaaggtatcgaccagcgcgtctgcggcctggaaagcggtgttaatggcgctggatgatacggcggtaaccggcaacgaagggattgtggcgcataacgtcgagcaatctatttcgaatttatgcgcgttggcctgtcatgcaatgcagcaaaccgaccgtcaggttatcgaaattatggccagtaaggcgcattaa

SEQ ID NO: 72535 - DNA, 1332 bp, Citrobacter koseri
atggaaacggcaacgaataacagcgtaatactcgacgcatcagctccggcgcgccgggcagggatgaccgaaagcgaatggcgcgaagccattaaattcgacagcactgacacgggctgggtcatcatgagtattggtatggcgatcggcgcggggattgtttttctcccggtgcaggtcggtttaatggggctgtgggtctttttactctcctctattatcggctatcccgcgatgtatctgttccagcgcctgttcatcaacacgctggcggagtccccggaatgtaaagactacccgagcgtcatcagcggctatctggggaaaaactggggcatcctgttaggcgcactctactttgtgatgctggtgatctggatgtttgtctactccaccgccatcactaacgacagcgcctcttatctgcacacctttggcgtcacggaaggtttgctctccgacagcccgttttatggactggtgctgatttgcattctggtggcgatctcgtcacgcggcgagcagcttctgttcaagatttcgaccggcatggtgctgactaaactgctggtggtcgcggcgctcggcgtctcaatgatcgggatgtggcatttgtacaacattggcgcgctgccaccgatggcgctgttgattaaaaacgccatcatcaccttgccgtttacgctgacctccatcctgtttatccagaccttgagtccgatggtgatctcttatcgttcacgcgaaaaatccattgaggtcgcacggcataaagcgctgcgcgccatgaacatcgcgttcggcattctgtttgttaccgtctttttctacgcagtctctttcaccctggcgatggggcatgacgaagcggtcaaagcctatgagcagaacatctctgcactggcgatcgccgcgcagtttattagcggcgcgggtgcgggctgggtgaaagtggtcagcgtgatcctgaatatctttgccgttatgaccgcgttcttcggcgtttacttaggctttcgcgaagcgactcagggaattgtgatgaacctgctgcgccgcagaatgcctgtcgagaagattaacgaacgcttcgtgcagcgcggcattatggttttcgccatcttactggcctggagcgccattgtgctgaatgcgccggtgctgagttttacctctatctgtagcccgatcttcggcatggtgggatgtttgatcccggcctggctggtctacaaagttcctgcactgcacaaatacaagggcgcgtctctgtatctgattatcgtcacgggtttgctgctgtgcgtttctccgttcctggcatttgcttga

SEQ ID NO: 72536 - DNA, 1365 bp, Citrobacter koseri
atgattagcgcattcgatatttttaagattggcattggaccttccagctcccataccgtagggccgatgaatgcaggaaaatgttttatcgatcaactgaccagcaagggtgacttactttgcacgacgcgtattacggttgatctgtatggatcgttatcgctgaccgggaaaggtcatgcgacggataccgccatcatgatggggctggcaggcaacagcccgcaaaacgtgaatatcgacgcgattcccacctttattgaagacgtaacacacagtggacgcctgccggtggccgagggagcgcacgttgttgatttcccggtagcagacagcattctctttcacgccgaaacgctaccgcgccatgaaaacgggatgcgtattacggcatggaacgggcaagagacgctgttgagcaaaacctattactccatcggcggcgggtttatcgtcgaagaggagcgtttcgggcaggcgcatgatgtcgaaacgcctgtgccttatgattttcactcggccagcgaactgctgaaactgtgtgagcgaaacgggctttcggtctctggcctgatgatgcaaaacgagctggcgctgcgcagcaaagaggagattgacgccggattcgcgcgcatctgggatgtgatgcacgccgggattgaacgcggcatgaacaccgagggcgtactgccggggccgctgaatgtgccgcgtcgcgccgttgcgttaaggcgtctgctggtctccagcgacagcctctccagcgacccgatgaacgttatcgactggatcaacatgtttgcgctggccgtcagcgaagagaacgcggcaggaggacgggtcgtaacggcgccaactaacggcgcatgcggcattattcctgctgtactggcctattacgataagttccgccgtccggtgaatgccaactcgattgcccgctatctgctggctgcgggcgcgattggcgcgctgtataagatgaatgcgtctatctccggtgcggaagtgggctgtcagggtgaagttggcgtcgcctgctcgatggctgcggcagggctgacggaactgctgggcggtagtccatcgcaggtttgcattgcggcggaaatcgcgatggagcacaacctgggattgacctgcgatccggtggccgggcaggtgcaaattccttgcattgaacgtaacgcgattaatgcggtaaaagcggtgaatgcggcgcgaatggcgctgcggcggacgtctgagccacgggtgtcgctcgataaagtgatcgagacgatgtatgaaaccggcaaggatatgaacgataagtaccgcgagacttcgcgcggtgggctggcgattaaggtcgtttgtacctga

SEQ ID NO: 72537 - DNA, 396 bp, Citrobacter koseri
atgagaaagattattgccacccaacatgcaccgggggccatcggcccctacgtacagggtgtggatttgggcagtatggtgctgacctcaggtcagatcccggtatgcccgcaaacgggcgaggtcgcggaaaatgtcgtcgatcaggcgcgtcagagcctggaaaacgtcaaagcgattgtggaagctgcgggcctgaaagtgggcgatatcgtgaagaccactgtgttcattaccgatctgaacgatttcaccaccatcaacgaggtgtatcagcagttctttgatgagcatcaggcgacttaccctacgcgcagctgtgtgcaggtcgcccgtttgccgaaggatgtgaagctggagattgaagctatcgcggtgcgtggcgatacgctgtaa

SEQ ID NO: 72538 - DNA, 2295 bp, Citrobacter koseri
atgaaggtaaatatcgataccagcgatatgctgtatgccgaagcctggcttggctttaaaggtacggactggaaagaagaaattaatgtccgtgattttattcagcacaactatacaccctatgagggagatgaatccttcctcgcggaagccacgcctgcgactaccgcattgtgggaaaaagttatggcgggtattcgtattgaaaactcgacgcatgcgccagtcgatttcgataccaatattgcgaccaccattactgcccatgacgcgggttatattgagcaggagctggaaaaaatcgtcggtttgcaaaccgataagccactcaagcgcgcgctgcatccgtttggcggcatcaacatgatcaaaagctcattccaggcgtatggtcgtgaaatggatgctgattttgaatatcagtttaccgagctgcgtaaaacccataaccagggggtattcgacgcgtattcgccggatatgctgcgctgccgtaaatccggggtgctgaccggcttaccggatggctacggccgtgggcgcattatcggcgactatcgccgcgttgcgctgtacggtatccgttatctggtgcgcgagcgtgagttgcagtttgccgacctccagtcaaatctggagtgggggcagaaccttgaagcgacgattcgcctgcgtgaagagctggccgaacaccgtcgtgcgctgctgcaaatgcaggaaatggccgccaaatacggttgtgatatctcccgtccggcgcgtaacgcgcaggaagccgtccagtggctttacttcgcctatctggcagcggtgaaatcgcagaacggcggcgcaatgtcgctgggccgtaccgcgtcgttcctcgacatctacattgagcgagacttcaaagccgggatcttaacggaagaacaggcgcaggagctgatcgaccacttcatcatgaagatccgcatggtgcgcttcctgcgcacgccggaatttgacacgctgttctccggcgatccgatttgggcaaccgaagtgatcggcggtatggggctggatggccgcacgctggtgaccaaaaactccttccgctatctgcataccctgcacacgatggggcctgcgccagagccgaacctgaccgtgctgtggtcagaagcgctgccggtcgcctttaaaaagtatgcggcacaggtgtcgatcgtcacttcatctttgcagtatgaaaatgacgatctgatgcgcgctgactttgacagcgatgattacgccattgcctgctgcgtcagcccgatggtcatcggtaagcagatgcagttcttcggcgcccgcgccaacctcgctaaaacgctgctgtatgcaatcaacggcggtgtggatgagaagctgaaaatccaggttgggccgaaaacggcgccattaatggatgacgtgctggattacgacacggtgatggagagccttgaccacttcatggactggctggcggtgcagtacatcagcgcgctgaatatcatccactacatgcacgacaagtacagctacgaagcgtcgctgatggcgctgcacgatcgtgacgtttatcgcacgatggcatgcggcatcgcggggctgtccgtggcggcggattcgctgtccgccattaagtacgcgaaggtgaaaccggtgcgcgaccacaacgggctggcagtcgattttgtcatcgaaggcgaatatccgcagtacggcaacaacgacgagcgcgtggacagcattgcctgcgatctggttgaacgctttatgaagaaaattaaagtgttgccaacctaccgcaacgcggtgccgacgcagtccattctgaccatcacctcgaacgtggtgtacggccagaaaaccgggaacacgccggatggacgtcgtggcggtacgccgttcgcgccgggtgcgaacccgatgcacggccgtgaccgtaaaggcgctgtcgcttcgctgacttccgtcgcgaaactgccgttcacctatgccaaagacgggatttcctacaccttctccattgtgcctgcggcgttgggcaaagatgacggcgtgcggaaaaccaatctggtcggcctgctggacggatacttccatcatgaagcgcatgtggaaggcggccagcacctgaacgtcaacgtgatgaaccgtgaaatgctgctggacgccatcgagcacccggaaagctatccgaacctgacgatccgcgtgtccggctacgccgtgcgctttaatgcgctcacccgcgagcaacagcaggatgtgatttcacgtacctttacccaggcgatataa

SEQ ID NO: 72539 - DNA, 1209 bp, Citrobacter koseri
atgaatgaatttccggtagttctggtgattaactgtggatcgtcttccattaagttttcagtactggatgcaacccattgcgatgtgttaatggcaggaattgcggacggtattaattctgaagatgcgtttttatccgtaaatggaggagagccagctaagctggctcaccacagctacgaaggcgcattaaaggcgattgcgtttgaactggaaaaacgtaatttaatcgacagcgtggccttaattggccaccgtattgcccacggcggaaatatctttacggcatcagccattattacggatgaagttatcgagaatatccgccgggtttctcctttagcgccgttacataattatgccaatttaagcggaattgaatcggcgcagcatcttttcccgggcgtacagcaggtggcggtatttgataccagcttccatcaaacgatggcgcctgaagcctatttgtacggcttgccgtggaaatattttgaggagttgggcgtccggcgctatggctttcatggcacctcgcaccgctatgtctcgcaacgtgcgcatgaccttcttgcgctacaggaagaggactcgggtctggttgtcgcgcatctgggcaatggcgcttctatctgtgccgttcgtaacggtcaaagcgtcgatacctctatggggatgaccccgctggaagggctgatgatgggcacccgcagcggcgatgtggacttcggcgcgatggcgtggattgccagcgaaaccaaccagacgctgggcgatatggaacgcgtggtgaataaagagtctggtttgctggggatttccggtctgtcatctgacttacgtgtgctggaaaaagcctggcatgaagggcatgaacgtgcgcaactggcgattaaaacctttgtgcaccgtattgcccgccacattgccgggcatgccgcatcgttacaccgtctggacggtattatttttaccggggggattggcgaaaactccgtgttaattcgccgtctggtcattgagcatttggctgttctgggcgtgaaattagatcacgagatgaatagcctgcctaattctcacggtgaaagaattatctccagcaaagacaccaacgttatttgtgccgtcattccaacgaatgaagaaaaaatgattgccctcgacgctattcatttaggcaaagttaacgcacctgtggaatttgcataa

SEQ ID NO: 72540 - DNA, 1332 bp, Citrobacter koseri
atgagtactactgatagcattgtatccagccagacaaaacagtcgtcctggcgtaaatcggacaccacatggacactgggactatttggtactgccatcggcgccggggtgttgttcttccctattcgcgcagggtttggcgggctgatcccgattcttttgatgctggtgttggcctaccccatcgcgttttactgccaccgtgcgctggcgcgcctgtgtctttccggttctaacccttccggcaacatcacagaaacggtagaagagcactttggtaaaacaggcggcgtggtcatcacgttcctgtacttcttcgctatctgtccgctgctgtggatttatggcgtaaccattaccaacacctttatgaccttctgggaaaaccagttgcagatgccggcgcttaaccgtggctttgtggcgctgttcctgctgctgctgatggctttcgttatctggtttggtaaagacctgatggttaaagtgatgagctacctggtatggccgttcattgccagcctggtgctgatctctctgtcgctgatcccttactggaactctgcggttatcgatcaggtggatctcagcaatatcgcgttaaccgggcatgacggcattctggttaccgtgtggctgggtatctccatcatggtgttctcctttaacttctcgcctatcgtctcttctttcgtggtttccaaacgtgaagagtatgagaaagactttggtcgtgaatttaccgagcgtaaatgttcacagatcatctcccgcgccagcatgctgatggtggccgtggtgatgttcttcgccttcagctgcctgttcacgctctctccggccaacatggcggatgcgaaagcgcagaacattccggtgctctcatatctggcgaaccactttgcgtcgctgtctggcactaaatcaacgtttgctacggttctggagtacggggcttccatcatcgcactggtcgctatcttcaaatcattcttcggtcactatctgggcacgctggaaggcctgaacggtctggtgctgaagtttggttacaaaggcgataaaaccaaagtttcactgggcaaactcaacaccatcagcatgatcttcatcatgggttccacctgggttgtggcatacgccaacccgaacatcctggacctgattgaagcaatgggtgcgccgatcattgcctcgctgctctgcctgctgccgatgtacgccatccgtaaagcgccgtcactggcgaaataccgtggtcgtctggataacgtgtttgtgaccgtgattggtctgctgaccatcctgaatatcgtgtacaagctgttctaa

SEQ ID NO: 72541 - DNA, 990 bp, Citrobacter koseri
atgcatattacatacgatctcccggttgcgattgaagatatcctcgaagcgaaaaaaagacttgcggggaaaatttataaaacaggtatgccgcgctctaactatttcagcgagcgctgcaaaggcgaaatattccttaagttcgaaaatatgcaacgcacgggctcttttaaaatccgcggtgcgtttaacaaactcagttcattaacggaagaagaaaaacgtaaaggcgtggtggcttgctctgccggtaaccatgcgcaaggggtgtctctctcctgcgcgatgctcggtatcgacggcaaagtcgtgatgccgaaaggcgcgccgaagtccaaagtggcggccacctgcgactactccgctgaagtggtgctgcacggtgacaacttcaacgataccatcgccaaagtgagcgaaattgttgagactgaaggccgcatttttattccaccttatgacgatccgaaagtgattgccgggcagggaacgattggcctggaaattatggaagatctgtatgatgtcgataacgtcattgtaccaattggcggcggcggtctgattgccggtgttgcgattgctattaaatccattaacccgacaattaaagttattggcgtacagtccgaaaacgtacacggcatggcggcatcttatcatgcaggagaaataaccactcaccgaacgaccggcaccctggcggatggttgtgatgtttctcgcccgggtaatttaacgtatgagattgttcgtgaattagtggatgacattgtcctggtcagcgaagatgaaattcgtaacagcatgattgcattaattcagcgcaataaagtcgtcactgaaggcgctggcgcactggcatgtgccgcattattaagcgggaaattagatagctatatccagaacagaaaaacggtcagcattatttctggcggcaatatcgatctttctcgtgtatcgcaaattacgggcttagttgacgcttaa

SEQ ID NO: 72542 - DNA, 939 bp, Citrobacter koseri
atgaatactattcttctccctaaaacacagcacttggtggtctttcaggaagtcattagaagtggttctatcggttctgccgcaaaagagttagggttaactcagcctgctgtaagtaaaattatcaatgatgttgaggcctattttggcgttgagttaatcgttcgcaaaaataccggtgtcacgttaaccagcgcaggtcaggtgctgcttacctggtctgaatccatcacccgtgaaatgaaaaacatggtgaacgagatgaacagcatgacctgcaacacggtggtcgacgtttcgtttggttttccttcgttgattggctttacctttatgtctgacatgattcataaatttaaagaggtgttcccaaaagcgcaggtgtcgatgtatgaagcgcagctctcctcgttcctgcccgcgattcgcgacggacgcctggatttcgccatcggcacgctcagtgatgagatgaaactacaggatctacacgtggaaccgctttttgagtcagagtttgtcctggtggccagtaagtcccgaacatgcaccggcatcaccacactggaatcgttgcagaacgaacagtgggtgttgccacaaacgaatatgggctactacagcgaactcctcaccacgttacaaagaaatggcatcagcagtgaaaacatcgttaaaacagattccgttgtcactatttataatcttgttctcaatgctgattttctgaccgtcattccctgcgatatgacatctccattcggttcaaaccagtttattacgattccagtagaggaagatttaccggtcgcgcgttatgccgcgatctggtctaaaaattatcggattaaaaaagcagcatcggttttggtggaattagccaaagaatattcatcttataatggttgcagacgaaagcaattaatagaaattaagtaa

SEQ ID NO: 72543 - DNA, 564 bp, Citrobacter koseri
atgaaagcaaaaacccgccgaagcgggtttttacatgaagaggtgaaactgaccgataagccgggttctgtcgtggacagtcattcatctaggccagcaatcgctcactggctcaagcagcctacccgggttcagtacgggccgtaccttatgaacccctatttggccttgctccgggtggagtttaccgtgccgcgaactgttaccagccgcgcggtgcgctcttaccgcaccctttcacccttacctgatcccgcttgcgcgggccatcggcggtttgctctctgttgcactggtcgtgggcttgcgccccccaggcgttacctggcaccctgccctatggagcccggactttcctcccctccgcccgtctcccccgaaagggacgacgacgaagcggcgactgtctggtcagcttcggcgcgcagtatagagggtttgcacgccattgtcaccctgcactgcgcattcctatcgccagcgttgcggcgatgtttcgcgaggcgcggtagatattatcaaacgcgccgcgaaaggcttcatccagcgtgccaatgcgggtaa

SEQ ID NO: 72544 - DNA, 1146 bp, Citrobacter koseri
atgaaaatcgtaatcgccccagactcttataaagaaagcctttctgccgctgaagttgcgcaggcgatagaaaaaggattccgggaaatttttcccgatgcgcagtatgtttctatcccggtcgctgacggcggagagggaacggtcgaagccatgattgccgccacgcatggaacgcagtataccgcttttgtgacggggccgctgggggagaccgtcatggccaactggggcatgtccggggacggcagcaccgcgtttattgaaatggcggcggccagcgggctggcgctggttccgccagaaaagcgtaatccgttgattaccacgtcgcgcggtaccggagagctgatcctgcatgcgctggagcacggcgccagaagcattatcatcggcattggcggcagcgcgaccaatgacggcggcgcgggcatggtgcaggcgctgggcgcccgattaacggatgcgaacggtactgaaattgggaacggcggcggcagcctgaacagcctgaattcgattgatgtctctggtctcgatccgcgtttaaaaacgtgtgctatccgggtggcctgcgatgtgaccaatccactgacgggcgaaaatggcgcgtcgcgaatctttgggccgcagaaaggcgcgaccgaaaagctcattcatgaactggacggcaatcttgctcattatgccgacatgattaaaaagtcgctgcgcgtggatgtggaaaatgtccccggcgcgggcgcggctggcgggatgggggcggccttaatggctttcctcggcgcagagttgcgcagcggcattgagatagtcaccacggcgctcaatctggaagaacacatccacgactgcgcgttagtcgtcaccggcgaagggcgtatcgacagccagagtattcacggcaaagtaccgataggcgtcgccagtgtggcgaaaaagtatcataagccagtgattgggatcgcggggagtctgacgcatgatgtgggagtggtgcatcagcatggcattgatgccgtgttcagcgtgcttacccgcattggcacgctggatgaagcctttcgcggcgcgtttgataatatctaccgcgcctcgcgaaacatcgccgcaacgctggcgataggaatgcgcagtgcagggtga

SEQ ID NO: 72545 - DNA, 891 bp, Citrobacter koseri
atgacgatgaaagtaggtttcattggcctgggcatcatgggtaaaccaatgagcaaaaacctcctcaaagccggttactcgctggtggtttctgaccgtaaccctgacgcgattgccgaagttattgccgcaggcgcagaaaccgcaaccacggcaaaagccgttgccgaacagtgcgatgtgattatcaccatgctgccgaactcgccgcatgtgaaagaagtggcgctgggcgaaggcggcattattgaaggcgcgaagccaggcaccgttttgatcgatatgagctctatcgctccgctggcaagccgtgaaatcagcgacgcgctgaaagcaaaaggtatcgatatgctggatgcgccggtaagcggcggcgagccgaaagcgatcgacggcacgctgtcggtgatggttggcggcgataaagcgattttcgataaatattacgatctgctaaaagcaatggccggttccgtggtgcataccggtgatatcggcgcgggcaacgtgaccaaactggctaaccaggtgattgtcgcgctgaacatcgcagccatgtctgaagcgctgacgctggcgaccaaagcgggggtgaacccggatctggtgtatcaggcgattcgcggcggtctggcgggtagcaccgtgctggatgcgaaagcgccgatggtgatggaacggaatttcaaaccgggctttcgcatcgatctgcatattaaagatctggcgaatgcgctggacacctctcatggcgtaggcgcgcagctgccgctgaccgccgccgtgatggaaatgatgcaggcgctacgtgccgatggtctgggcacggccgaccatagcgccctggcctgctactacgaaaaactggcgaaagtggaaatcgctcgctaa

SEQ ID NO: 72546 - DNA, 774 bp, Citrobacter koseri
atgatgagtaacgatatcttcccgaacaaatttaaagctgcgctggcagcgcaacgcattcagatcggctgttggtccgcgctggcaaaccccatcagtacggaagtgttagggctggcaggttttgactggctggtgctggatggcgaacatgcgccgaacgatatctcaacttttattccacaactgatggcgttgaaaggcagcgccagcgcgccggtggtacgggtgccgacgaacgagccggtcatcattaagcgtctgctggatatcggtttctataacttcctgatcccgtttgtcgagacggaagaagaagccgttcgcgccgtggcctcgacgcgttatccaccggaaggcatccgtggggtctccgtttcccatcgcgccaatatgtttggcaccgtgccggattactttgcccagtcaaataagaacatcaccattctggtgcagatcgaaagccagcagggggtggataacgttgatgctatcgcggccactgaaggcgttgacggtatttttgtcggcccaagcgatctggctgcggcgttaggtcatcttggtaacgcctctcacccgggagtacagaaaaccattcagcatatctttgcccgcgccaaagcccacggtaaaccgtgcggcattctggcgccggtcgaagccgacgcgcgccgctatctggaatggggcgcgacgttcgttgccgtggggagcgatttgggcgtgttccgctccgccacgcaaaagctggctgacgcctttaagaaataa

SEQ ID NO: 72547 - DNA, 144 bp, Citrobacter koseri
atgtttagcggcgtaagtatgattatactgattcacgactttcattatccgctatcgataaaatatcagcgtaattccttagatgagcaaatcgaaatatctcccggaattgcggaaataaataatgattcatccagggtataa

SEQ ID NO: 72548 - DNA, 1572 bp, Citrobacter koseri
atggccgatatcgaaattagacaagaatcgccaaccgcgttttatattaaagtgcatgacaccgataacgtggcaattattgttaatgacaatggtctgcaagccggaacgcgtttcccggacggtctggcgttggttgaacatattcctcaggggcataaagtggcgctggaggcgattcctgctcacggcgaaatcgtgcgttatggcgaggtgatcggctatgccgttcgcgacatcgcacgcggcagctggatagatgagtcgctggttgagctaccgaaagcgccgccgttacacaccctgccgctggcgacgaaagtgccggaaccgctgccgccgctggaaggctacacgtttgaaggctaccgcaacgcggatggcagcgtcggcaccaaaaatctgctcggcatcaccaccagcgtacactgcgtggcgggcgtcgtggattatgtcgtgaagatcattgagcgtgacctgctgcccggatacccgaatgtagacggcgttgtcggtctgaaccacttgtacggctgcggcgtggcgatcaacgcgccagcggccgtggtgcctatccgcaccattcataacatctcgttgaacccgaacttcggcggcgaagttatggtcatcggccttggctgtgaaaaacttcagccggaacgtctgctggaaggcacggaagatgtgaaagggattccggtggacagcgccagtattgtgcgtttgcaggatgagcagcacgtcggctttaagtcaatggtcgaggatattttgcaggtggccgaacgccacctggcgaagctcaaccagcgccagcgtgaaacctgcccggcttccgaactggtggtcggaatgcagtgcggcggcagcgatgcgttttccggcgtgacggccaacccggcggtgggttacgcctcggatctgttagtgcgttgcggcgcgacggtgatgttctcggaagtcaccgaagtccgtgatgcgatccaccttctcacgccacgcgcgattaacgaagaggtcggcaaacgcctgctggaagagatggcctggtacgataactatcttgatatggggaaaaccgaccgcagcgccaacccgtcgccgggcaacaaaaaaggtggtctcgcgaacgtggtggaaaaagcgttgggctctatcgcaaaatccgggcagagcgcaattgtggaagtgctgtcccccggtcagcgaccgacaaaacgcggtttaatttacgccgccacgcccgccagtgattttgtctgcggcacgcagcaggtcgcttccgggatcaccgtgcaggtgttcacaaccggtcgcggaacgccatatggcctgatggcggttccggtaatcaaaatggcgacccgcacagaactggcgaatcgctggtttgatttgatggacatcaacgcgggcaccattgccacaggggaagagagcattgaggacgtgggctggaagctgttccactttattctggacgtcgcgagcggtcgtaagaaaaccttctcagaccaatgggggctgcataaccagctggccgtgtttaaccccgcgccagtgacctga

SEQ ID NO: 72549 - DNA, 855 bp, Citrobacter koseri
atgtttatcatttcaaccaaaacgatgctaaagaaagctcagcgtgaaggttacgcggtgcccgcattcaacatccacaacctcgaaacattacaggtcgtggtggaaaccgccgctgaaatgcgcgcgccattgatcgttgccggaacaccaggaaccttcagctacgctggcgtcagtaatatcgtggcaattgccagcgagttggcaaaaacctggaaccatcctctggccattcatctcgatcatcatgagaaaacaatggatatcgaagagaaagtcagggcaggcgttcgctcagtgatgatcgacggctcgcatctgccgtttgcagacaacatcgccttagtgaaaaacgtaacggattactgccatcgctatgacgtcagtgttgaggcagaactggggcgtctgggcggacaggaagatgatctcatcgtggatggcaaagatgctttgtatacccatccagaacaggctcaagaattcgtggctaaaacaggtatcgactctttggccgtagcgattggcaccgcacatggtctgtataccgcagaaccgaaactggatttcgaacgcctggcagagatccgacagcatgttgatatccctttagttttacatggcgcatcagggctacctggcagtgatattcgcaaggctatctcactgggtatttgtaaagtcaacgtcgcaaccgagctaaaaatcgctttttccgacgccctgaaaaattatttgcgtacacattccgatgccagcgatccacggcactacatggttccggccaaagccgcaatgaaagatgtcgtacgtaaagtcatcaccgactgcggttgcgaaggaaggctataa

SEQ ID NO: 72550 - DNA, 1272 bp, Citrobacter koseri
gtgaaagagataatctctcgtcataaggcaggtgaagcgtcaggcatttgttccgtctgttcagcacatccattagttattgaagcggcgctacgctttgatctcgcgacaaacaataaagttttgattgaagcaacatccaaccaggttaatcagttcggcggttataccggcatgaaacccgccgacttccgcgattttgtttataacattgcacaggaaacaggattcccgcgtgaaagattgattctgggtggcgatcacctggggcctaactgctggcagaatgaatccgcagtcgccgcaatggagaaatctgttgagttaattaaggcttatgtcgccgcaggttttagcaaaatccacctggatgcctcaatgtcatgtgccgacgatccaaccccacttgatcctatggtcgtggcccaacgcgctgctgtactttgccaggccgctgaaacaacggccactgaagaacaaaagcgccatttaacctatgtcattggcactgaagttcctgttcccggcggtgaagccagtagcatcggccgcgttcacgtcacgcgtgaagaagatgccgcccgtacgctggaaacgcaccaggtcgcctttcgcgcattagggctcgaggaagcattaactcgcattatcgccattgtggtacagcctggcgtggaattcgatcactcccaaattattcattatcaaccgcaggccgctgaagcgctttccgcatggattaaagacacgccgatggtgtatgaggcccactctaccgactatcaaacacgtcatgcctaccgcgcactggtacgcgatcactacgccattctgaaagtcggcccggcactgacctttgctttacgtgaagcgatttttgcactcgcgcaaatggagaacgaactgatttctccagaacaacgcagccgggtactggaagtgatcgatgaagtgatgcttaacgagccaggttactggaagaagtattatcgtccgacctggagccaggcgatgatcgatattcacttcagcttatccgatcgtattcgctactactggccgcatccacgcattcgtcaaagtgtggagaaattaattgccaatctgaacggggtttcattaccgccaggactcatcagtcagtttatgcccgtacagtttgaacgtctgtccgaaggggtactaaccgccacacctcataacttgattatcgacaaaatccaggacgttctgcgtgcctaccgctttggttgtgtgcctgaaaccgcctga

SEQ ID NO: 72551 - DNA, 465 bp, Citrobacter koseri
atgagccaactttttgtccgaaccggaattgactttaactcgtgccagcaagtgctggcacacattggagaggagatgctggcaaaaggtgttgtacatgaaagctatccgcaggcactggtagaacgcgaggcgaatttcccgacagggatcgcgctggaacgccatgccgtcgccattccgcactgcgaagccattcatgctaaatcacccgcaatctatctgattcgaccggataacccggtgaagtttcaacaggccgacgatgacgaagagatcgccgtttctttaatcatcgcacttatcgttgaaaaccctgcggcacagctgaagcttctgcgccgtctttttagtgagctacaaaatccgagcattcttgacgccttgctgagcgcacctgattccgagctggctacgctcttccgggaaaccatccttgagtctgagccgtgcgcccaggcctaa

SEQ ID NO: 72552 - DNA, 285 bp, Citrobacter koseri
atgaaacgtaaagtaatcgtggcctgtggcggtgcggtagcgacctcaaccatggccgcagaagaaattaaagaattatgtgaagctcacaatatcgatcttgatctcgtgcaatgccgggtcacggagatcgaaacctatatggatggcgcggatcttatttgtaccaccgcccgcgttgaccgtacctttggcgatatcccggtcgttcacggcatgccatttgtttctggcgtgggtattgaagcattgcagcaaaaaatcctgagcatccttaaggggtaa

SEQ ID NO: 72553 - DNA, 1374 bp, Citrobacter koseri
atgtttagcgaaataatgcgttatatcctggacttaggacccacggtaatgctgcctctggtgattatcgtcttctctaaattactggggatgaagctcggggattgttttaaatccggtctgcacatcggcattggttttgttggtattgggctggtgattggtctgatgctcgactctatcggacctgcggcgaaagccatggcagaacagttccagataaacctgcatgttattgatatcggctggccgggttcgtctccgatgacatgggcgtcgcaaattgcactgatcgccatccctgtcgctattggcgttaatgtcatcatgctgatcacgcgaatgacacgcgttgtgaatgtcgatatctggaatatttggcacatgacatttactggcgccatgctgcatcttgcgacaggttcttactggttgggtatcctgggcgtcgttgttcatgccgcctttgtctacaaactgggtgactggtttgccaaagatacccgcgatttctttggtctggaggggatcgccatcccacatggttcgtctgcttatcttggcccgatagcggtactggttgatacgatcattgaaaaaattccgggcctgaatcgcattcacttcagcgcagatgatgtacaaaaacgctttggtcctttcggagaacccgttactgtcggtttcgtcatggggctcgttatcggtatgttggcaggctatgacgtgaaaagcgtgctgcaactggctgtaaaaacagcagcagtcatgctcctgatgccacgggtgattaaaccgatcatggatggtttaacgcctattgccaggcatgcccgcaaacgtctgcaagctaaatttggcgggcaggaattcctgattggcctggaccctgcactattactaggccacacctcagtggtttccgccagcctgatttttattccgctgactattctgatcgcggtactggtgcccggtaatcaggtactcccattcggtgatctcgccactatcggtttctttgtcgcaatggcggtagcagtacatcagggtaacctgttccgcacgttgatatccggtgtcattatcatgggtatcacgctatggatcgccacacaaactatcggcctgcatacccaactcgccgctaatgccggggctctgaagactggcggcatggtagcttccatggaccaggggggttctccagtcacctggttactcattgaacttttcacctggcaaaatgttattggtctcgtggttatcggtgccatctactttaccggcgttctgttgacctggcgcagagcccgtaactttatggccgctgaaaaagcagcagctacccagcaaagtcaaacagcctcttaa

SEQ ID NO: 72554 - DNA, 1044 bp, Citrobacter koseri
atgaaatcagtggtgattcacgctgagggagacgtgcgcgttgaagaacgtcccataccacaaatacaggccgatgatgatgtattaatcaaggttattagctcgggtctttgtggttcagatatcccccgtattttcgcccacggggcgcattattatccaatcacgttaggccatgaatttagcggttacgttgaatcttatggttcaggtgttaccgatatgcagcctggcgatgctgtcgcctgtgttccgcttcttccttgctttcactgcccgcaatgcgaacggggatatttttcattatgcaagcaataccagtttgtcggttcacgtagtgaagggggcaatgctgaatacgttgtcgttaaacgcgccaacctcttccggcttccttccgatatgccaattgaagatggcgcatttatcgaacctatcaccgtagggttacacgcctttcacctggcgcaaggctgtaaaggtaaaaacgttattatcgttggggcgggtaccatcggcctgctggcgatgcagtgcgcccgtgagctgggagccaaaagcgttacagcaatcgatattaatccccagaaacttgaactggctaaagagctgggcgcaacgtacacctttaacagtcgtgaaatgaccgcgtcagagatccacgccgcactatctgatattcagtttgatcaattgattctggagacagcaggtacgccgcaaacggtctccctgaccatcgaaatagcagggccacgcgcccagttagctctggtaggaacattgcaccatgacctgacgctgacatcaggcgtgtttgggcaaattctgcgtaaagagttaacaatacttggtagttggatgaactattccagtccctggcctggtgaagagtgggaaaccgcagcgcgtttactcacggaaaaacgtctacaacttgaaccgttaattgcccatcgcggtgatgctgacagttttgccgacgcagtgaaagcgcttaacggcgcgccaatgcagggaaaaatcttacttaagctctcctga

SEQ ID NO: 72555 - DNA, 774 bp, Citrobacter koseri
atgaactcatttgagagaaggaacaaaattgtcgatctgattaatacgcagggtagcgtactggttatggatctttcgaatacctttggtatctctgaagtcactatccgcgccgacctgcgtttgctggaagaaaaagggcttgtcacacgttttcatggcggcgcggcaaaacctggaagtcatctggctgaaggcgacaatcaggaagtcatactcgaagatcgctatcaactcgccagcgaccctaaaaaacggattgcccaggccgcagcctcgatggttgaagaagggatgaccattattctggatagcggaagtacgacattgctgattgctgaagcattaacccgaaaaagcaatatcaccgttatcacaaatagcttacctgccgcatttaccttatccgacaataaggacctgaccctggtcgtttgtggtggtaccgtgcgacacaaaacgcattccatgcatggcacaattgcggaacgctcgctacatgggatcagtgcggatctcatgtttgttggggctgatgggattgatgcaactaacggcattacaactttcaatgaaggctattcgattagtagcgtgatggctgctgcggcacataaggtcattgccgtactggatgcgacaaaatttaaccgccgtggttttaatcaggtacttccaatggagaagattaactgtgtaataaccgacgacagcatcagcaaacaggataaatcagcgctgaccaaaacaggcgttgagctgctggtcgtttaa

SEQ ID NO: 72556 - DNA, 1002 bp, Citrobacter koseri
gtgagcacctaccaaccacctttcgtcatcactccattgatcctcaatcaagtcattgaggttggtgagttgatggggcattgggctgcgatggctggtaggacatctcctcttttgcgcaaagagaatcgtattcgcactattcaggcctctttagcgattgagcataattcgttgactacggaacaagtcaccgctctgatggaggggaaacgtattctggctcctgctaaagatatacaggaagttagaaatgcgattctggcctatgaaaagatgtcggaatggaaaagtgaaaaattatctgaccttttacaagcacatcgggtccttatgctcggtctggtcgataatccgggccagttacgtaccggaaatgttggtgtttacagggaaaaacagcttattcacatggctcctccggcctcacaagtttttcgtttgatgaatgatttacttggctggttaaaaacgacagagctccacccactgattgctggtgctgttttccattatgagtttgaatttattcatccttttgccgacggaaatggacgcatggggcggttgtggcagacattaatcctacgtgagtggcgatcggaattggcgtggctacctgtagagacactgatccactaccaacaggaccgctattaccaggtgttagggcagtgcgatcggcaaagtagctgtacgccatttatagaatttatcctggaaaacatcatctctgctttgcaggagggattgggaaaatcaccagccctgtcggaagaaatgtcggaagaaatgtcggaagaaatgtcgcctgatttactggatatagaaaaacgtattctacaaatcttgtcgaatcatccgggcagatccgccaaaagtatcgctgatgagtgtgagctctcagcccgaaccgtagaacgctatctgaaagcgttgcagctaaaaggcaaactgcaacgcgttggcgcgacaaaaggggggatgtggcgggtaatttaa

SEQ ID NO: 72557 - DNA, 864 bp, Citrobacter koseri
atgaaacaaaacgaatcggcggataattctcagggccaactctatattgtacctactcctatcgggaatttggctgatattacccaacgagcgctcgaagttttgcaagccgttgatttaattgccgctgaagacactcgtcataccggactattgttacaacacttcgcgattaacgcccgtttgttcgctttacatgaccacaatgagcagcaaaaagccgagacgctggtggcgaagctgaaagaggggcagaacattgcgctggtttctgatgccggaacgccattgatcaatgacccgggttaccatctggtgcgcacctgtcgtgaagccggcatccgtgtggttccgttgccggggccgtgcgccgcgattgccgcgctgagcgccgccgggttgccgtccgatcgtttttgctatgaaggttttctgcccgcgaaatcgaaaggccgccgtgatgcgctgaaagcgattgaagcagaaccacggacgctgattttttatgaatccacacaccgcttgctggacagcctggaagatatggtcgccgtgtggggagaatctcgctacgtggtgctggcgcgtgagctgaccaaaacctgggagaccatttacggcgcgccggtcggcgaactgctggcatgggtgaaagaggacgaaaaccgccgcaagggggaaatggtactgattgtcgaggggcacaaagcccaggacgatgcgcttcctgccgacgcgctgcgaacgctggcgttgttacaggcggaactgccgctgaaaaaggccgccgcccttgccgccgaaatccacggcgtgaaaaagaacgcgctgtataagtatgcgctggagcagcagggggagtaa

SEQ ID NO: 72558 - DNA, 2046 bp, Citrobacter koseri
atggtaccctcaacattttctcgtttgaaagccgcgcgcgcgctgcctgtcattctggcagcattgattttcgcgggctgtggcacccaggcgccggatcaaagtgctgcccatatgcagggcacggcacaagctgattccggcttttatctgcaacaaatgcagcaaagttcagatgatagcaagaccaactggcaattactcgccattcgtgcactgctgaaagaaggcaaaagccagcatgccatcgaattattcaaccagttgccgcaaaacctgaacgatgcgcagcgtcgcgaacagtcgctgctggcggttgagatcaaactggcgcagaaagatatcgccggcgcgcaggcgctgctggaaaaactcactccggctgatttggatcagaaccaacaggcgcgttactggcaggcgaaaattgatgccagccagggccgcccttctctttcactgctgcgcgcgttaatcgcccaggagccgctgctgtctgcaaaagacaagcagaagaacatggatgccacctggcaagcgctctcctctatgacccaggaacaggctcaggcgctggtcattaacgcagatgaaaacgtcctgcaaggctggctggatttacagcgtgtctggttcgataaccgtaacgacccggacatgatgaaagccgggattgctgactggcaaaaacgctacccgcaaaatccaggggcaaaactgctgcccacgcaactggtcaatgtgcaaagctttaaaccggcttccaccagcaaaatcgccctgctgctgccgttgaacggccaggccgccatttttggccgcaccattcagcaaggttttgaagcggcgaaaaatctggggacgcaaccggtggacgcgcagcctgccactgcgcctgtcgcggaaccgacagcgccggcagaacctgcccagcagcaagccgctgacggcgtcgccagcccttcccaggcggcggtgaacgatttaaccggcgacgaacaaacgcagcctgccgaacaaccggtaagcgccccggcgcagaccgctacggcgagcgcgccggccaacccttccgctgaactgaaaatctacgacaccacctctcaaccgctggatcagatcctcacgcaggttcagcaggacggcgccagcattgttgtcgggccgctgctgaaaaataacgttgaagagctgattaaaagcaatacgccgctgaatgtcctggcgcttaatcagcctgagaaggtgcagaaccacgctaatatttgctactttgccctctcacctgaagatgaagcccgcgacgcggcacatcatattcacgaccagggcaaacaaaatccgctgttgttgattccacgcagcgggctgggcgatcgcgtggcgaacgctttcgctcaggagtggcagaatctgggcggcggcacggtgttgcagcagaaattcggttctaccgctgagctgagaatgggcgtcaacggcggctccggcattgccctgacgggcagccctgtcgccgccagccagccctcacagccgggcgtcaccattggcggcctgacgattccggcaccgccgacagacgcgcagatcactggcggcggcggtcgcgttgacgcggtctacattctggcgacgccggaagagatcgggttcattaaaccgatgatcgccatgcgtaacggcagccaaagcggcgcaacgctgtacgccagctcgcgcagcgcgcagggcacttccggccccgacttccgtctggagatggaaggcttgcagtacagcgagatcccaatgctggccggtagcaacatgccgttaatgcaacaggcgctcggcgccgtacgcaacgactactcccttgcccgtatgtacgcgatgggcgtagacgcgtggtcgctggcgaaccacttctcgcagatgcgccaggtgccgggtttcgaaattaacggtaataccggggcgttaaccgccacacaggattgcgtgattaacaggaagttatcatggctcaaataccagcaagggcaaatcgtccccgccagttaa

SEQ ID NO: 72559 - DNA, 396 bp, Citrobacter koseri
atggctcaaataccagcaagggcaaatcgtccccgccagttaacgagtaaacagaccggcgacgtgtgggaagccgccgcacgccgctggctggagagcaagggactgcgttttgttgccgccaacgtgcgtgagcgcggcggcgaaatcgatctgataatgcgtgacggaaaaaccacggtctttgttgaggttcgttatcgccgctcggcacagtttggcggcgcggccgccagtgtgacctggagcaaacaacacaaattattacagaccgcccgcttgtggcttgctcgccacaatgggagttttgatactgtggattgccggttcgatgtgttagccttcaccggaaatgatgttgagtggtttaaggatgcctttaacgaccgctcataa

SEQ ID NO: 72560 - DNA, 591 bp, Citrobacter koseri
gtgctcgatagaattaaagtctgctttacagaaagcattcaaacgcaaattgctgcggcagaagctctcccggatgcaatttcccgtgccgccatgacgctggttcactccctgctcaacggcaacaaaattctctgttgtggtaatggtacttccgccgccaacgcacagcattttgctgccagcatgatcaaccgttttgaaacagaacgtcccagtttacccgctattgcacttaataccgataatgtggtcttaacagcgattgccaacgatcgcctgcatgatgaaatctatgcaaaacaggtccgtgcgctgggccatgccggtgatgttttattggcgatttctacgcgtggcaacagtcgcgatatcgttaaggccgttgaggccgccgtcactcgggatatgaccattgtggcgttgacaggctatgacgggggcgagctggccgggttattagggccgcaggatgttgaaatccgtattccctcgcaccacagcgcgcgcattcaggaaatgcatatgctgacggtaaactgcttgtgcgatttgatcgacaacacgcttttccctcaccaggatgattaa

SEQ ID NO: 72561 - DNA, 576 bp, Citrobacter koseri
atgaaggcattttcgccactcgcagtccttatttctgcgttgctgttgcaaggttgcgtcgctgccgcggtggttggaaccgccgctgtgggtacgaaagccgcaaccgatccacgtagcgttggcacccaggtggatgacggaaccctggaactgcgcgtaaacagcgcgctgtcgaaagacgaacaaatcaagaaagaagcgcgcatcaacgtaacggcgtatcagggcaaggtattactggtgggtcagtcgccgaatagcgaactctcctcgcgggcaaaacagattgcgatgggtgtcgatggggcgacggaagtgtataacgaaatccgtcagggccagccgattggtcttggtacagcttcgaacgatacctggatcaccaccaaagtgcgttcgcagctgttgaccagcgatcaggtgaaatcgtccaacgtaaaagtgacgaccgaaaatggcgaggttttcctgttgggtctggtcaccgaacgtgaatcaaaagccgctgcggacatcgccagccgggtcagcggtgtgaaacgcgtcaccaccgcctttacgtttatcaaataa

SEQ ID NO: 72562 - DNA, 1038 bp, Citrobacter koseri
atggctggtcagtcttcatctcaggcggtgacgccatttcaatggtggaaacccgcactcttctttctcgtcgttatcgttggcctctggtatgtgaaatggcagccttattacggcaaagctttcacggctgcggaaacgcacagtatcggtaaatctattctggcgcaggcggatgcgaacccgtggcgagcggcctgggactacgcgatgatctattttatcgcggtctggaaggcggcggtgctgggggtgatcctcggttcgctgattcaggtgttgatcccgcgcgactggctgctgcgtacgctggggcagtcgcgttttcgcggaacgctgtttggcaccctgttctcgctgcctggcatgatgtgtacctgctgcgccgcgccggtagcggcgggaatgcgtcgccagcaggtttctatgggcggcgcgctggcgttctggatggggaatccgctgttaaacccggcaacgctggtgtttatgggctttgtgctcggctggcattttgcggctattcgtctggttgccgggctggcgatggtgctggtggtggcgacgctggtgcagaaatgggtgaaagagtcgccgcaggtagacattcctcaggagatcaccgtatctgaaccgcagggcggattctttgctcgctggggaaaagcattgtggtcgctgttctggagtacgatcccggtttatatcctggcggtactggtattaggcgcggcgcgcgtctggctgttcccgcatgccgatggcgcagttgataatacgctgatgtgggttattgcgatggccgtcgcgggatgcctgtttgtgatccctaccgccgcagagattccgattgtacaaacgatgatgctggcaggaatgggaaccgcgcctgctctggcgctgctgatgactttgccggcggtgagtctgccgtcgctgattatgctgcgtaaagccttcccggcaaaagcgttgtggcttacaggtgtactggtggcgatttctggggtgatagtgggaagtattgcgctggtgtga

SEQ ID NO: 72563 - DNA, 636 bp, Citrobacter koseri
atgactcaggtgttaattacaggggcgacggggctggtgggaggacacctcctgcggatgttgcttaatgaaccccggattcattcgatagccgcgcctacacgccgccctctggcggatatggtcggcgtttataatcctcacgatcctcaactgaccgatgcgctggcgcaggtgaccgatccggtggacattgttttttgctgtctgggaacgactcgccgcgaggccggaagcaaagaggcgtttattcatgcggattatacgctggtggtggataccgcgctgacggggcggcggctgggcgcccgacatatgctggtcgtgagcgcaatgggcgcaaatgcgcgatcgccgtttttctataaccgggtcaaaggtgaaatggaagaggcgttaatcgcccagcaatggccgcgcctgacgattgcgcgtccctccatgttgcttggcgacagagctaaacaccggatgaatgaaacgctgtttgcgccgctgttccggctgctgccgggaaactggaaatccatcgacgccagagatgtggcgcgtgcgatgctggaggaggctctggcaccggagcaagaaggcgttaccatcctgacctcatcccagttgcgggaaagggcgttatag

SEQ ID NO: 72564 - DNA, 441 bp, Citrobacter koseri
atggaaacactcaccgcgataagccgctggctggcaaagcagcatgtggtcacctggtgcgttcagcatgagggcgaactctggtgcgcaaacgcgttttatctgtttgatgcgcaaaaggttgcgttttatgtactcacggaagagaaaacgcgccatgcgcagatgtccggcccgcgcgcgcccgttgccggaacggtcaacggtcagccgaaaacggtggcgcggattcgcggaatacagtttaaaggggagatccgcaagcttgagggagaggaaagcgatgcggcgcgtcaggcctatctccgccgctttcctgtcgccagaatgctgcctgcgccagtatgggaaatccgcctggatgaaatcaaattcactgacaacacgttgggatttggcaaaaaaatgcactggctacgcagcccgatccgtagcctatag

SEQ ID NO: 72565 - DNA, 312 bp, Citrobacter koseri
atggtcatgatgacaccctggtatctgtatctgatccgcaccgcagacaatgccctctacaccgggattacgaccgatgtagcgcgccgctataagcagcatcaaagtggtaaaggcgcaaaagcgttgcgcggaaaaggggaactcaccctggcgttttcggcgcgggtcggcgagcgctcgcttgccctgcgcatggagtatcgcatcaagagactcacaaagcgccagaaggagcgcctcgtgacagaaggtgaagggtttgaggcgttactggccagcctgcaaaccccaacgcttaaaagcgattga

SEQ ID NO: 72566 - DNA, 504 bp, Citrobacter koseri
atgctgattcgagttgaaattcccattgacgcgcccggtatcgacgctttgctgcgccgcacgttcgaaagcgatgcggaagcgaagctggtgcatgacctgcgcgaagatggcttcctgacgctgggtctggtcgccactgacgacgaaggtcaggtggttggctatgtggcgtttagtccggtcgatgtacagggtgaagacctgcaatgggtgggaatggcgccgttggcggtagatgaaaactaccgtggacaagggcttgcgcgccaactggtctacgaaggactggattcactcaacgagtttggctatgcggcggtcgtcacgctgggcgagcctgcattgtacagccgtttcggttttgaactggcggcgcattacgatcttcattgccgctggccgggcaccgaaagcgctttccaggtacaccgcctggcggaagacgcgctggacggcgtgacgggcctggtggaataccacgaccatttcaatcgcttttaa

SEQ ID NO: 72567 - DNA, 525 bp, Citrobacter koseri
gtgttggataaactgcgttcacgcttagtacattttggcccgtctctgatgagtgttccggttaaactgacgccctttgcgctgaagcgccaggttctggaacaggttctgagctggcaatttcgtcaggcgctggcagatggggagcttgagttcctcgaaggccgttggttaagtattacggtgcgtgatattgacctcagatggtacacctctgttgagaacggcaaactgattgtcagtcagaacgctgaggccgacgtgagctttagcgccgatgccagcgacttgttgatgattgcggcgcgtaagcaggaccctgatacgctcttcttccagcgttgtctggtcattgaaggcgatacagagttagggctgtatgtgaaaaacctgatggacgccatcgaactggagcagatgccgaaagcgttacgcattatgctgctgcaactggcggattttgttgaggcgggtatgaaaacctcgccagaaaccaaacagacctcggtaggtgaaccatgctga

SEQ ID NO: 72568 - DNA, 996 bp, Citrobacter koseri
atggagctgctctgccctgccggaaatctcccggcgcttaaggcggccattgagaacggtgctgatgccgtttatatcgggctaaaagatgatactaacgcccgtcacttcgccggtcttaattttactgagaaaaaattgcaggaagcggtgaattacgtccatcaacatcgccgtaaactgcacatcgcgattaacacgtttgcacacccggatggatatgttcgctggcagcgtgccgtggatatggcggcgcaactgggcgcggatgcgctgatcctggccgaccttgctatgcttgagtatgcagcagaacgctatccgcatattgagcgccatgtctctgttcaggcatcggcaacgaatgaagaagcaattaacttctaccatcgcaactttgacgttgcgcgcgtcgtcctgccgcgcgtgctttccattcatcaggtgaaacagctcgcccgcgtcacgcccgtgccgctggaggtcttcgccttcggcagcctgtgcattatggcggagggccgttgctacctctcctcttatctgacgggggaatcccccaataccgtcggcgcctgctctccggcccgcttcgtgcgctggcaacagacctcccaggggctggaatcgcgcctgaacgaggtgctcatcgaccgctatcaggacggtgagaacgccggttatccaacgctgtgtaaaggtcgctatctggttgatggcgagcgctaccacgcgctggaagaacctaccagcctcaacacgctggaactgctgcctgacctgctggcggcgaatatcgcctcggtgaaaattgaagggcgtcagcgcagcccggcgtatgtcagccaggtggcgaaagtgtggcgtcaggcgatcgaccgctgcatggccgacccgcaaaacttcgtcccgcaaagcgcctggatggagacgcttggctccatgtccgaaggcactcagaccacgcttggcgcgtatcaccgtaaatggcagtga

SEQ ID NO: 72569 - DNA, 879 bp, Citrobacter koseri
atgaaatattccttagggccggtgctttactattggtcgaaagagacgctggaagcattttatcagcaggccgccaccagcagcgccgacgtgatttaccttggcgaagcggtgtgcagcaaacgccgcgccaccaaagtgggcgactggcttgatatggcgaaatcccttgccggaagcagcaagcaggtcgtgctctccacgctggcgctggtacaggccgcctctgaattaggcgaactaaaacgctatgtggaaaacggcgacttcctgctggaggccagcgatctcggcgtcgtgaatatgtgcgccgagcgcaagctgccgtttgtcgccggtcatgcgcttaactgctataacgcggtaacgctgcgtctgctgcttaaacagggcatggtgcgctggtgcatgccggtcgagctttcccgcgactggctggtgaatctgctgaatcagtgcgatgagctcggcatccgcaatcagtttgaagtggaagtgctgagctacggtcatctgccgctggcgtactccgcccgctgttttaccgcgcgttcggaagaccgcccgaaagacgagtgtgaaacctgctgcatcaagtacccgaacgggcgcaacgtgttgtcgcaggagaatcagcaggtgttcgtgcttaacggtattcagaccatgagcggctacgtttataacctcggcaacgaactgacctccatgcaggggctggtcgacattgtgcgcctttccccgctgggtacggagacattcgccatgctcgacgccttccgcgccaatgaaaacggcagcgcgccgttgccgctggccgcgcacagcgactgcaacggttactggaaacgcctggccggtctggaactacaggtgtaa

SEQ ID NO: 72570 - DNA, 1008 bp, Citrobacter koseri
atgactgacaaaaccattccattttcgctgctggatctggcaccgatccccgaaggctcctctgcgaaagaggccttctcacactcactggatctcgcccgtctggcagagcggcgcggctatcaccgctactggctggcggaacatcacaacatgaccggtatcgccagcgcggcgacatcggtgctgattggctatctggccgccaataccaccacattgcatctgggttctggcggggtgatgctccccaaccactcgccgctggttatcgccgagcagttcggtacgctgaatacgctctatcctggacggattgatctgggcctggggcgcgcgccgggaagcgatcagcgcaccatgatggcgctacgtcgccatatgagcggcgatattgataatttcccgcgcgacgtcgctgaactggtggactggttcgacgcgcgcgatcccaatccgcatgtacgcccggttccgggctatggcgagaagatcccggtgtggctgctgggttccagcctgtacggcgcacagctggcggcgcagcgtggtctaccgttcgccttcgcctcccacttcgcgcccgatatgctgttccaggcgctgcatctctatcgcacccagttcaagccgtccgcgcggctggaaaaaccgtatgcgatggtgtgcatcaatatcatcgccgctgacagcaatcgcgatgcggaatttctgtttacctctatgcagcaggcgtttgtgaaactgcgtcgcggcgagaccgggcagctacccgcgccaattcaaaatatggatcagttctggtcgccgtccgagcaatatggcgtgcagcaggcgctgagcatgtcgctggtgggcgataaagccaaagtacgtcacgggctggaatctattctgcgcgaaacgcaggcggatgagattatggtcaacgggcagattttcgatcatcaggcgcggctgcattcgtttgacctggcgatgcaggtgaaagaagagttggtggggtag

SEQ ID NO: 72571 - DNA, 1245 bp, Citrobacter koseri
atggcaacactaaccaccacccaaacgtcaccttcgctgcttggcggcgtggtgatcatcggcggcaccattattggcgcgggaatgttctccctgccggtggtcatgtccggtgcgtggttcttctggtcgatggcggcgttggtgtttacctggttctgtatgctgcattccgggctgatgatcctcgaagccaacctcaactaccggattggctccagctttgacaccatcaccaaagacctgctgggtaaaggctggaacgtggtgaatgggatctctattgcctttgtgctctatatcctgacctacgcctatatctcggcgagcggctcgattctgcatcatacctttgctgaaatgtcgctgaacgttccggcgcgggcagcaggttttgcgtttgcgttgctggtggcctttgtcgtctggttgagtacgaaagcggttagccggatgacggcgattgtgctgggcgcgaaagtcatcaccttctttctgaccttcggcagtctgctggggcacgtcacgccggcgacgctgtttaacgtggccgaaagcaacgcgtcttacacgccgtacctgctgatgacattgccgttttgtctggcgtcgtttggttatcacggcaacgtgccaagcctgatgaaatattacggtaaagatccgcgtaccatcgtgaaatgcctggtgtacggtacgctgatggcgctggtgctgtataccatctggctgttgggtacgatgggtaatattccgcgcccggcgtttatcggtattgcgcagcagggcggtaatattgatgtgctggtacaggcgctgagcggcgtactgaacagccgcagtctggatctgctgctggtggtgttctctaactttgcggtggcgagttcgttcctcggcgtgacgctcggtctgtttgactatctggcggatctgtttggttttgatgattcggcgctggggcgcttcaaaactgcgctgctgactttcctgccgccggtgattggcggtctgctgtggccgaacgggttcctgtatgctatcggctatgcggggctggcggcaaccatctgggcagccattgttccggctctgctggcacgagcttcacgccaacgcttcggcagcccgaaattccgcgtctggggcggcaagccgatgattgcgctgatcctggtattcggtatcggcaacgcgctggtgcatattctgtcgagcgtgaacttgctaccagtgtaccagtaa

SEQ ID NO: 72572 - DNA, 1899 bp, Citrobacter koseri
atggctgaattcgaaaccacttttgcagatctgggcctgaaggctcctatccttgacgcccttaacgatctgggttacgaaaaaccatctccaatccaggcagagtgcatcccgcatctgctgggcggtcgcgatgttctgggtatggcccagaccggtagcggcaaaaccgcagcgttctccttaccgctgcttaacaatcttgatcctgagctgaaggcacctcagattctggtgctggcaccgacccgcgaactggcggttcaggttgctgaagccatgacggatttctctaaacatatgcgcggcgtgaacgtggttgccctgtacggcggccagcgttatgacgtgcagttacgcgccctgcgtcaagggccgcagatcgttgtcggtacgccgggacgtctgcttgatcacttaaaacgcggcacgctggatctctctaaactgagcggtctggtgctggacgaagccgacgaaatgctgcgtatgggcttcatcgaagacgttgaaaccatcatggcgcagattcctgaaggtcatcagaccgcactgttctctgccaccatgccggaagcgattcgtcgcattacccgccgctttatgaaagagccgcaggaagtgcgcattcagtccagcgtgaccacgcgtcctgacatcagccagagctactggactgtctggggcatgcgtaaaaacgaagcgctggtgcgtttcctggaagctgaagattttgatgcggcgattatcttcgttcgtactaaaaatgcgaccctggaagtggctgaagcgctggagcgtagcggttacaacagcgccgcgctgaatggcgacatgaaccaggcgctgcgtgagcagactctggagcgtctgaaagacggtcgtctggatatcctgattgcaactgacgttgcggcccgtggcctggacgttgagcgcatcagcctggttgtaaactacgatatcccgatggactccgagtcttacgttcaccgtatcggccgtaccggtcgtgcgggtcgtgctggccgcgcgctgctgttcgttgagaaccgcgagcgtcgtctgctgcgcaacattgaacgcaccatgaagctgaccatcccggaagtggaactgccgaacgcagaactgctgggcaaacgccgtctggaaaaatttgcagcgaaagttcagcagcagctggaaagcagcgatctggatcagtaccgcgcgctgctggcgaaaatccagccgaccgaagaaggcgaagagctggatctcgaaacgctggctgccgcactgctgaaaatggcgcagggcgaacgcacgctgatcgtaccgccggatgcgccgatgcgtcctaaacgtgaattccgtgaccgtgatgaccgtggtccgcgcgatcgtaacgatcgtggtccgcgtgctgatcgtggtgaccgtgaagatcgtccgcgtcgtgaacgtcgtgacgttggcgatatgcagctgtaccgcattgaagtgggccgtgatgacggtgttgaagtgcgtcatatcgttggcgcgattgctaacgaaggcgacatcagcagccgttacattggtaacatcaagctgtttgcttcccactccaccattgagctgccgaaaggtatgccgggtgaggtgttgcagcactttacgcgcacccgcatcctgaacaagccgatgaacatgcagctgctgggcgatgcgcaaccgcattccggtaacgagcgtcgtggcggtggtcgtagcttcggtggcgagcgtcgtgaaggcggtcgtggttttggcggtgagcgccgtgaaggtggccgtggtgatggtcgtcgtttcagcggtgagcgtcgtgaaggccgtgcgccgcgtcgtgacgactccaccggtcgtcgtcgtttcggcggtgatgcgtaa

SEQ ID NO: 72573 - DNA, 885 bp, Citrobacter koseri
atgaagccttttttgcgctggtgtttcgttgcgacagcactcacgctggcaggatgcagcaactctgcctggcgtaagagtgaagtcctcgcggtgccattgcaaccgactttgcagcaggaagtgattctggcacgcatggaacaaattcttgccagtcgggctttaaccgatgacgaacgcgcacagcttttatatgagcgcggagtgttgtatgatagtctgggtctgagggcattagcgcgaaatgatttttcacaagcgctggcaatccgaccggatatgcctgaagtattcaattacttaggcatttatttaacgcaggcaggcaattttgatgctgcctatgaagcgtttgattctgtacttgagcttgatccaacttacaactacgcgtacttaaatcgcggtatcgcattgtattacggcggtcgcgacaagttagcgcaagatgatctgctggcgttttatcaagacgatcccaatgatcctttccgcagcctgtggctttatctcgctgagcagaagctcgatgagaagcaggcgaaagaagcgttaaagcaacgcttcgagaaatcggataaagaacaatggggatggaacattgtcgagttctacctgggcaacattagcgaagcaacgctgatggaacgcctgaaggcggacgcaacggataacacctcgctcgctgagcatctcagtgaaaccaacttctatttaggtaagtattacctaagtctgggggatttggacaacgctacggcattgttcaaactggcggtggctaacaacgttcataactttgttgagcaccgatacgcattgttggaattatcgctcctgggccaggaccaagatgacctggcagaatcggaccagcaatag

SEQ ID NO: 72574 - DNA, 2136 bp, Citrobacter koseri
ttgcttaatccgatcgttcgtaaattccagtacggtcagcataccgttacgctggaaactggcatgatggcgcgtcaggcaactgccgccgttatggtaagcatggatgacactgcggtattcgttaccgttgttggtcagaaaaaagcgaagccgggccaggatttcttcccgctgaccgttaactatcaggagcgtacttacgctgctggccgtatcccgggcagcttcttccgtcgtgaaggccgtccgagcgaaggcgaaaccctgatcgcgcgtctgattgaccgcccggttcgtccgctgttcccggaaggcttcgttaacgaagttcaggttatcgcaaccgtcgtttccgttaacccgcaggttaacccggatatcgtcgcgatgatcggtgcttccgccgcgttgtctctgtccggcattccgttcaacggcccgattggcgccgcgcgtgttggttatatcaatgaccagtatgtactgaacccgactcaggacgaactgaaagaaagtaagctggacctggtggttgccggtactgaagcggctgttctgatggttgaatccgaagcagaactgctgagcgaagacaccatgctgggcgccgtggtattcggccacgagcagcagcagattgtgattcagaacatcaacgatctggtgaaagaagcgggcaaaccgcgttgggactggcagccggaagcggtaaacgaagcgctgaacgcgcgcgttgctgcactggccgaagctcgcctgagcgacgcttaccgtatcaccgacaaacaggagcgttatgctcaggttgacgtgatcaaatccgaaaccatcgctgcgctggttgcagaagacgaaaccctggacgaaaacgaactgggcgaaatcctgcacgctatcgagaaaaacgttgttcgtagccgcgtactggccggcgagccgcgtattgatggccgtgaaaaagacatgatccgtggtctggacgtgcgtactggcgtgctgccgcgtactcacggttccgcgctgttcactcgtggcgaaacgcaggcgctggtcacggcgacgctgggtaccgctcgtgacgcgcaggttcttgatgaactgatgggcgaacgcactgacagcttcctgttccactacaacttccctccgtactccgttggcgaaaccggcatggtcggttctccgaagcgtcgtgaaattggtcacggtcgtctggcgaagcgcggcgttctggcagttatgccggaaatggacaaattcccgtacaccgttcgcgtggtgtctgaaattaccgaatccaacgggtcttcctctatggcttccgtgtgtggcgcttccttggcgctgatggacgcaggcgtgccgattaaagcggccgttgcgggtatcgcgatgggtctggtgaaagaaggcgacaactttgttgttctgtctgacatcctgggcgacgaagaccacctgggcgatatggacttcaaagtggcgggttcccgcgacggtatctctgcgttgcagatggatatcaaaattgaaggtatcaccaaagagatcatgcaggttgcgctgaaccaggcaaaaggtgcgcgtctgcacatcctgggcgtgatggaacaggcgatcaacgcgccgcgtggcgacatttctcagttcgctccgcgtatccacaccatcaagatcaacccggacaagatcaaagacgttatcggtaagggcggttctgttatccgtgctctgaccgaagaaaccggcaccaccattgaaattgaagatgacggtacggtgaagatcgcggcgaccgacggcgaaaaagcgaaacatgctatccgtcgtatcgaagagatcactgcggaaatcgaagtgggccgtatctacaatggtaaagtgacccgcatcgttgactttggcgcgtttgttgccattggcggcggtaaagaaggtctggtacatatctctcagatcgctgacaagcgcgtagagaaagtgaccgattacctgcaaatgggtcaggaagtaccggttaaagttctggaagttgatcgccagggtcgcgtacgtctgagcattaaagaagcaactgagcagtctcaaccagctgctgcgccggaagctccggcagcagaacagggcgagtaa

SEQ ID NO: 72575 - DNA, 270 bp, Citrobacter koseri
atgtctctaagcgttgaagctaaagctaaaatcgtttctgagtttggtcgtggtactaacgacagcggttctaccgaagttcaggttgctctgctgactgcacagattaaccacctgcagggccactttgcagagcacaaaaaagatcaccacagccgtcgtggtctgctgcgcatggtttctcagcgtcgtaaactgctcgactacctgaaacgtaaagatgttgcacgttacaccgcgctgatcgagcgtctgggtctgcgtcgctaa

SEQ ID NO: 72576 - DNA, 945 bp, Citrobacter koseri
atgagtcgtcctcgtcgtcgtggtcgcgacattcacggcgtcctgctgctggataagccgcagggcatgtccagcaatgacgtcttgcagaaagtaaaacgcatctataacgccaaccgtgccggacataccggcgcgctggacccgctggcgacaggcatgttgcccatctgcctcggggaagcgacaaagttttcgcagtatctgctggattctgacaaacgttaccgcgtgattgcccgcctggggcagcgtaccgacacctccgatgccgatggtcaaatcgtgcaggaacgtccggtaaccttcagcgcagagcagttagctgccgcgctggagacgttccgtggcgatatcgagcagattccatcgatgtattcggcgctgaagtatcagggcaagaagctctacgaatatgcgcgtcaggggattgaagttccccgtgaagcccgcccgattaccgtttacgaactgctgtttattcgccacgaaggggatgaactggagctggaggttcactgctcgaagggcacctacattcgcaccattatcgatgatttgggggagaaacttgggtgtggcgcgcatgtgatcttcctgcgacgtctggcggtcagtaaatatccggttgaccgtatggtcacgctggaacagctacgtgagcttgttgaacaggcggaacggcaggatattccggctgcgcaactgttagatccgctgctgatgccgatggacagtccagcttcggactatccagttgtcaatcttcctttaacgtcatcggtttactttaaaaacggtaacccggtacggacgacaggcgtaccgcttgaagggctggttcgcgtgacggaaggtgatgacgaaaaatttattggcatgggcgaaatcgacgatgaaggccgcgtggcgcctcgtcggttagtggttgagtacccggcgtaa

SEQ ID NO: 72577 - DNA, 402 bp, Citrobacter koseri
atggcgaaagaatttggtcgcccgcagcgcgtagcccaggaaatgcaaaaagagatcgctatcatcctgcaacgcgaaattaaagatccgcgtcttggcatgatgaccaccgtttccggtgtggagatgtcccgcgatctggcctatgccaaagtgtatgtcacctttctgaacgacaaagatgaagacgcggtaaaagcgggcatcaaagcgttgcaggaagcgtctggctttatccgtaccctgctggggaaagcgatgcgtctgcgtattgtgccggaactgaccttcttctacgacaactcgctggttgaagggatgcgtatgtctaacctggtgactaacgtggtgaaacatgacgaagaacgtcgtgtgaacccggacgacagcaaggaggactaa

SEQ ID NO: 72578 - DNA, 2685 bp, Citrobacter koseri
atgacagatgtaaccgtaaaagcgctggccgcagagatacagacctccgtggatcgcctggtacagcaattcgctgatgccggtatcccgaagtctgctgatgactctgtgtccgcacaagaaaaacagactttactggcgcacctgaatcgtgaaaatggttcagggccggataagttgacgctgcaacgtaaaacgcgcagcacgttgaatattccaggtaccggtggaaaaagtaaatcggtacaaatcgaagtccgcaagaaacgcacctttgtgaaacgcgatccgcaagagacagaacgtctcgctgcggaagagcaggcgcagcgtgaagcggaagagcaagcccgtcgtgaggcagaagaaacagccaaacgcgaggcgcaacaaaaagctgaccgtgaggccgcagaacaagctaagcgtgacgccgctgaaaaagcgaaacgtgaagctgcggaaaaagacaaagtgagcaatcaacagactgacgatatgaccaaaaccgcccaggccgaaaaagcccgccgtgaaaatgaagcagcagagctgaagcgtaaagcggaagaagaagcgcgtcgcaaacttgaagaagaagcgcgtcgcgtagcagaagaagctcgccgcatggcggaagagaacaaatggactgataacgcggagccgactgaagacaccagcgattatcacgttaccacgtctcaacacgcccgccaggccgaagacgaaaacgaccgtgaagttgaaggcggccgtggtcgtagtcgcaatgcgaaagcggcgcgtccggcgaaaaaaggcaacaaacactctgaatcgaaagccgatcgtgaagaagcccgtgcggccgttcgcggcggtaaaggcggtaaaaaccgtaaaggttctgctctgcaacagagcttccagaaaccggttcaggctgttaaccgtgacgttgtgattggtgaaaccatcaccgttggcgagctggcgaacaagatggcggtaaaaggctctcaggtcatcaaagcgatgatgaaactgggcgcgatggcaaccatcaaccaggtcatcgaccaggaaaccgcacagctggttgctgaagagatgggccacaaagttatcctgcgtcgtgaaaacgagctggaagaagcggtaatgagcgaccgtgacacgggtgctgcggctgaaccgcgcgcaccggttgtgaccatcatgggtcacgttgaccacggtaaaacctctctgctggactacattcgttctacgaaagttgcctctggcgaagcgggcggcattacccagcacatcggtgcttaccacgttgaaaccgacaacggtatgatcaccttcctggataccccgggtcacgccgcgtttacctctatgcgtgctcgtggtgcgcaggcaacggatatcgttgttctggttgtggcggcagacgacggcgtgatgccgcagaccatcgaagctatccagcacgcgaaagcggcgggtgtgccggttgtggttgcggtgaacaagatcgataagccagaagccgatccggatcgtgttaaaaacgaactgtcccagtacggcatcctgccggaagagtggggtggcgaaagccagttcgtccacgtatctgcaaaagcgggtactggcatcgacgaactgctggatgcaatcctgttgcaggctgaagtcctcgaactgaaagcagttcgtaaaggcatggcgagcggcgcggtaatcgaatccttcctggataaaggtcgtggtccggttgcaaccgtcctggttcgtgaaggtacgctgaacaaaggcgacatcgtcctgtgtggcttcgaatatggccgcgttcgtgcaatgcgtaacgaactgggtcaggaagtgctggaagcgggtccgtccattccggttgagatcctgggtctgtccggcgttccggctgccggtgatgaagtgaccgtggttcgtgacgagaagaaagcccgtgaagttgcgctgtatcgtcagggtaaattccgcgaagttaaactggcgcgtcagcagaaatctaaacttgagaacatgttcgctaacatgaccgaaggcgaagttcatgaagtgaacatcgtactgaaagcggacgttcagggctctgtggaagcgatctccgactctttactgaaactgtctaccgacgaagtgaaagtgaagatcattggttccggcgtaggtggtatcaccgaaaccgacgcaaccctggctgctgcatccaatgcgatcctggttggcttcaacgtgcgtgctgatgcctctgcgcgtaaagtgattgaagcggaaagcctggatctgcgctactactccgtcatctataacctgatcgacgaagtgaaagcggcaatgagcggcatgctgtctccagaactgaaacagcagatcattggtctggctgaagtccgtgacgtgttcaaatcgccgaaatttggcgctgtcgcaggctgtatggttactgaaggtacgattaaacgccacaacccgatccgcgtactgcgcgacaacgtggttatctacgaaggcgagctggaatccctgcgccgcttcaaagatgacgttaacgaagtccgtaacggcatggaatgtggtatcggcgttaagaactacaacgacgttcgcgttggcgatatgatcgaagtgttcgagatcatcgagatccaacgtacgattgcgtaa

SEQ ID NO: 72579 - DNA, 1488 bp, Citrobacter koseri
atgaacaaagaaattttggccgttgttgaagccgtttccaatgagaaagcgctgccacgcgagaagatttttgaagcgctggaaagtgcgctggctacagcaacgaagaaaaaatacgaacaagagatcgatgttcgcgtacaaatcgatcgtaaaagcggtgatttcgataccttccgtcgttggttaatcgtagaagaagtcacgctgccgacaaaagaaattacgctggaagcggcgcgttttgaagacgaaagcctgaacctgggcgactacgttgaagatcagattgaatctgtcacctttgaccgtatcaccacccagacggcaaaacaggttatcgtacagaaagtacgtgaagccgagcgtgcgatggtggtcgatcagttccgcgagcacgaaggcgaaatcatcaccggcgtggtgaagaaagtaaaccgcgacaacatctctttggatctgggcagcaatgctgaagccgtgatcctgcgtgaagatatgctgccgcgcgaaaacttccgtcctggcgaccgtattcgtggcgttctgtactccgttcgcccggaagcgcgcggtgcgcaactgtttgtgacgcgttccaaaccggaaatgctgatcgagctgttccgtatcgaagtaccggaaatcggcgaagaagtcatcgaaattaaagcggcggcccgcgatccgggttcccgtgcgaaaatcgcggtgaaaaccaacgacaagcgtatcgatccggtcggcgcctgtgtgggtatgcgtggtgcgcgcgttcaggccgtttctactgaactgggcggcgagcgtatcgatatcgtcctgtgggatgataacccggcgcagttcgtgattaacgcgatggcgccagcagacgtcgcttctatcgtggtggatgaagataaacacaccatggatatcgctgttgaagccggtaacctggctcaggcgatcggacgtaatggtcagaacgtccgtctggctgcgcaactgagcggctgggaacttaacgtgatgacggttgatgacttgcaggctaagcatcaggctgaagcacatgcagctatcgataccttcaccaaatatctcgatattgatgaagagttcgcaaccgtactggttgaagaaggtttcgcgacgctggaagaactggcctacgtgccaatgaaagaactgctggaaatcgacgggctggatgaaccgaccgttgaagcgctgcgcgagcgtgccaaaaacgcactgaccactctggcactggcccaggaagaaagccttggtgataacaaaccgtctgacgatctgctgaatctggaaggattgggtcgcgacctggcattcaaactggctgcccgtggtgtttgtacgctggaagatctcgctgagcagggcattgatgatctggctgatatcgaagggttgaccgacgaaaaagccggtgagctgattatggctgcccgtaatatttgctggttcggcgacgaagcgtaa

SEQ ID NO: 72580 - DNA, 453 bp, Citrobacter koseri
ttgtccacattagagcaaaaattaacagagatgattacagcgccagttgaagccttaggttacgaactggtcggcatcgaatttattcgcggtcgcacatccacactgcgcatctatattgatagtgaagatggcatcaatgttgatgattgtgctgatgtgagtcaccaggtgagcgcggtgctggatgtcgaagatcccatcactgtggcatacaacctggaagtctcctcgccaggtctcgaccgtcctatgttcacggctgagcactacgcgcgtttcctgggtgaagaagtgacgctggtacttcgtatggcggtacaaaaccgtcgtaaatggcagggcgttatcaaagcggttgacggtgaaatgatcactgtcacagtcgaaggtaaagatgaagtgttcgcgctgagtaatatccagaaggcgaacctggttccccacttttaa

SEQ ID NO: 72581 - DNA, 1344 bp, Citrobacter koseri
atgacgacgattctcaagcatcttccggtaggtcaacgtattggtatcgctttttccggcggcctggacaccagtgctgcactgctgtggatgcgacaaaaaggcgctgtcccttatgcatatactgcgaatctgggtcagccggatgaggatgactatgacgccattcctcgtcgcgcaatggaatacggcgcagagaacgctcgcctgattgattgccgtaaacagctggttgccgaagggatcgccgcgattcagtgcggcgctttccataacaccaccggcggactgacctatttcaacaccacgccgctgggccgtgccgttaccggcacgatgctggtcgccgcgatgaaggaagatggtgttaacatctggggcgacggcagtacctataaaggaaacgacatcgagcgtttctaccgttacggcctgttgaccaacgcggagctacagatttacaaaccgtggctggataccgactttattgatgagctgggcggtcgtcatgagatgtccgagtttatgattgcctgcggtttcgactacaagatgtccgtcgaaaaagcctattccactgactccaacatgctcggcgcgacccatgaagccaaagatctggaattcctgagctccagcgtcaaaatcgtcaatccaatcatgggcgtcaagttctgggatgaaaacgtgaaaatcccgtcggaagaagttaccgtgcgctttgaacaggggcatcctgtcgcgctaaacggtaagaccttcagcgatgatgttgagctgatgctggaagccaaccgtatcggcggccgtcacggtctgggtatgagcgatcagattgagaaccgtatcatcgaagcgaagagccggggtatctatgaagcgccggggatggctctgctgcatatcgcctatgagcgtctgctgaccggcatccacaacgaagacactatcgagcaatatcatgcgcatggccgtcagttaggccgcctgctgtatcagggccgctggtttgactcccaggcgctgatgctgcgtgacggtctgcaacgttgggtggccagccagattactggtgaagtcacgctggagctgcgtcgtggtaacgactactcgatcctgaataccgtctctgacaatctgacctacaaaccagagcgtctgacgatggaaaaaggtgactccgtgttctcgccggatgaccgtatcggtcagttgacgatgcgcaatctggatatcaccgatacgcgtgaaaaactgtttggttatgcgcagtcaggcctgctttccgcctcttccgcgacaggtttgccgcaggttgagaatctggaaaacaaaagcaagtaa

SEQ ID NO: 72582 - DNA, 333 bp, Citrobacter koseri
atgtacgaagctcttttggtagttttccttattgtggcaattggcctggtaggcttgatcatgctacagcaaggtaaaggcgctgatatgggagcctcctttggagcaggcgcttccgctacgctgtttggttcaagtggttctggtaacttcatgacccgtatgacggctgtactggcaacgttgttcttcatcatcagtctggcgctgggcaatatcaacagcaacaagaccaataaaggaagtgagtgggaaaatctgagcgctccggcaaaaaccgagcagactcagccagttgcaccggcacagccgagcagcgatatcccacactaa

SEQ ID NO: 72583 - DNA, 1338 bp, Citrobacter koseri
atgagtaatcgtaaatattttggcaccgatgggatccgtggtcgtgtaggcgatgcgcccattactcctgactttgtgcttaagctgggctgggccgcagggaaagtgctggcgcgtcatggttcacgtaaaatcattatcggtaaagacacgcgtatttctggctatatgctggagtctgcgctggaagccggtctggcggcggcgggattgtctgcctcttttaccggcccgatgccgacgcctgcggtggcttacctgacccgaaccttccgtgcagaggccgggatcgttatctccgcttcgcataacccgttttatgacaacgggattaaattcttctccattgacggcaccaaactgcctgatgaagttgaagaggccattgaagcagagatggaaaaagagatcacctgcgtggattcctctgagctgggtaaagccagccgtattgtggatgctgcggggcgctacattgagttctgcaaaggtacgttcccgaacgaactgagcctgaatgagctgaagattgttgtggattgcgccaacggtgcgacctatcacattgcaccgaacgtcctgcgtgaactgggtgcgaatgtcattgcgattggctgtgagccgaacggcgtcaatattaatgaagaagtcggcgctacggacgtgcgtgcgctacaggcgcgcgtgatcgcggagaaagccgatttagggattgcgctggacggcgacggcgatcgcgtgatcatggttgaccatgaagggaataaagtcgatggcgatcagatcatgtatatcatcgcccgcgaaggtttgcgtcagggtcaactgcgcggtggcgcagtcggtacgctgatgagcaacatgggcctggagctggcgttgaaacagctgggtattccgtttgcgcgtgctaaagttggcgaccgctacgtgctggaaaaactgcaagaaaaaggctggcgtattggggcggaaaactccggccacgttattctgctggataaaaccaccaccggtgacggtattgtcgcggggctacaggttctggcggcgatggtgcgtaaccacatgagtctgcacgatttgtgcagcggcatgaaaatgttcccgcagattctggttaacgtacgttatgcagccggtagcggcgatccgctggagaatgacaacgttaaggcggtgacggcggaagtcgaagcggtgctgggaaatcgtggtcgcgtgctgctgcgtaagtccggtactgaaccgttaattcgcgtaatggtagaaggcgaggatgaagcgcaggttactgagtttgctcatcgtattgcggatgccgtaaaagcggtttaa

SEQ ID NO: 72584 - DNA, 849 bp, Citrobacter koseri
atgaaactcttcgcccagggctccacgctggatctctctcacccacacgtaatgggcatcctgaacgtcacgccggattctttctccgatggcgggacgcacaatacgctggtggaggcggtgaagcacgctaatctgatgattaacgccggagcgacgattattgatgtcggcggcgaatcaacgcgacctggcgcggcggatgtcagcgttgaagaagaactggaacgcgtgatcccggtggttgagtccatcgtccagcgttttgaggtatggatttcagtggatacctcaaaaccggaggtaattcgggaatcggcaagagtgggtgctcacatcatcaacgacattcgctctctctctgaaccgggcgcgcttgaggcggcggctgagactggtttaccggtctgcctgatgcatatgcaagggcagcctaaaacaatgcaggaagcgccaaagtacgaagacgtttttgcggaggtcaatcgctactttattgaccaaatagcacgctgtgaaagggctggcatcgcaaaagagaaattgttgctcgacccgggattcggtttcggtaaaaatctctcccataactatacgttactggcacgtctggcggagttccatcattttaacctgccgctgctggtgggaatgtcacgtaaatcgatgattggtcagttgctcaacgtcgggccctccgatcgtttgagtgggagcctggcgtgtgcggttatcgccgcaatgcagggggcgcatatcattcgtgtccatgacgttaaagaaaccgtagaagcgatgcgtgtggtagaagccaccctgtctgcaaaggaaaataaacgctatgagtaa

SEQ ID NO: 72585 - DNA, 1944 bp, Citrobacter koseri
ttgagtgacatggcgaaaaacctaatactctggctggtcattgccgttgtgctgatgtcagtattccagagctttgggcccagcgagtctaatggccgtaaggtggattactctaccttcctgcaagaggtcaaccaggaccaggttcgtgaagcgcgtatcaacggacgtgagatcaacgttaccaagaaagatagtaaccgttacacgacctacattccggttaacgatccgaagctgcttgataacctgctgaccaaaaacgtcaaggttgttggcgaaccacctgaagagccgagcctgctggcttcaatctttatttcctggttcccgatgctgttgctgatcggcgtctggatcttcttcatgcgtcagatgcagggcggcggtggcaaaggcgccatgtcgttcggtaagagtaaagcgcgcatgctgacggaagatcagatcaaaaccacttttgccgatgtcgcaggttgtgacgaagcgaaagaagaagtggctgagctggtcgagtatctgcgtgaaccaagccgcttccagaagctgggcggtaaaatcccgaaaggcgtcctgatggtcggccctccgggtacgggtaaaaccctgctggcgaaagctattgcaggcgaagcgaaagtcccgttctttacgatttccggttctgacttcgtcgaaatgttcgtcggtgttggcgcatctcgtgtgcgtgacatgttcgaacaggctaagaaagcggcgccgtgcattatcttcattgatgaaatcgacgccgtaggccgccagcgtggcgcgggtctgggcggcggtcatgatgaacgtgaacagacattgaaccagatgctggttgagatggacggcttcgaaggtaacgaaggtatcatcgttatcgcggcgactaaccgtccagacgtacttgaccctgcgctgctgcgtcctggccgtttcgaccgtcaggtcgtggtaggtctgccagacgtgcgtggtcgtgagcagatcctgaaagtgcatatgcgtcgcgtaccgctggcgccggatatcgatgcggcaatcatcgcacgcggcacgccgggcttctctggcgccgatctggcgaaccttgtgaacgaagcggcgctgtttgctgcccgtggcaacaagcgtgtggtctccatggttgagttcgagaaagcgaaagacaaaatcatgatgggtgcggaacgccgctccatggtgatgacggaagcgcagaaagaatctaccgcttaccacgaagcaggccatgcgattattggtcgccttgttcctgagcacgatccggtgcataaagtgacgattattccgcgcggtcgtgcgctgggtgtgaccttcttcctgcctgaaggcgacgcgattagcgccagccgtcagaaactggaaagccagatctccacgttgtacggcggtcgtctggcggaagagatcatctatggcgtagagcatgtttctaccggtgcgtcgaacgacattaaagtcgcgactaacctggcgcgtaacatggtcacccagtggggcttctccgataagctcggtccgctgctgtatgcagaggaagagggtgaagtgttcctgggacgtagcgttgcgaaagccaaacacatgtctgatgaaaccgcgcgtatcatcgaccaggaagtgaaagcgctgattgaacgtaactacaatcgcgctcgtcagatcctgaatgacaatatggacatcctgcatgcaatgaaagatgcgctcatgaagtatgagaccatcgatgcgccgcagattgatgacctgatggcgcgccgcgaagttcgcccgccagctggctgggaagatccgaacggcaccaacaactctgacaacaatggcacgcctcgtgcgccgcgcccggttgatgaaccgcgtacgccgaacccaggcaacaccatgtcagagcagttaggcgacaaataa

SEQ ID NO: 72586 - DNA, 630 bp, Citrobacter koseri
atgacaggtaaaaagcgttctgccagctcgagtcgctggcttcaggaacactttagcgataaatatgttcaacaggcgcagaaaaaggggttacgttcccgtgcctggtttaaacttgatgaaatacagcaaagtgacaaactttttaagccggggatgacagttgtcgacctcggtgctgcgccaggaggctggtcacagtatgtggtcacgcagattggcggcaaaggccgtatcatcgcttgcgatcttttacctatggatcctatcgttggtgtggactttcttcagggcgattttcgtgatgaacttgttatgaaagcgctgctggaacgcgtgggtgacagtaaagtacaagttgtcatgtcagatatggcaccaaacatgagcggaacaccggcggtggatatcccccgcgccatgtatctggtggaactggcgttagaaatgtgtcgtgatgtgctggcgccaggtggaagttttgtagtgaaggtgttccagggcgaaggtttcgatgagtacctaagggaaattcgctccctgtttacgaaggttaaagttcgtaagccggactcttcgcgtgcgcgttcacgcgaagtgtatattgtagcgaccgggcgaaaaccataa

SEQ ID NO: 72587 - DNA, 333 bp, Citrobacter koseri
atgacccgttttcaatcccaacgtaagcaaaaatatacgatgaatctgagtactaaacaaaaacagcacctgaaaggtctggcacatccgctcaagccggtagttatgcttggcaacaatggtttgaccgaaggggtactggccgagattgaacaagcgttagagcaccatgaacttatcaaggtgaagatcgcctcggaagatcgcgaaaccaaaaccttgatcgtggaagctatcgtacgcgaaaccggcgcctgtaacgtacaggtcatcggtaaaacgctggtactttatcgcccaactaaagaacgtaaaatctcgctgccacgctaa

SEQ ID NO: 72588 - DNA, 477 bp, Citrobacter koseri
atgcaagctattccgatgactttacgtggtgccgaaaaactgcgcgaagagctggattttctgaaatctgtgcgccgtcctgaaatcatcgccgctatcgcggaagcgcgtgagcatggcgacctgaaagagaacgccgagtatcacgctgcgcgtgaacagcagggtttctgcgaaggacgtatcaaggatatcgaggcgaagctgtcgaatgcgcaggtgatcgacgtgacgaagatgccgaacaacggacgtgttgttttcggcgcaacggtaactgttctgaatctcgataacgatgaagagcagacctggcgtattgtcggcgatgacgaagcggattttaaacagaacctgatttccgtgaattcacctatcgcgcgcggcctggttggcaaagagcaggatgacgtcgtgaccatcaaaacgcctggcggcgaagtggaatacgaagtgattaaggtggaatacctgtaa

SEQ ID NO: 72589 - DNA, 1434 bp, Citrobacter koseri
atgcgattttccagatttatcatcggattgaccaccagtatagcgttcagcgtccaggccgcgaatgttgatgaatacatcaatcagctccctgatggggccaaccttgctttcatggctcagaaggtcggcgcgtccacgcccgcgattgattaccatagccagcagatggcgctgcccgccagtacgcaaaaagtgatcacggccctcgcggcattgattcagctcggccccgattttcgttttagcaccacgctggagacaaaaggcaacgtggacaatggcgtcttaaaaggggacttagtggcgcgatttggtgccgatccgacgctaaaacgccaggatattcgcaatatggtcgcaacgctgaaaaaatccggcgtgacgcaaattgcgggaaatgtgctcatcgacacctccattttcgccagccatgataaagcgccaggctggccctggaatgacatgacgcaatgttttagcgcaccacccgcagccgccattgtcgatcgcaactgcttttccatctccctctacagcgcgcaaaaaccgaatgacttagcgtatattcgcgtggcgtcctattacccggtgaccatgttcagtcaggttcgcactctcccacgcggctctgcggaagcgcaatactgtgagctggatgtcgttccgggggatttaaaccgcttcacgctgacaggctgcctgccgcagcgcgccgaaccgttaccgctggccttcgccattcaggacggtgccagctatgccggagcgatcctgaaagacgagttaaaacaagcaggtattacctacagtggtacgctgttacgccagacgcaagtcaacgaacccggaacggtggttgccagcaagcagtctgcgccgctgcatgatttgcttaagattatgctgaaaaaatcggacaacatgattgccgataccgtctttcgcatgatcggccacgcacgcttcaacgttcccggcacatggcgggcgggatctgatgccgtacgccagatcctgcgtcagcaggctggcgttgatattggcaataccatcatcgctgacggttcgggcctctctcgccacaacctgattgccccggccaccatgatgcaggtgctgcaatacatcgcccaacacgacaacgagctgaactttatctccatgctgccgctggcgggatatgacggctctctgcaataccgtgcgggtctgcatcaggctggggtcgatggtaaagtttcggcgaaaacaggctcgctgcaaggggtctataatctggcgggatttattacaacggcaagtgggcaacggatggcgtttgttcagtatctttccgggtatgccgttacgccagctgaccagcgcaatcgtcgtattccgttagtacgttttgaaagccggttgtacaaagatctttatcagaacaactag

SEQ ID NO: 72590 - DNA, 1173 bp, Citrobacter koseri
atgaagtttgttgatgaagcatcgattctggtcgttgctggcgatggcggtaatggttgcgtgagcttccgccgcgaaaaatacatcccgaaaggcggcccggatggcggtgatggcggcgatggcggcgacgtctggctggaagccgacgaaaacctgaacacgctgatcgattaccgctttgaaaaatcgttccgcgctgaacgtggtcagaatggcgcaagccgtgactgcaccggtaaacgtgggaaagatgtcacgatcaaagtgcctgtcggtacgcgtgttatcgatcagggcaccggcgaaaccatgggcgatatgaccaaacacggtcagcgtctgatggttgccaaaggcggctggcacggcctgggcaatacccgctttaagtcctctgttaaccgtactccgcgtcagaaaacgatgggtacgccgggcgataagcgcgatttgatgctggagctgatgctgttggcggacgtgggtatgctgggtatgccaaacgccggtaaatcaacctttatccgcgcggtatctgcggcaaaaccgaaagtggcggactatccgtttaccactctggtgccgagccttggcgttgtgcgtatggacaacgaaaagagctttgtggttgccgatattccggggctgattgaaggcgcggcggaaggcgcgggtctggggattcgcttcctgaagcacctggaacgttgccgcgtactgctgcaccttattgatatcgatccgatcgacggttccgatccggtggaaaacgcccgtatcattatcggcgaactggaaaaatacagtcaggatctggctgctaagccgcgctggttagtgttcaacaaaattgatttgctggaccaggccgaagcggaagaaaaagcgaaagctatcgcgcaggcgctgggctgggaagataagtactacatgatttccgctgccagccagactggcgtgaaagatctctgctgggatgtgatgacctttatcattgagaaccccatcgttcaggctgatgaagcgaagcagccggagaaagtggagttcatgtgggacgattatcaccgccagcagctcgctgaagtcgaagatgaagcagaagatgactgggatgacgactgggacgaagacgacgaagaaggcgtcgagttcatctacaagcgttaa

SEQ ID NO: 72591 - DNA, 966 bp, Citrobacter koseri
atgaagcagcaggctggcattggcatccttttagcactcaccactgcaatgtgttggggcgccttgccaattgcaatgaagcaggtgctggaggtgatggaacctccgaccattgtcttctatcgctttttaatggcgagtatcggcctcggcgcgatcctggcagttaaaagaaagctcccgccattgcgtatttttcgcaaaccgcgctggctggtgttgctggcgattgcaacaggtggacttttcgggaatttcatcctgttcagctcttctctgcaatatttgagtccgacggcatcgcaggttatcggtcagctgtcaccggttggcatgatggtcgccagcgtctttattttgaaagaaaagatgcgcggcacgcaggtgattggcgcgctcatgctgctttgtgggctggtgatgttctttaataccagtctggtcgagatttttaccaaactgaccgattacacctggggtgtgatctttggggtcggtgcggcgacggtctgggtgagttatggcgtcgcgcaaaaggtgttattgcgtcgtctggcctcacagcagatcctgtttttactgtacactttatgtacgattgcgttattgccgctggcgaagccgggggttatctcgcagttaagcgactggcagctcgcgtgtttgattttctgtgggctgaatacgctggtaggatatggcgccctggcggaagcgatggcgcgttggcaggcagcgcaggtgagtgcgttaatcacgctcactccgctgtttacgctgttattttcagatctattatctatggcctggcccgatttcttcgccagaccgatgttaaaccttttaggttatctcggtgcgtttgtcgtggttgcgggcgcgatgtattccgccattggtcatcgtatttggggcggtttacgcaagcatgaaacggtggtttcgcaaccccgctcaggcgaatga

SEQ ID NO: 72592 - DNA, 258 bp, Citrobacter koseri
atggcacataaaaaggctggcggctcaactcgtaacggtcgcgattcagaagctaaacgcctgggcgttaagcgtttcggtggcgaaaccgttctggcgggtagcatcatcgttcgtcaacgtggcaccaaattccacgctggcactaacgtaggttgcggtcgtgaccacactctgtttgctaaagcagacggtaaagtgaaattcgaagttaaaggcccgaacaaccgtaaatacatcagcatcgttgctgagtaa

SEQ ID NO: 72593 - DNA, 312 bp, Citrobacter koseri
atgtacgcggttttccaaagtggtggtaaacaacaccgagtaagcgaaggtcagaccgttcgcctggaaaagctggacatcgcaactggcgaaactattgagttcgctgaagttctgatgatcgcaaacggtgaagaagtcaaaatcggcgttcctttcgttgatggcggcgtaatcaaagctgaagttgttgctcacggtcgtggcgagaaagttaaaatcgttaagtttcgtcgtcgtaaacactatcgtaagcagcaaggccaccgtcagtggttcactgatgtgaaaattactggcatcagcgcctaa
